(19) United States
(12) Patent Application Publication
(10) Pub. No.: US 2019/0224339 A1
(43) Pub. Date: Jul. 25, 2019

(54) COMPOSITIONS FOR THE TREATMENT OF DISEASE

(71) Applicant: VOYAGER THERAPEUTICS, INC., Cambridge, MA (US)

(72) Inventors: Steven Paul, Cambridge, MA (US); Wencheng Liu, Cambridge, MA (US); Jinzhao Hou, Cambridge, MA (US); Yanqun Shu, Cambridge, MA (US)

(21) Appl. No.: 16/097,431

(22) PCT Filed: Apr. 28, 2017
(86) PCT No.: PCT/US17/30060

§ 371 Date: Oct. 29, 2018

Related U.S. Application Data
(60) Provisional application No. 62/329,457, filed on Apr. 29, 2016.
(60) Provisional application No. 62/367,351, filed on Jul. 27, 2016.
(60) Provisional application No. 62/433,973, filed on Dec. 14, 2016.

(51) Int. Cl. A61K 48/00; C07K 14/005; C12N 15/86; C07K 14/47; C07K 16/18; C12N 15/113; C12N 15/62; A61K 9/00; A61K 9/14; A61P 35/00; A61P 25/28; A61P 25/16

(52) U.S. Cl. CPC A61K 48/0058; C07K 14/005; C12N 15/86; C07K 14/47; C07K 16/18; C12N 15/113; A61P 25/16; A61K 9/0019; A61K 9/141; A61K 48/0066; A61P 35/00; A61P 25/28; C12N 15/62

(57) ABSTRACT

The invention provides compositions and methods for the preparation, manufacture and therapeutic use of viral vectors, such as adeno-associated virus (AAV) particles having viral genomes encoding one or more antibodies or antibody fragments or antibody-like polypeptides, for the prevention and/or treatment of diseases and/or disorders.

### CROSS REFERENCE TO RELATED APPLICATIONS

[0001] This application claims priority to U.S. Provisional Patent Application No. 62/329,457, filed on Apr. 29, 2016, entitled Compositions for the Treatment of Disease, U.S. Provisional Patent Application No. 62/367,351, filed on Jul. 27, 2016, entitled Compositions for the Treatment of Disease, and U.S. Provisional Patent Application No. 62/433,973, filed on Dec. 14, 2016, entitled Compositions for the Treatment of Disease, the contents of each of which are herein incorporated by reference in their entireties.

### REFERENCE TO THE SEQUENCE LISTING

[0002] The present application is being filed along with a Sequence Listing in electronic format. The Sequence Listing file, entitled 20571301PCTSL.txt, was created on Apr. 27, 2017, and is 7,120,305 bytes in size. The information in electronic format of the Sequence Listing is incorporated herein by reference in its entirety.

### FIELD OF THE INVENTION

[0003] The invention relates to compositions and methods for vectored antibody delivery (VAD).

### BACKGROUND OF THE INVENTION

[0004] Antibody-based therapies have been developed for a wide variety of diseases, disorders and conditions, including infectious and non-infectious diseases. The U.S. Food and Drug Administration (FDA) has approved antibodies for treatment of cancers, autoimmune and immune system disorders, ocular diseases, nervous system diseases, inflammations, and infections, amongst many others. Naturally, antibodies are components of the adaptive immune response and they function by recognizing specific foreign antigens and stimulating humoral immunity responses. As a consequence, antibodies may be applied to the treatment, prevention, management, diagnosis and research of diseases, disorders, and/or conditions.

[0005] Antibodies have relatively short half-lives and this presents an ongoing and long-felt challenge for antibody-based therapies. In order to achieve a sufficiently high concentration of an antibody for long lasting therapeutic effects, antibody therapies are traditionally delivered by repeated administration, e.g. by multiple injections. This dosing regimen results in an inconsistent level of antibody throughout the treatment period, limited efficiency per administration, high cost of administration and consumption of the antibody. Hence, there remains a need in the art for delivery of antibodies and antibody-based therapeutics through alternative routes or modalities of administration.

[0006] One such alternative route of administration is by expression vectors (e.g. plasmid or viral vector), including but not limited to, adeno-associated viral vectors (AAVs). Adeno-associated viral vectors are widely used in gene therapy approaches due to a number of advantageous features. As dependoparvoviruses, AAV are non-replicating in infected cells and therefore not associated with any known disease. Further, AAVs may be introduced to a wide variety of host cells, do not integrate into the genome of the host cell, and are capable of infecting both quiescent and dividing cells. AAVs transduce non-replicating and long-lived cells in vivo, resulting in long term expression of the protein of interest. Further, AAVs can be manipulated with cellular and molecular biology techniques to produce non-toxic particles carrying a payload encoded in the AAV viral genome that can be delivered to a target tissue or set of cells with limited or no side-effects. Given the foregoing, the use of AAVs for vectored antibody delivery (VAD) would allow for longer lasting efficacy, fewer dose treatments, and more consistent levels of the antibody throughout the treatment period.

[0007] In vectored antibody delivery (VAD), an AAV is used as the deliver modality for a nucleic acid sequence encoding the antibody, which results in in vivo expression of the encoded payload, e.g., functional antibody.

[0008] The mechanism underlying VAD is thought to proceed through the following steps. First, the AAV vector enters the cell via endocytosis, then escapes from the endosomal compartment and is transported to the nucleus wherein the viral genome is released and converted into a double-stranded episomal molecule of DNA by the host. The transcriptionally active episome results in the expression of encoded antibodies that may then be secreted from the cell into the circulation. VAD may therefore enable continuous, sustained and long-term delivery of antibodies administered by a single injection of an AAV particle.

[0009] Previous studies of an AAV-mediated antibody technique known as vectored immunoprophylaxis (VIP) have focused on neutralization of human immunodeficiency virus (HIV) (see, e.g. Johnson et al., 2009, Nature Med., 15, 901-906, Saunders et al. 2015, J. Virol., 89(16), 8334-8345, Balasz et al, 2012, Nature 481, 81-84, the contents of which are incorporated herein by reference in their entirety). Balasz et al. reported a long-term, even lifelong, expression of monoclonal antibody at high concentration from a single intramuscular administration in mice that resulted in full protection against HIV infection. AAV-mediated VIP has also been demonstrated against influenza strains (see, e.g. Balasz, et al Nat. Biotechnol., 2013, 31(7) :647-52) and Plasmodium Falciparum, a sporozoite causing malaria infection (see, e.g. Deal at al., 2014, PNAS, 111 (34), 12528-12532), as well as cancer, RSV and drug addiction (see, e.g. review by Schnepp and Johnson, Microbiol Spectrum 2(4), 2014). Though promising, these studies emphasize efforts to merely prevent disease. There still remains a need for improved methods of prevention, and new antibody-mediated therapies for research, diagnosis, and treatment of disease.

[0010] The present invention addresses this need by providing novel AAV particles having viral genomes engineered to encode antibodies and antibody-based compositions and methods of using these constructs (e.g., VAD) for the treatment, prevention, diagnosis and research of diseases, disorders and/or conditions. The present invention further embraces optimized AAV particles for delivery of nucleic acids (e.g., viral genomes) encoding antibodies and antibody-based compositions to a subject in need thereof.

### SUMMARY OF THE INVENTION

[0011] The invention provides AAV particles comprising a capsid and a viral genome, said viral genome comprising at least one inverted terminal repeat (ITR) region and a pay load region, said payload region comprising a regulatory sequence operably linked to at least a first nucleic acid segment, said first nucleic acid segment encoding one or more polypeptides given in Table 3, variants and fragments thereof. The capsid of the AAV particle may be any of the serotypes described herein and/or described in Table 1.

[0012] In one aspect the first nucleic acid segment may encode one or more polypeptides such as, but not limited to, an antibody heavy chain, an antibody light chain, a linker, and combinations thereof. The first nucleic acid segment may encode one or more polypeptides which is humanized. As a non-limiting example, the first nucleic acid segment encodes from 5′ to 3′, an antibody heavy chain, a linker, and an antibody light chain. As another non-limiting example, the first nucleic acid segment encodes from 5′ to 3′, an antibody light chain, a linker, and an antibody heavy chain. As yet another non-limiting example, the first nucleic acid segment encodes one or more antibody heavy chains. As yet another non-limiting example, the first nucleic acid segment encodes one or more antibody light chains.

[0013] In one aspect, the first nucleic acid segment encodes an antibody, having at least 95% identity to any of the sequences of Table 3 or Table 4.

[0014] In one aspect the regulator sequence may comprise a promoter such as but not limited to, human elongation factor 1α-subunit (EF1α), cytomegalovirus (CMV) immediate-early enhancer and/or promoter, chicken β-actin (CBA) and its derivative CAG, β glucuronidase (GUSB), or ubiquitin C (UBC). Tissue-specific expression elements can be used to restrict expression to certain cell types such as, but not limited to, muscle specific promoters, B cell promoters, monocyte promoters, leukocyte promoters, macrophage promoters, pancreatic acinar cell promoters, endothelial cell promoters, lung tissue promoters, astrocyte promoters, or nervous system promoters which can be used to restrict expression to neurons, astrocytes, or oligodendrocytes.

[0015] In one aspect, the linker in the viral genome is selected from one or more of the linkers given in Table 2.

[0016] In one aspect, the AAV particles described herein may comprise a viral genome which is single stranded.

[0017] In one aspect, the AAV particles described herein may comprise a viral genome which is self-complementary.

[0018] In one aspect, the AAV particles described herein may comprise a viral genome comprising at least one intron sequence,

[0019] In one aspect, the AAV particles described herein may comprise a viral genome comprising at least one staffer sequence to adjust the length of the viral genome to increase efficacy and/or efficiency,

[0020] In one aspect, the AAV particles described herein may comprise at least one region which has been codon optimized. As a non-limiting example, the viral genome may be codon optimized. As another non-limiting example, the first nucleic acid segment is codon optimized.

[0021] In one aspect, the AAV particles described herein may comprise a viral genome with 2 ITR regions. At least one of the ITR regions may be derived from the same or different parental serotype of the capsid. As anon-limiting example, at least one ITR region is derived from AAV2.

[0022] In one aspect, the AAV particles comprise a viral genome which comprises a second nucleic acid segment. The second nucleic acid segment may encode an aptamer, siRNA, saRNA, ribozyme, microRNA, mRNA or combination thereof.

[0023] In one aspect, the AAV particles comprise a viral genome which comprises a second nucleic acid segment encoding an siRNA designed to target the mRN A that encodes the target of the antibody encoded by the first nucleic acid segment.

[0024] In one aspect, the AAV particles comprise a viral genome which comprises a second nucleic acid segment encoding a microRNA, the microRNA is selected to target the mRNA that encodes the target of the antibody encoded by the first nucleic acid segment.

[0025] In one aspect, the AAV particles comprise a. viral genome which comprises a second nucleic acid segment encoding an mRNA, the mRNA encodes one or more peptides inhibitors of the same target of the antibody encoded by the first nucleic acid segment.

[0026] In one aspect, the AAV particles comprise a viral genome which comprises a third nucleic acid segment. The third nucleic acid segment may encode a nuclear export signal, a poly nucleotide or polypeptide which acts as a regulator of expression of the viral genome in which it is encoded, a polynucleotide or polypeptide which acts as a regulator of expression of the payload region of the viral genome in which it is encoded, and/or a polynucleotide or polypeptide which acts as a regulator of expression of the first nucleic acid segment of the payload region of the viral genome in which it is encoded.

[0027] The invention provides AAV particles comprising a capsid and a viral genome, said viral genome comprising at least one inverted terminal repeat (ITR) region and a payload region comprising a regulatory sequence operably linked to at least a first nucleic acid segment, the first nucleic acid segment encoding a bispecific antibody derived from any of the sequences listed in Table 3 or portions or fragments thereof.

[0028] The invention provides methods of producing a functional antibody in a subject in need thereof, comprising administering to a subject the AAV particles described herein. The level or amount of the functional antibody in the target cell or tissue after administration to the subject may be from about 0.001 μg/mL to 100 mg/niL. The functional antibody may be encoded by a single first nucleic acid segment of a viral genome within the AAV particle. The functional antibody may be encoded by two different viral genomes, the two different viral genomes may be packaged in separate capsids.

[0029] The invention provides a pharmaceutical composition comprising an AAV particle described herein in a pharmaceutically acceptable excipient. As a non-limiting example, the pharmaceutically acceptable excipient is saline. As anon-limiting example, the pharmaceutically acceptable excipient is 0.001% pluronic in saline.

[0030] The invention provides methods of producing a functional antibody in a subject in need thereof, comprising administering to a subject the AAV particles described herein by a delivery route such as, but not limited to, enteral (into the intestine), gastroenteral, epidural (into the dura mater), oral (by way of the mouth), transdermal, intracerebral (into the cerebrum), intracerebroventricular (into the cerebral ventricles), epicutaneous (application onto the skin), intradermal, (into the skin itself), subcutaneous (under the skin), nasal administration (through the nose), intravenous (into a vein), intravenous bolus, intravenous drip, intra-arterial (into an artery), intramuscular (into a muscle), intracardiac (into the heart), intraosseous infusion (into the bone marrow), intrathecal (into the spinal canal), intraparenchymal (into brain tissue), intraperitoneal, (infusion or injection into the peritoneum), intravesical infusion, intravitreal (through the eye), intracavernous injection (into a pathologic cavity), intracavitary (into the base of the penis), intravaginal administration, intrauterine, extra-amniotic administration, transdermal (diffusion through the intact skin for systemic distribution), transmucosal (diffusion through a mucous membrane), transvaginal, insufflation (snorting), sublingual, sublabial, enema, eye drops (onto the conjunctiva), ear drops, auricular (in or by way of the ear), buccal (directed toward the cheek), conjunctival, cutaneous, dental (to a tooth or teeth), electro-osmosis, endocervical, endosinusial, endotracheal, extracorporeal, hemodialysis, infiltration, interstitial, intra-abdominal, intra-amniotic, intra-ariicular, intrabiliary, intrabronchial, intrabursal, intracartilaginous (within a cartilage), intracaudal (within the cauda equine), intracisternal (within the cisterna magna cerebellomedularis), intracorneal (within the cornea), dental intracoronal, intracoronary (within the coronary arteries), intracorporus cavernosum (within the dilatable spaces of the corporus cavernosa of the penis), intradiscal (within a disc), intraductal (within a duct of a gland), intraduodenal (within the duodenum), intradural (within or beneath the dura), intraepidermal (to the epidermis), intraesophageal (to the esophagus), intragastric (within the stomach), intragingival (within the gingivae), intraileal (within the distal portion of the small intestine), intralesional (within or introduced directly to a localized lesion), intraluminal (within a lumen of a tube), intralymphatic (within the lymph), intramedullary (within the marrow cavity of a bone), intrameningeal (within the meninges), intramyocardial (within the myocardium), intraocular (within the eye), intraovarian (within the ovary), intrapericardial (within the pericardium), intrapleural (within the pleura), intraprostatic (within the prostate gland), intrapulmonary (within the lungs or its bronchi), intrasinal (within the nasal or periorbital sinuses), intraspinal (within the vertebral column), intrasynovial (within the synovial cavity of a joint), intratendinous (within a tendon), intratesticular (within the testicle), intrathecal (within the cerebrospinal fluid at any level of the cerebrospinal axis), intrathoracic (within the thorax), iniratubular (within the tubules of an organ), intratumor (within a tumor), intratympanic (within the aurus media), intravascular (within a vessel or vessels), intraventricular (within a ventricle), iontophoresis (by means of electric current where ions of soluble salts migrate into the tissues of the body ), irrigation (to bathe or flush open wounds or body cavities), laryngeal (directly upon the larynx), nasogastric (through the nose and into the stomach), occlusive dressing technique (topical route administration which is then covered by a dressing which occludes the area), ophthalmic (to the external eye), oropharyngeal (directly to the mouth and pharynx), parenteral, percutaneous, periarticular, peridural, perineural, periodontal, rectal, respiratory (within the respiratory tract by inhaling orally or nasally for local or systemic effect), retrobulbar (behind the pons or behind the eyeball), soft tissue, subarachnoid, subconjunctival, submucosal, topical, transplacental (through or across the placenta), transtracheal (through the wall of the trachea), transtympanic (across or through the tympanic cavity), ureteral (to the ureter), urethral (to the urethra), vaginal, caudal block, diagnostic, nerve block, biliary perfusion, cardiac perfusion, photopheresis, and spinal.

[0031] The invention provides methods of treating and/or preventing a disease or disorder in a subject comprising administering to the subject an AAV particle described herein. The administration may be at a prophylactically effective dose such as, but not limited to, from about 1 μg/mL to about 500 μg/mL of expressed polypeptide or 1×10e4 to 1×10e16 VG/mL from the pharmaceutical composition. The pharmaceutical composition may be administered at least once. The pharmaceutical composition may be administered daily, weekly, monthly, or yearly. The pharmaceutical composition may be co-administered as part of a combination therapy.

[0032] The invention provides methods of producing an antibody in a subject by administering the AAV particles described herein, where the antibody is not a vims neutralizing antibody.

[0033] The invention provides methods of producing an antibody in a subject by administering the AAV particles described herein, where the antibody is not an HIV or HCV virus neutralizing antibody.

### BRIEF DESCRIPTION OF THE DRAWINGS

[0034] The foregoing and other objects, features, and advantages will be apparent from the following description of particular embodiments of the invention, as illustrated in the accompanying drawings. The drawings are not necessarily to scale, emphasis instead being placed upon illustrating the principles of various embodiments of the invention.

[0035] FIG. 1 is a schematic of vectored antibody delivery.

[0036] FIG. 2 is a schematic of a viral genome of the invention.

[0037] FIG. 3 is a schematic of payload regions. Figure discloses SEQ ID NO: 4321.

### DETAILED DESCRIPTION OF THE INVENTION

### I. COMPOSITIONS OF THE INVENTION

[0038] According to the present invention, compositions for delivering functional antibodies and/or antibody-based compositions by adeno-associated viruses (AAVs) are provided. AAV particles of the invention may be provided via any of several routes of administration, to a cell, tissue, organ, or organism, in vivo, ex vivo, or in vitro.

[0039] As used herein, an “AAV particle” is a virus which comprises a. viral genome with at least one payload region and at least one inverted, terminal repeat (ITR) region.

[0040] As used herein, “viral genome” or “vector genome” refers to the nucleic acid sequenced) encapsulated in an AAV particle. Viral genomes comprise at least one payload region encoding polypeptides of the invention, e.g., antibodies, antibody-based compositions or fragmenis thereof.

[0041] As used herein, a “payload” or “payload region” is any nucleic acid molecule which encodes one or more polypeptides of the invention. At a minimum, a payload region comprises nucleic acid sequences that encode an antibody, an antibody-based composition, or a fragment thereof, but may also optionally comprise one or more functional or regulatory elements to facilitate transcriptional expression and/or polypeptide translation.

[0042] The nucleic acid sequences and polypeptides disclosed herein may be engineered to contain modular elements and/or sequence motifs assembled to enable expression of the antibodies or antibody-based compositions of the invention, in some embodiments, the nucleic acid sequence comprising the payload region may comprise one or more of a promoter region, an intron, a Kozak sequence, an enhancer, or a polyadenylation sequence. Payload regions of the invention typically encode antibodies or antibody based compositions, which may include an antibody heavy chain domain, an antibody light chain domain, both antibody heavy and light chain domains, or fragments of the foregoing in combination with each other or in combination with other polypeptide moieties. In some cases, payload regions may also encode one or more linkers or joining regions between antibody heavy and light chain domains or fragments. The order of expression, structural position, or concatemer count (heavy chain, light chain, or linker) may be different within or among different payload regions. The identity, position and number of linkers expressed by payload regions may also vary.

[0043] The payload regions of the invention may be delivered to one or more target cells, tissues, organs, or organisms within the viral genome of an AAV particle.

### Adeno-Associated Viruses (AAVs) and AAV Particles

[0044] Viruses of the Parvoviridae family are small non-enveloped icosahedral capsid viruses characterized by a single stranded DNA genome. Parvoviridae family viruses consist of two subfamilies: Parvovirinae, which infect vertebrates, and Densovirinae, which infect invertebrates. Due to its relatively simple structure, easily manipulated using standard molecular biology techniques, this virus family is useful as a biological tool. The genome of the virus may be modified to contain a minimum of components for the assembly of a functional recombinant virus, or viral particle, which is loaded with or engineered to express or deliver a desired payload, which may be delivered to a target cell, tissue, organ, or organism.

[0045] The parvoviruses aid other members of the Parvoviridae family are generally described in Kenneth I. Berns, “Parvoviridae: The Viruses and Their Replication,” Chapter 69 in FIELDS VIROLOGY (3d Ed. 1996), the contents of which are incorporated by reference in their entirety.

[0046] The Parvoviridae family comprises the Dependovirus genus which includes adeno-associated viruses (AAV) capable of replication in vertebrate hosts including, but not limited to, human, primate, bovine, canme, equine, and ovine species.

[0047] The AAV vector genome is a linear, single-stranded DNA (ssDNA) molecule approximately 5,000 nucleotides (nt) in length. The AAV viral genome can comprise a payload region and at least one inverted terminal repeat (ITR) or ITR region. ITRs traditionally flank the coding nucleotide sequences for the non-structural proteins (encoded by Rep genes) and the structural proteins (encoded by capsid genes or Cap genes). While not wishing to be bound by theory, an AAV viral genome typically comprises two ITR sequences. The AAV vector genome comprises a characteristic T-shaped hairpin structure defined by the self-complementary terminal 145 nt of the 5′ and 3′ ends of the ssDNA which form, an energetically stable double stranded region. The double stranded hairpin structures comprise multiple functions including, but not limited to, acting as an origin for DNA replication by functioning as primers for the endogenous DNA polymerase complex of the host viral replication cell.

[0048] In addition to the encoded heterologous payload, AAV vectors may comprise the viral genome, in whole or in part, of any naturally occurring and/or recombinant AAV serotype nucleotide sequence or variant. AAV variants may have sequences of significant homology at the nucleic acid (genome or capsid) and amino acid levels (capsids), to produce constructs which are generally physical and functional equivalents, replicate by similar mechanisms, and assemble by similar mechanisms. Chiorini et al., J. Vir. 71: 6823-33(1997); Srivastava et al., J. Vir. 45: 555-64 (1983), Chiorini et al., J. Vir. 73: 1309-1319 (1999): Rutladge et al., J. Vir. 72: 309-319 (1998); and Wu et al., J. Vir. 74: 8635-47 (2000), the contents of each of which are incorporated herein by reference in their entirety.

[0049] In one embodiment, AAV particles of the present invention are recombinant AAV viral vectors which are replication defective and lacking sequences encoding functional Rep and Cap proteins within their viral genome. These defective AAV vectors may lack most or all parental coding sequences and essentially carry only one or two AAV ITR sequences and the nucleic acid of interest for delivery to a cell, a tissue, an organ, or an organism.

[0050] In one embodiment, the viral genome of the AAV particles of the present invention comprise at least one control element which provides for the replication, transcription, and translation of a coding sequence encoded therein. Not all of the control elements need always be present as long as the coding sequence is capable of being replicated, transcribed, and/or translated in an appropriate host cell. Non-limiting examples of expression control elements include sequences for transcription initiation and/or termination, promoter and/or enhancer sequences, efficient RNA processing signals such as splicing and polyadenylation signals, sequences that stabilize cytoplasmic mRNA, sequences that enhance translation efficacy (e.g., Kozak consensus sequence), sequences that enhance protein stability, and/or sequences that enhance protein processing and/or secretion.

[0051] According to the present invention, AAV particles for use in therapeutics and/or diagnostics comprise a virus that has been distilled or reduced to the minimum components necessary for transduction of a nucleic acid payload or cargo of interest. In this manner, AAV particles are engineered as vehicles for specific delivery while lacking the deleterious replication and/or integration features found in wild-type viruses.

[0052] AAV vectors of the present invention may be produced recombinants and may be based on adeno-associated virus (AAV) parent or reference sequences. As used herein, a “vector” is any molecule or moiety which transports, transduces, or otherwise acts as a carrier of a heterologous molecule such as the nucleic acids described herein.

[0053] In addition to single stranded AAV viral genomes (e.g., ssAAVs), the present invention also provides for self-complementary AAV (scAAVs) viral genomes, scAAV vector genomes contain DNA strands which anneal together to form double stranded DNA. By skipping second strand synthesis, scAAVs allow for rapid expression in the cell.

[0054] In one embodiment, the AAV particle of the present invention is an scAAV.

[0055] In one embodiment, the AAV particle of the present invention is an ssAAV.

[0056] Methods for producing and/or modifying AAV particles are disclosed in the art such as pseudotyped AAV vectors (PCX Patent Publication Nos. WO200028004; WO0200123001; WO2004112727; WO2005005610; and WO2005072364, the content of each of which is incorporated herein by reference in its entirety).

[0057] AAV particles may be modified to enhance the efficiency of delivery. Such modified AAV particles can be packaged efficiently and be used to successfully infect the target cells at high frequency and with minimal toxicity. In some embodiments, the capsids of the AAV particles are engineered according to the methods described in US Publication Number US20195801, the contents of which are incorporated herein by reference in their entirety.

[0058] In one embodiment, the AAV particles comprising a payload region encoding the polypeptides of the invention may be introduced into mammalian cells.

### AAV Serotypes

[0059] AAV particles of the present invention may comprise or be derived from any natural or recombinant AAV serotype. According to the present invention, the AAV particles may utilize or be based on a serotype selected from any of the following AAV 1, AAV2, AAV2G9, AAV3, AAV3a, AAV3b, AAV3-3, AAV4, AAV4-4, AAV5, AAV6, AAV6.1, AAV6.2, AAV6.1.2, AAV7, AAV7.2, AAV8, AAV9, AAV9.11, AAV9.13, AAV9.16, AAV9.24, AAV 9.45, AAV9.47, AAV9.61, AAV9.68, AAV9.84, AAV9.9, AAV10, AAV11, AAV 12, AAV 16.3, AAV24.1, AAV27.3, AAV42.12, AAV42-1b, AAV 42-2, AAV42-3a, AAV42-3b, AAV42-4, AAV42-5a, AAV42-5b, AAV42-6b, AAV42-8, AAV42-10, AAV42-11, AAV42-12, AAV42-13, AAV42-15, AAV42-aa, AAV43-1, AAV43-12, AAV43-20, AAV43-21, AAV43-23, AAV43-25, AAV43-5, AAV44.1, AAV44.2, AAV 44.5, AAV 223.1, AAV223.2, AAV223.4, AAV223.5, AAV223.6, AAV223.7, AAV1-7/rh.48, AAV1-8/rh.49, AAV2-15/rh.62, AAV2-3/rh,61, AAV2-4/rh.50, AAV2-5/rh.51, AAV3.1/hu.6, AAV3.1/hu.9, AAV3-9/rh.52, AAV3-11/rh.53, AAV4-8/r11.64, AAV4-9/rh.54, AAV4-19/rh.55, AAV5-3/rh.57, AAV5-22/rh.58, AAV7.3/hu.7, AAV16.8/hu.10, AAV16.12/hu.11, AAV29.3/bb.1, AAV29.5/bb.2, AAV106.1/hu.37, AAV114.3/hu.40, AAV127.2/hu.41, AAV127.5/hu.42, AAV128.3/hu.44, AAV130.4/hu.48, AAV145.1/hu.53, AAV145.5/hu.54, AAV145.6/hu.55, AAV161.10/hu.60, AAV161.6/hu.61. AAV33.12/hu.17, AAV33.4/hu.15, AAV33.8/hu.1, AAV52/hu.19, AAV52.1/hu.20, AAV58.2/hu.25, AAVA3.3, AAVA3.4, AAVA3.5, AAV A3.7, AAVC1, AAVC2, AAVC5, AAV-DJ, AAV-DJ8, AAVF3, AAVF5, AAVH2, AAVrh.72, AAVhu.8, AAVrh.68, AAVrh.70, AAVpi.1, AAVpi.3, AAVpi.2, AAVrh.60, AAVrh.44, AAVrh.65, AAVrh.55, AAVrh.47, AAVrh.69, AAVrh.45, AAVrh.59, AAVhu. 12, AAVH6, AAVLK03, AAVH-1/hu.1, AAVH-5/hu.3, AAVLG-10/rh.40, AAVLG-4/rh.38, AAVLG-9/hu.39, AAVN721-8/rh.43, AAVCh.5, AAVCh.5R1, AAVcy.2, AAVcy.3, AAVcy.4, AAVcy.5, AAVCy.5R1, AAVCy.5R2, AAVCy.5R3, AAVCy.5R4, AAVcy.6, AAVhu.1, AAVhu.2, AAVhu.3, AAVhu.4, AAVhu.5, AAVhu.6, AAVhu.7, AAVhu.9, AAVhu.10, AAVhu.11, AAVhu.13, AAVhu.15, AAVhu.16, AAVhu.17, AAVhu.18, AAVhu.20, AAVhu.21, AAVhu.22, AAVhu.23.2, AAVhu.24, AAVhu.25, AAVhu.27, AAVhu.28, AAVhu.29, AAVhu.29R, AAVhu.31, AAVhu.32, AAVhu.34, AAVhu.35, AAVhu.37, AAVhu.39, AAVhu.40, AAVhu.41, AAVhu.42, AAVhu.43, AAVhu.44, AAVhu.44R1, AAVhu.44R2, AAVhu.44R3, AAVhu.45, AAVhu.46, AAVhu.47, AAVhu.48, AAVhu.48R1, AAVhu.48R2, AAVhu.48R3, AAVhu.49, AAVhu.51, AAVhu.52, AAVhu.54, AAVhu.55, AAVhu.56, AAVhu.57, AAVhu.58, AAVhu.60, AAVhu.61, AAVhu.63, AAVhu.64, AAVhu.66, AAVhu.67, AAVhu.14/9, AAVhu.t 19, AAVrh.2, AAVrh.2R, AAVrh.8, AAVrh.8R, AAVrh.10, AAVrh.12, AAVrh.13, AAVrh.13R, AAVrh.14, AAVrh.17, AAVrh.18, AAVrh.19, AAVrh.20, AAVrh.21, AAVrh.22, AAVrh.23, AAVrh.24, AAVrh.25, AAVrh.31, AAVrh.32, AAVrh.33, AAVrh.34, AAVrh.35, AAV A. 36, AAVrh.37, AAVA.37R2, AAVrh.38, AAVrh.39, AAVrh.40, AAVrh.46, AAVrh.48, AAVrh.48.4, AAVrh.48.1.2, AAVrh.48.2, AAVrh.49, AAVrh.51, AAVrh.52, AAVrh. 53, AAVrh. 54, AAVrh.56, AAVrh.57, AAVrh.58, AAVrh.61, AAVrh.64, AAVrh.64R1, AAVrh.64R2, AAVrh.67, AAVrh.73, AAVrh.74, AAVrh8R, AAVrh8R A586R mutant, AAVrh8R R533A mutant, AAAV, BAAV, caprine AAV, bovine AAV, AAVhE1 1, AAVhEr1.5, AAVhER1.14, AAVhEr1.8, AAVhEr1.16, AAVhEr1.18, AAVhEr1.35, AAVhEr1.7, AAVhEr1.36, AAVhEr2.29, AAVhEr2.4, AAVhEr2.16, AAVhEr2.30, AAVhEr2.31, AAVhEr2.36, AAVhER1.23, AAVhEr3.1, AAV2.5T, AAV-PAEC, AAV-LK01, AAV-LK02, AAV-LK.03, AAV-LK04, AAV-LK05, AAV-LK06, AAV-LK07, AAV-LK08, AAV-LK09, AAV-LK10, AAV-LK11, AAV-LK12, AAV-LK13, AAV-LK14, AAV-LK15, AAV-LK16, AAV-LK17, AAV-LK18, AAV-LK19, AAV-PAEC2, AAV-PAEC4, AAV-PAEC6, AAV-PAEC7, AAV-PAEC8, AAV-PAEC11, AAV-PAEC12, AAV-2-pre-miRNA-101, AAV-8h, AAV-8b, AAV-h, AAV-b, AAV SM 10-2, AAV Shuffle 100-1, AAV Shuffle 100-3, AAV Shuffle 100-7, AAV Shuffle 10-2, AAV Shuffle 10-6, AAV Shuffle 10-8, AAV Shuffle 100-2, AAV SM 10-1, AAV SM 10-8, AAV SM 100-3, AAV SM 100-10, BNP61 AAV, BNP62 AAV, BNP63 AAV, AAVrh.50, AAVrh.43, AAVrh. 62, AAVrh.48, AAVhu.19, AAVhu.11, AAVhu.53, AAV4-8/rh.64, AAVLG-9/hu.39, AAV54.5/hu.23, AAV54.2/hu.22, AAV54.7/hu.24, AAV54.1/hu.21, AAV54.4R/hu.27, AAV46.2/hu.28, AAV46.6/hu.29, AAV128.1/hu.43, true type AAV (ttAAV), UPENN AAV 10, Japanese AAV 10 serotypes, AAV CBr-7.1, AAV CBr-7.10, AAV CBr-7.2, AAV CBr-7.3, AAV CBr-7.4, AAV CBr-7.5, AAV CBr-7.7, AAV CBr-7.8, AAV CBr-B7.3, AAV CBr-B7.4, AAV CBr-E1, AAV CBr-E2, AAV CBr-E3, AAV CBr-E4, AAV CBr-E5, AAV CBr-e5, AAV CBr-E6, AAV CBr-E7, AAV C-Br-E8, AAV CHt-1, AAV CHt-2, AAV CHt-3, AAV CHt-6.1, AAV CHt-6.10, AAV CHt-6.5, AAV CHt-6.6, AAV CHt-6.7, AAV CHt-6.8, AAV CHt-P1, AAV CHt-P2, AAV CHt-P5, AAV CHt-P6, AAV CHt-P8, AAV CHt-P9, AAV CKd-1, AAV CKd-10, AAV CKd-2, AAV CKd-3, AAV CK.d-4, AAV CKd-6, AAV CKd-7, AAV CKd-8, AAV CKd-B1, AAV CKd-B2, AAV CKd-B3, AAV CKd-B4, AAV CKd-B5, AAV CKd-B6, AAV CKd-B7, AAV CKd-B8, AAV CKd-H1, AAV CKd-H2, AAV CKd-H3, AAV Ckd-H4, AAV CKd-H5, AAV CKd-H6, AAV CKd-N3, AAV CKd-N4, AAV CKd-N9, AAV CLg-F1, AAV CLg-F2, AAV CLg-F3, AAV CLg-F4, AAV CLg-F5, AAV CLg-F6, AAV CLg-F7, AAV CLg-F8, AAV CLv-1, AAV CLv1-1, AAV Clv1-10, AAV CLv1-2, AAV CLv-12, AAV CLv1-3, AAV CLv-13, AAV CLv1-4, AAV Clv1-7, AAV Clv1-8, AAV Clv1-9, AAV CLv-2, AAV CLv-3, AAV CLv-4, AAV CLv-6, AAV CLv-8, AAV CLv-D1, AAV CLv-D2, AAV CLv-D3, AAV CLv-D4, AAV CLv-D5, AAV CLv-D6, AAV CLv-D7, AAV CLv-D8, AAV CLv-E1, AAV CLv-K1, AAV CLv-K3, AAV CLv-K6, AAV CLv-L4, AAV CLv-L5, AAV CLv-L6, AAV CLv-M1, AAV CLv-M11, AAV CLv-M2, AAV CLv-M5, AAV CLv-M6, AAV CLv-M7, AAV CLv-M8, AAV CLv-M9, AAV CLv-R1, AAV CLv-R2, AAV CLv-R3, AAV CLv-R4, AAV CLv-R5, AAV CLv-R6, AAV CLv-R7, AAV CLv-R8, AAV CLv-R9, AAV CSp-1, AAV CSp-10, AAV CSp-11, AAV CSp-2, AAV CSp-3, AAV CSp-4, AAV CSp-6, AAV CSp-7, AAV CSp-8, AAV CSp-8.10, AAV CSp-8.2, AAV CSp-8.4, AAV CSp-8.5, AAV CSp-8.6, AAV CSp-8.7, AAV CSp-8.8, AAV CSp-8.9, AAV CSp-9, AAV.hu.48R3, AAV.VR-355, AAV3B, AAV4, AAV5, AAVF1/HSC1, AAVF11/HSC11, AAVF12/HSC12, AAVF13/HSC13, AAVF14/HSC14, AAVF15/HSC15, AAVF16/HSC16, AAVF17/HSC17, AAVF2/HSC2, AAVF3/HSC3, AAVF4/HSC4, AAVF5/HSC5, AAVF6/HSC6, AAVF7/HSC7, AAVF8/HSC8, AAVF9/HSC9, PHP.B, PHP.A, G2B-26, G2B-13, TH1.1-32, and or TH1-35 and volants thereof.

[0060] In some embodiments, the AAV serotype may be, or have, a sequence as described in United States Publication No. US20030138772, the contents of which are herein incorporated by reference in their entirety, such as, but not limited to, AAV1 (SEQ ID NO: 6 and 64 of US20030138772), AAV2 (SEQ ID NO: 7 and 70 of US20030138772), AAV3 (SEQ ID NO: 8and 71 of US20030138772), AAV4 (SEQ ID NO: 63 of US20030138772), AAV5 (SEQ ID NO: 114 of US20030138772), AAV6 (SEQ ID NO: 65 of US20030138772), AAV7 (SEQ ID NO: 1-3 of US20030138772). AAV8 (SEQ ID NO: 4 and 95 of US20030138772), AAV9 (SEQ ID NO: 5 and 100 of US20030138772), AAV10 (SEQ ID NO: 117 of US20030138772), AAV11 (SEQ ID NO: 118 of US 20030138772), AAV12 (SEQ ID NO: 119 of US20030138772), AAVrb10 (amino acids 1 to 738 of SEQ ID NO: 81 of US20030138772), AAV16.3 (US20030138772 SEQ ID NO: 10), AAV29.3/bb. 1 (US20030138772 SEQ ID NO: 11), AAV29.4 (US20030138772SEQ ID NO: 12), AAV29.5/bb.2 (US20030138772 SEQ ID NO: 13), AAV1.3 (US20030138772SEQ ID NO: 14), AAV13.3 (US20030138772 SEQ ID NO: 15), AAV24.1 (US20030138772SEQ ID NO: 16). AAV27.3 (UJS20030138772 SEQ ID NO: 17), AAV7.2 (US20030138772 SEQ ID NO: 18), AAVC1 (US20030138772 SEQ ID NO: 19), AAVC3 (US20030138772 SEQ ID NO: 20), AAVC5 (US20030138772 SEQ ID NO: 21). AAVF I (US20030138772 SEQ ID NO: 22), AAVF3 (US20030138772 SEQ ID NO: 23). AAVF5 (US20030138772 SEQ ID NO: 24), AAVH6 (US20030138772 SEQ ID NO: 25), AAVH2 (US20030138772 SEQ ID NO: 26), AAV42-8 (US20030138772 SEQ ID NO: 27), AAV42-15 (US20030138772 SEQ ID NO: 28), AAV42-5b (US20030138772 SEQ ID NO: 29), AAV42-1b (US20030138772 SEQ ID NO: 30), AAV42-13 (US20030138772 SEQ ID NO: 31), AAV42-3a (US20030138772 SEQ ID NO: 32), AAV42-4 (US20030138772 SEQ ID NO: 33), AAV42-5a (UJS20030138772 SEQ ID NO: 34). AAV42-10 (US20030138772 SEQ ID NO: 35), AAV42-3b (US20030138772 SEQ ID NO: 36), AAV42-11 (US20030138772 SEQ ID NO: 37), AAV42-6b (US20030138772 SEQ ID NO: 38), AAV43-1 (US20030138772 SEQ ID NO: 39), AAV43-5 (US20030138772 SEQ ID NO: 40), AAV43-12 (US20030138772 SEQ ID NO: 41), AAV43-20 (US20030138772 SEQ ID NO: 42), AAV43-21 (US20030138772 SEQ ID NO: 43), AAV43-23 (US20030138772 SEQ ID NO: 44). AAV43-25 (US20030138772 SEQ ID NO: 45), AAV44.1 (US20030138772 SEQ ID NO: 46), AAV44.5 (US20030138772 SEQ ID NO: 47), AAV223.1 (US20030138772 SEQ ID NO: 48), AAV223.2 (US20030138772 SEQ ID NO: 49), AAV223.4 (US20030138772 SEQ ID NO: 50), AAV223.5 (US20030138772 SEQ ID NO: 51), AAV223.6 (US20030138772 SEQ ID NO: 52), AAV223.7 (US20030138772 SEQ ID NO: 53), AAVA3.4 (US20030138772 SEQ ID NO: 54), AAVA3.5 (US20030138772 SEQ ID NO: 55), AAVA3.7 (US20030138772 SEQ ID NO: 56), AAVA3.3 (US20030138772 SEQ ID NO: 57), AAV42.12 (US20030138772 SEQ ID NO: 58), AAV44.2 (US20030138772 SEQ ID NO: 59), AAV42-2 (11820030138772 SEQ ID NO: 9), or variants thereof.

[0061] In some embodiments, the AAV serotype may be, or have, a sequence as described in United States Publication No. US20150159173, the contents of which are herein incorporated by reference in their entirety, such as, but not limited to, AAV2 (SEQ ID NO: 7 and 23 of US20150159173), rh20 (SEQ ID NO: 1 of US20150159173), rh32/33 (SEQ ID NO: 2 of US20150159173), rh39 (SEQ ID NO: 3, 20 and 36 of US20150159173), rh46 (SEQ ID NO: 4and 22 of US20150159173), rh73 (SEQ ID NO: 5 of US20150159173), rh74 (SEQ ID NO: 6 of US20150159173), AAV6.1 (SEQ ID NO: 29 of US20150159173), rh.8 (SEQ ID NO: 41 of US20150159173), rh.48.1 (SEQ ID NO: 44 of US20150159173), hu.44 (SEQ ID NO: 45 of US20150159173), hu.29 (SEQ ID NO: 42 of US20150159173), hu.48 (SEQ ID NO: 38 of US20150159173), rh.54 (SEQ ID NO: 49 of US20150159173), AAV2 (SEQ ID NO: 7 of US20150159173), cy.5 (SEQ ID NO: 8 and 24 of US20150159173), rh.10 (SEQ ID NO: 9 and 25 of US20150159173), rh.13 (SEQ ID NO: 10 and 26 of US20150159173), AAV1 (SEQ ID NO: 11 and 27 of US20150159173), AAV3 (SEQ ID NO: 12 and 28 of US20150159173), AAV6 (SEQ ID NO: 13 and 29 of US20150159173), AAV7 (SEQ ID NO: 14 and 30 of US20150159173), AAV8 (SEQ ID NO: 15 and 31 of US20150159173), hu.13 (SEQ ID NO: 16 and 32 of US20150159173), hu.26 (SEQ ID NO: 17 and 33 of US20150159173), hu.37 (SEQ ID NO: 1.8 and 34 of US20150159173), hu.53 (SEQ ID NO: 19 and 35 of US20150159173), rh.43(SEQ ID NO: 21 and 37 of US20150159173), rh2 (SEQ ID NO: 39 of US20150159173), rh.37(SEQ ID NO: 40 of US20150159173), rh.64 (SEQ ID NO: 43 of US20150159173), rh.48 (SEQ ID NO: 44 of US20150159173), ch.5 (SEQ ID NO 46 of US20150159173), rh.67 (SEQ ID NO: 47 of US20150159173), rh.58 (SEQ ID NO: 48 of US20150159173), or variants thereof including, but not limited to Cy5R1, Cy5R2, Cy5R3, Cy5R4, rh.13R, rh.37R2, rh.2R, rh.8R, rb 48, rh.48.2, rh.48.1.2, hu.44R1, hu.44R2, hu.44R3, hu.29R, ch.5R1, rh64R1rh64R2, AAV6.2, AAV6.1, AAV6.12, hu.48R1, hu.48R2, and hu.48R3.

[0062] In some embodiments, the AAV serotype may be, or have, a sequence as described in U.S. Pat. No. 7,198,951, the contents of which are herein incorporated by reference m their entirety, such as, but not limited to, AAV9 (SEQ ID NO: 1-3 of U.S. Pat. No. 7,198,951), AAV2(SEQ ID NO: 4 of U.S. Pat. No. 7,198,951), AAV1 (SEQ ID NO: 5 of U.S. Pat. No. 7,198,951), AAV3 (SEQ ID NO: 6of U.S. Pat. No. 7,198,951), and AAV8 (SEQ ID NO: 7 of U.S. Pat. No. 7,198,951).

[0063] In some embodiments, the AAV serotype may be, or have, a mutation in the AAV9sequence as described by N Pulicheria et al. (Molecular Therapy 19(6): 1070-1078 (2011), herein incorporated by reference in its entirety), such as but not limited to, AAV9.9, AAV9.11, AAV9.13, AAV9.16, AAV9.24, AAV9.45, AAV9.47, AAV9.61, AAV9.68, or AAV9.84.

[0064] In some embodiments, the AAV serotype may be, or have, a sequence as described in U.S. Pat. No. 6,156,303, the contents of which are herein incorporated by reference in their entirety, such as, but not limited to, AAV3B (SEQ ID NO: 1 and 10 of U.S. Pat. No. 6,156,303), AAV6 (SEQ ID NO: 2, 7 and 11 of U.S. Pat. No. 6,156,303), AAV2 (SEQ ID NO: 3 and 8 of U.S. Pat. No. 6,156,303), AAV3A (SEQ ID NO: 4 and 9, of U.S. Pat. No. 6,156,303), or derivatives thereof.

[0065] In some embodiments, the AAV serotype may be, or have, a sequence as described in United States Publication No. US20140359799, the contents of which are herein incorporated by reference in their entirety, such as, but not limited to, AAV8 (SEQ ID NO: 1 of US20140359799), AAVDJ (SEQ ID NO: 2 and 3 of US20140359799), or variants thereof.

[0066] In some embodiments, the serotype may be AAVDJ or a variant thereof, such as AAVDJ8 (or AAV-DJ8), as described by Grimm et al. (Journal ofVirology 82(12): 5887-5911 (2008), herein incorporated by reference in its entirety). The amino acid sequence of AAVDJ 8may comprise two or more mutations in order to remove the heparin binding domain (HBD). As anon-limiting example, the AAV-DJ sequence described as SEQ ID NO: 1 in U.S. Pat. No. 7,588,772, the contents of which are herein incorporated by reference in their entirety, may comprise two mutations: (1) R587Q where arginine (R; Arg) at amino acid 587 is changed to glutaxnine (Q; Gln) and (2) R590T where arginine (R; Arg) at amino acid 590 is changed to threonine (T; Thr). As another non-limiting example, may comprise three mutations: (.1) K.406R where lysine (K: Lys) at amino acid 406 is changed to arginine (R; Arg), (2) R587Q where arginine (R, Arg) at amino acid 587 is changed to glutamine (Q; Gln) and (3) R590T where arginine (R, Arg) at amino acid 590 is changed to threonine (T; Thr).

[0067] In some embodiments, the AAV serotype may be, or have, a sequence of AAV4 as described in International Publication No. WO1998011244, the contents of which are herein incorporated by reference in their entirety, such as, but not limited to AAV4 (SEQ ID NO: 1-20of WO 1998011244).

[0068] In some embodiments, the AAV serotype may be, or have, a mutation in the AAV2 sequence to generate AAV2G9 as described in International Publication No. WO2014144229 and herein incorporated by reference in its entirety.

[0069] In some embodiments, the AAV serotype may be, or have, a sequence as described in International Publication No. WO2005033321, the contents of which are herein incorporated by reference in their entirety, such as, but not limited to AAV3-3 (SEQ ID NO: 217 of WO2005033321), AAV1 (SEQ ID NO: 219 and 202 of WO2005033321), AAV106.1/hu.37(SEQ ID NO: 10 of WO2005033321), AAV114.3/hu.40 (SEQ ID NO: 11 ofWO2005033321). AAV.127.2/hu.41 (SEQ ID NO: 6 and 8 of WO2005033321), AAV128.3/hu.44 (SEQ ID NO: 81of WO2005033321), AAV130.4/hu.48 (SEQ ID NO: 78 of WO2005033321), AAV145.1/hu.53 (SEQ ID NO: 176 and 177 of WO2005033321), AAV145.6/hu.56 (SEQ ID NO: 168 and 192 of WO2005033321), AAV 16.12/hu.11 (SEQ ID NO: 153 and 57 of WO2005033321), AAV16.8/hu.10(SEQ ID NO: 156 and 56 of WO2005033321), AAV161.10/hu.60 (SEQ ID NO: 170 of WO2005033321), AAV161.6/hu.61 (SEQ ID NO: 174 of WO2005033321), AAV1-7/rh,48 (SEQ ID NO: 32 of WO2005033321), AAV1-8/rh.49 (SEQ ID NO: 103 and 25 of WO2005033321), AAV2 (SEQ ID NO: 211 and 221 of WO2005033321), AAV2-15/rh.62 (SEQ ID NO: 33 and 114 of WO2005033321), AAV2-3/rh.61 (SEQ ID NO: 21 ofWO2005033321), AAV2-4/rh.50 (SEQ ID NO: 23 and 108 of WO2005033321), AAV2-5/rh.51 (SEQ ID NO: 104and 22 of WO2005033321), AAV3/hu.6 (SEQ ID NO: 5 and 84 of WO2005033321), AAV3/hu.9 (SEQ ID NO: 155 and 58 of WO2005033321), AAV3-11/rh.53 (SEQ ID NO: 186 and 176 of WO2005033321), AAV3-3 (SEQ ID NO: 200 of WO2005033321), AAV33.12/hu.17 (SEQ ID NO: 4 of WO2005033321), AAV33.4/hu.15 (SEQ ID NO: 50 of WO2005033321), AAV33.8/hu.16 (SEQ ID NO: 51 of WO2005033321), AAV3-9/rh.52 (SEQ ID NO: 96 and 18 of WO2005033321), AAV4-19/rh.55 (SEQ ID NO: 117 of WO2005033321), AAV4-4 (SEQ ID NO: 201 and 218 of WO2005033321), AAV4-9/rh.54 (SEQ ID NO: 116 ofWP2005033321), AAV5 (SEQ ID NO: 199 find 216 of WO2005033321), AAV52.1/hu.20 (SEQ ID NO: 63 of WO 2005033321), AAV52//hu.19 (SEQ ID NO: 133 of WO200503332I), AAV5-22/rh.58 (SEQ ID NO: 27 of WO2005033321), AAV5-3/rh.57 (SEQ ID NO: 105 of WO2005033321), AAV5-3/rh,57 (SEQ ID NO: 26 of WO2005033321), AAV58.2/hu.25 (SEQ ID NO: 49 of WO2005033321), AAV6 (SEQ ID NO: 203 and 220 of WO2005033321), AAV7 (SEQ ID NO: 222 and 213 of WO2005033321), AAV7.3/hu.7 (SEQ ID NO: 55 of WO2005033321), AAV8 (SEQ ID NO: 223 and 214 of WO2005033321), AAVH-1/hu.1 (SEQ ID NO: 46 of WO2005033321), AAVH-5/hu.3 (SEQ ID NO: 44 of WO2005033321), AAVhu.1 (SEQ ID NO: 144 of WO2005033321). AAV hu.10 (SEQ ID NO: 156 of WO2005033321), AAVhu. 11 (SEQ ID NO: 153 of WO2005033321), AAVhu.12 (SEQ ID NO: 59 of WO2005033321), AAVhu.13(SEQ ID NO: 129 of WO2005033321), AAVhu.14/AAV9 (SEQ ID NO: 123 and 3 of WO2005033321), AAVhu.15 (SEQ ID NO: 147 of WO2005033321), AAVhu.16 (SEQ ID NO: 148 of WO2005033321), AAVhu.17 (SEQ ID NO: 83 of WO2005033321), AAVhu.18 (SEQ ID NO: 149 of WO2005033321), AAVhu.19 (SEQ ID NO: 133 ofWO200503332), AAVhu.2 (SEQ ID NO: 143 of WO2005033321), AAVhu.20 (SEQ ID NO: 134 of WO2005033321), AAVhu.21 (SEQ ID NO: 135 of WO2005033321), AAVhu.22 (SEQ ID NO: 138 of WO2005033321), AAVhu.23.2 (SEQ ID NO: 137 of WO2005033321), AAVhu.24 (SEQ ID NO: 136 of WO2005033321), AAVhu.25 (SEQ ID NO: 146 of WO2005033321), AAVhu.27 (SEQ ID NO: 140 of WO2005033321), AAVhu.29 (SEQ ID NO: 132 of WO2005033321), AAVhu.3 (SEQ ID NO: 145 of WO2005033321 ), AAVhu.31 (SEQ ID NO: 121 of WO2005033321), AAVhu.32 (SEQ ID NO: 122 of WO2005033321), AAVhu.34 (SEQ ID NO: 125 of WO2005033321), AAVhu.35 (SEQ ID NO: 164 of WO2005033321), AAVhu.37 (SEQ ID NO: 88 of WO2005033321), AAVhu.39 (SEQ ID NO: 102 of WO2005033321), AAVhu.4 (SEQ ID NO: 141 of WO2005033321), AAVhu.40 (SEQ ID NO: 87 of WO2005033321), AAVhu.41 (SEQ ID NO: 91 of WO2005033321), AAVhu.42 (SEQ ID NO: 85 of WO2005033321), AAVhu.43 (SEQ ID NO: 160 of WO2005033321), AAVhu.44 (SEQ ID NO: 144 of WO2005033321), AAVhu.45 (SEQ ID NO: 127 of WO2005033321), AAVhu.46 (SEQ ID NO: 159 of WO2005033321). AAVhu.47 (SEQ ID NO: 128 of WO2005033321 i. AAVhu.48 (SEQ ID NO: 157 of WO2005033321), AAVhu.49 (SEQ ID NO: 189 of WO2005033321), AAVhu.51 (SEQ ID NO: 190 of WO2005033321), AAVhu.52 (SEQ ID NO: 191 of WO2005033321), AAVhu.53 (SEQ ID NO: 186 of WO2005033321), AAVhu.54 (SEQ ID NO: 88 of WO2005033321), AAVhu.55 (SEQ ID NO: 187 of WO2005033321), AAVhu.56 (SEQ ID NO: 192 of WO2005033321), AAVhu.57 (SEQ ID NO: 193 of WO2005033321), AAVhu.58(SEQ ID NO: 194 of WO2005033321), AAVhu.6 (SEQ ID NO: 84 of WO2005033321), AAVhu.60 (SEQ ID NO: 184 of WO2005033321), AAVhu 61 (SEQ ID NO: 185 of WO2005033321), AAVhu.63 (SEQ ID NO: 195 of WO2005033321), AAVhu.64 (SEQ ID NO: 196 of WO2005033321), AAVhu.66 (SEQ ID NO: 197 of WO2005033321), AAVhu.67 (SEQ ID NO: 198 of WO2005033321), AAVhu.7 (SEQ ID NO: 150 of WO2005033321), AAVhu.8(SEQ ID NO: 12 of WO200503332I), AAVhu.9 (SEQ ID NO: 155 of WO2005033321), AAVLG-10G/rh.40 (SEQ ID No: 14 of WO2005033321), AAVLG-4/rh.38 (SEQ ID NO: 86 of WO2005033321), AAVLG-4/rh.38 (SEQ ID No: 7 of WO2005033321), AAVN721-8/rh.43 (SEQ ID NO: 163 of WO2005033321), AAVN721-8/rh.43 (SEQ ID NO: 43 of WO2005033321), AAVpi.1 (SEQ ID NO: 28 of WO2005033321), AAVpi.2 (SEQ ID NO: 30 of WO2005033321), AAVpi.3 (SEQ ID NO: 29 of WO2005033321), AAVrh.38 (SEQ ID NO: 86 of WO2005033321), AAVrh.40 (SEQ ID NO: 92 of WO2005033321), AAVrh.43 (SEQ ID NO: 163 of WO02005033321), AAVrh.44 (SEQ ID NO: 34 of WO2005033321), AAVrh.45 (SEQ ID NO: 41 of WO2005033321), AAVrh.47 (SEQ ID NO: 38 of WO2005033321), AAVrh.48 (SEQ ID NO: 115 of WO2005033321). AAVrh.49 (SEQ ID NO: 103 of WO2005033321), AAVrh.50 (SEQ ID NO: 108 ofWO2005033321), AAVrh.51 (SEQ ID NO: 104 of WO2005033321), AAVrh. 52 (SEQ ID NO: 96 of WO2005033321), AAVrh.53 (SEQ ID NO: 97 of WO2005033321), AAVrh.55 (SEQ ID NO: 37 of WO2005033321), AAVrh.56 (SEQ ID NO: 152 of WO2005033321), AAVrh.57 (SEQ ID NO: 105 of WO2005033321), AAVrh.58 (SEQ ID NO: 106 of WO2005033321), AAVrh.59 (SEQ ID NO: 42 of WO2005033321), AAVrh. 60(SEQ ID NO: 31 of WO2005033321), AAVrh.61 (SEQ ID NO: 107 of WO2005033321), AAVrh.62 (SEQ ID NO: 114 of WO2005033321), AAVrh.64 (SEQ ID NO: 99 of WO2005033321), AAVrh.65 (SEQ ID NO: 35 of WO2005033321), AAVrh.68 (SEQ ID NO: 16 of WO2005033321), AAVrh.69 (SEQ ID NO: 39 of WO2005033321), AAVrh.70 (SEQ ID NO: 20 of WO2005033321), AAVrh.72 (SEQ ID NO: 9 of WO2005033321), or variants thereof including, but not limited to, AAVcy.2, AAVcy.3, AAVcy.4, AAVcy.5, AAVcy.6, AAVrh.12, AAVrh.17, AAVrh.18, AAVrh.19, AAVrh.21, AAVrh.22, AAVrh.23, AAVrh.24, AAVrh.25, AAVrh.25/42 15, AAVrh.31, AAVrh.32, AAVrh.33, AAVrh.34, AAVrh.35, AAVrh.36, AAVrh.37, AAVrh 14. Non-limiting examples of variants include SEQ ID NO: 13, 15, 17, 19, 24, 36, 40, 45, 47, 48, 51-54, 60-62, 64-77, 79, 80, 82, 89, 90, 93-95, 98, 100, 101, 109-113, 118-120, 124, 126, 131, 139, 142, 151,154, 158, 161, 162, 165-183, 202, 204-212, 215, 219, 224-236, of WO2005033321, the contents of which are herein incorporated by reference in their entirety.

[0070] In some embodiments, the AAV serotype may be, or have, a sequence as described in International Publication No. WO2015168666, the contents of which are herein incorporated by reference in their entirety, such as, but not limited to, AAVrh8R (SEQ ID NO: 9 of WO2015168666), AAVrh8R A586R mutant (SEQ ID NO: 10 of WO2015168666), AAVrh8R R533A mutant (SEQ ID NO: 11 of WO2015168666), or variants thereof.

[0071] In some embodiments, the AAV seroty pe may be, or have, a sequence as described in U.S. Pat. No. 9,233.131, the contents of which are herein incorporated by reference in their entirety, such as, but not limited to, AAVhE1.1 (SEQ ID NO:44 of U.S. Pat. No. 9,233,131), AAVhEr1.5 (SEQ ID NO:45 of U.S. Pat. No. 9,233,131), AAVhER1.14 (SEQ ID NO:46 of U.S. Pat. No. 9,233,131), AAVbEr1.8 (SEQ ID NO:47 of U.S. Pat. No. 9,233,131), AAVhEr1.16 (SEQ IDNO:48 of U.S. Pat. No. 9,233,131), AAVhEr1.18 (SEQ ID NO: 49 of U.S. Pat. No. 9,233,131), AAVhEr1.35 (SEQ ID NO:50 of U.S. Pat. No. 9,233,131), AAVhEr1.7 (SEQ ID NO: 51 of U.S. Pat. No. 9,233,131), AAVhEr1.36 (SEQ ID NO: 52 of U.S. Pat. No. 9,233,131), AAVhEr2.29 (SEQ ID NO:53 of U.S. Pat. No. 9,233,131), AAVhEr2.4 (SEQ ID NO:54 of U.S. Pat. No. 9,233,13131), AAVhEr2.16 (SEQ ID NO:55 of U.S. Pat. No. 9,233,131), AAVhEr2.30 (SEQ ID NO:56 of U.S. Pat. No. 9,233,131), A A VhEr2.31 (SEQ ID NO: 58 of U.S. Pat. No. 9,233,131 ), AAVhEr2.36 (SEQ ID NO: 57 of U.S. Pat. No. 9,233,131), AAVbER1.23 (SEQ ID NO:53 of U.S. Pat. No. 9,233,131), AAVhEr3.1 (SEQ IDNO:59 of U.S. Pat. No. 9,233,131), AAV2.5T (SEQ ID NO:42 of U.S. Pat. No. 9,233,131), or variants thereof.

[0072] In some embodiments, the AAV serotype may be, or have, a sequence as described in United States Patent Publication No. US20150376607, the contents of which are herein incorporated by reference in their entirety, such as, but not limited to, AAV-PAEC (SEQ ID NO: 1 of US20150376607), AAV-LK01 (SEQ ID NO: 2 of US20150376607), AAV-LK.02 (SEQ ID NO: 3 of US20150376607), AAV-LK03 (SEQ ID NO: 4 of US20150376607), AAV-LK04(SEQ ID NO: 5 of US20150376607), AAV-LK05 (SEQ ID NO: 6 of US20150376607), AAV-LK.06 (SEQ ID NO: 7 of US20150376607), AAV-LK07 (SEQ ID NO: 8 of US20150376607), AAV-LK08 (SEQ ID NO: 9 of US20150376607), AAV-LK09 (SEQ ID NO: 10 of US20150376607), AAV-LK10 (SEQ ID NO: 11 of US20150376607), AAV-LK11 (SEQ ID NO: 12 of US20150376607), AAV-LK12 (SEQ ID NO: 13 of US20150376607), AAV-LK13 (SEQ ID NO: 14 of US20150376607), AAV-LK14 (SEQ ID NO: 15 of US20150376607), AAV-LK15 (SEQ ID NO: 16 of US20150376607), AAV-LK16 (SEQ ID NO: 17 of US20150376607), AAV-LK17 (SEQ ID NO: 18 of US20150376607), AAV-LK18 (SEQ ID NO: 19 of US20150376607). AAV-LK19 (SEQ ID NO: 20 of US20150376607), AAV-PAEC2 (SEQ ID NO: 21 of US20150376607), AAV-PAEC4 (SEQ ID NO: 22 of US20150376607), AAV-PAEC6(SEQ ID NO: 23 of US20150376607), AAV-PAEC7 (SEQ ID NO: 24 of US20150376607), AAV-PAEC8 (SEQ ID NO:25 of US20150376607), AAV-PAEC11 (SEQ ID NO: 26 of US20150376607), AAV-PAEC12 (SEQ ID NO: 27, of US20150376607), or variants thereof.

[0073] In some embodiments, the AAV serotype may be, or have, a sequence as described in U.S. Pat. No. 9,163,261, the contents of which are herein incorporated by reference in their entirety, such as, but not limited to, AAV-2-pre-miRN A˜101 (SEQ ID NO: 1 of U.S. Pat. No. 9,163,261), or variants thereof.

[0074] In some embodiments, the AAV serotype may be, or have, a sequence as described in United States Patent Publication No. US20150376240, the contents of which are herein incorporated by reference in their entirety, such as, but not limited to, AAV-8h (SEQ ID NO: 6of US20150376240), AAV-8b (SEQ ID NO: 5 of US20150376240), AAV-h (SEQ ID NO: 2 of US20150376240), AAV-b (SEQ ID NO: 1 of US20150376240), or variants thereof.

[0075] In some embodiments, the AAV serotype may be, or have, a sequence as described in United States Patent Publication No. US20160017295, the contents of which are herein incorporated by reference in their entirety, such as, but not limited to, AAV SM 10-2 (SEQ ID NO: 22 of US20160017295), AAV Shuffle 100-1 (SEQ ID NO: 23 of US20160017295), AAV Shuffle 100-3 (SEQ ID NO: 24 of US20160017295), AAV Shuffle 100-7 (SEQ ID NO: 25 of US20160017295), AAV Shuffle 10-2 (SEQ ID NO: 34 of US20160017295), AAV Shuffle 10-6(SEQ ID NO: 35 of US20160017295), AAV Shuffle 10-8 (SEQ ID NO: 36 of US20160017295), AAV Shuffle 100-2 (SEQ ID NO: 37 of US20160017295), AAV SM 10-1 (SEQ ID NO: 38 of US20160017295), AAV SM 10-8 (SEQ ID NO: 39 of US20160017295), AAV SM 100-3 (SEQ ID NO: 40 of US20160017295), AAV SM 100-10 (SEQ ID NO: 41 of US20160017295), or variants thereof.

[0076] In some embodiments, the AAV serotype may be, or have, a sequence as described in United States Patent Publication No. US20150238550, the contents of which are herein incorporated by reference in their entirety, such, as, but not limited to, BNP61 AAV (SEQ ID NO: 1 of US20150238550), BNP62 AAV (SEQ ID NO: 3 of US20150238550), BNP63 AAV (SEQ ID NO: 4 of US20150238550), or valiants thereof.

[0077] In some embodiments, the AAV serotype may be or may have a sequence as described in United States Patent Publication No. US20150315612, the contents of which are herein incorporated by reference in their entirety, such as, but not limited to, AAVrh.50 (SEQ ID NO: 108 of US2015031561.2), AAVrh.43 (SEQ ID NO: 163 of US20150315612), AAVrh.62 (SEQ ID NO: 114 of US20150315612), AAVrh.48 (SEQ ID NO: 11.5 of US20150315612), AAVhu.19 (SEQ ID NO: 133 of US20150315612), AAVhu.11 (SEQ ID NO: 153 of US20150315612), AAVhu.53 (SEQ ID NO: 186 of US20150315612), AAV4-8/rh.64 (SEQ ID NO: 15 of US20150315612), AAVLG-9/hu.39 (SEQ ID NO: 24 of US20150315612), AAV54.5/hu.23 (SEQ ID NO: 60 of US20150315612), AAV54.2/hu.22 (SEQ IDNO: 67 of US20150315612), AAV54.7/hu.24 (SEQ ID NO: 66 of US20150315612), AAV54.1/hu.21 (SEQ ID NO: 65 of US20150315612), AAV.54.4R/hu.27 (SEQ ID NO: 64 of US20150315612), AAV46.2/hu.28 (SEQ ID NO: 68 of US20150315612), AAV46.6/hu.29 (SEQ ID NO: 69 of US20150315612), AAV128.1/hu.43 (SEQ ID NO: 80 of US20150315612), or variants thereof.

[0078] In some embodiments, the AAV serotype may be, or have, a sequence as described in International Publication No. WO2015121501, the contents of which are herein incorporated by reference in their entirety, such as, but not limited to, true type AAV (itAAV) (SEQ ID NO: 2 of WO2015121501), “UPenn AAV10” (SEQ ID NO: 8 of WO2015121501), “Japanese AAV10” (SEQ ID NO: 9 of WO201512150), or variants thereof.

[0079] According to the present invention, AAV capsid serotype selection or use may be from a variety of species. In one embodiment, the AAV may be an avian AAV (AAAV). The AAAV serotype may be, or have, a sequence as described in U.S. Pat. No. 9,238,800, the contents of which are herein incorporated by reference in their entirety, such as, but not limited to, AAAV (SEQ ID NO: 1, 2, 4, 6, 8, 10, 12, and 14 of U.S. Pat. No. 9,238,800), or variants thereof.

[0080] In one embodiment, the AAV may be a bovine AAV (BAAV). The BAAV serotype may be, or have, a sequence as described in U.S. Pat. No. 9,193,769, the contents of which are herein incorporated by reference in their entirety, such as, but not limited to, BAAV (SEQ ID NO: 1 and 6 of U9193769), or variants thereof. The BAAV serotype may be or have a sequence as described in U.S. Pat. No. 7,427,396, the contents of which are herein incorporated by reference in their entirety, such as, but not limited to, BAAV (SEQ ID NO: 5 and 6 of U.S. Pat. No. 7,427,396), or variants thereof.

[0081] In one embodiment, the AAV may be a caprine AAV. The caprine AAV serotype may be, or have, a sequence as described in U.S. Pat. No. 7,427,396, the contents of which are herein incorporated by reference in their entirety, such as, but not limited to, caprine AAV (SEQ ID NO: 3 of U.S. Pat. No. 7,427,396), or variants thereof.

[0082] In other embodiments, the AAV may be engineered, as a hybrid AAV from two or more parental serotypes. In one embodiment, the AAV may be AAV2G9 which comprises sequences from AAV2 and AAV9. The AAV2G9 AAV serotype may be, or have, a sequence as described in United States Patent Publication No. US20160017005, the contents of which are herein incorporated by reference in its entirety.

[0083] In one embodiment, the AAV may be a serotype generated by the AAV9 capsid library with mutations in amino acids 390-627 (VPS numbering) as described by Pulicherla et al (Molecular Therapy 19(6):1070-1078 (2011), the contents of which are herein incorporated by reference in their entirety. The serotype and corresponding nucleotide and amino acid substitutions may be, but is not limited to, AAV9.1 (G1594C; D532H), AAV6.2 (T1418A and T1436X; V473D and 1479K), AAV9.3 (T1238A; F413Y), AAV9.4 (T1250C and A1617T; F417S), AAV9.5 (A1235G, A1314T, A1642G, C1760T; Q412R, T548A, A587V), AAV9.6 (T1231 A, F4111), AAV9.9 (G1203A, G1785T: W595C), AAV9.10 (A1500G, T1676C; M559T), AAV9.11 (A1425T, A1702C. A1769T; T568P, Q590L). AAV9.13 (A1369C, A1720T; N457H, T574S), AAV9.14 (T1340A, T1362C. T1560GC, G1713A; L447H), AAV9.16 (A1775T; Q592L), AAV9.24 (T1507C, T1521G; W503R), AAV9.26 (A1337G, A1769C; Y446C, Q590P), AAY9.33 (A1667C; D556A), AAV9.34 (A1534G, C1794T; N512D), AAV9.35 (A1289T, T1450A, C1494T, A1515T, C1794A, G1816A; Q430L, Y484N, N98K, V606I), AAV9.40 (A1694T, E565V), AAV9.41 (A1348T, T1362C; T450S), AAV9.44 (A1684C, A1701T, A1737G: N562H, K567N), AAV9.45 (A1492T, C1804T; N498Y, L602F), AAV9.46 (G1441C, T1525C, T1549G; G481R, W509R, L517V), 9.47 (G1241A, G1358A, A1669G, C1745T; S414N, G453D, K557E, T582I), AAV9.48 (C1445T. A1736T; P482L, Q579L), AAV9.50 (A1638T, C1683T, T1805A; Q546H, L602H), AAV9.53 (G1301A. A1405C, C1664T. G1811T; R134Q, S469R, A555V, G604V), AAV9.54 (C1531A, T1609A; L511, L537M), AAV9.55 (T1605A; F535L), AAV9.58 (C1475T, CI579A; T492I, H527N), AAV.59 (T1336C; Y446H), AAV9.61 (A1493T; N4981), AAV9.64 (C1531A, A1617T; L5111), AAV9.65 (C1335T, T1530C, C1568A; A523D), AAV9.68 (C1510A; P504T), AAV9.80 (G1441 A, G481R), AAV9.83 (C1402A, A1500T; P468T, E500D), AAV9.87 (T1464C; T1468C: S490P), AAV9.90 (A 1196T; Y399F), AAV9.91 (T1316G, A1583T, C1782G, T1806C; L439R, K.5281), AAV9.93 (A1273G, A142.1G, A1.638C, C1712T, G1732A, A1744T, A1832T; S425G, Q474R, Q546H, P571L, G578R, T582S, D611V), AAV9.94 (A1675T; M559L) and AAV9.95 (T1605A; F535L).

[0084] In some embodiments, the AAV serotype may be, or have, a sequence as described in International Publication No. WO2016049230, the contents of which are herein incorporated by reference in their entirety, such as, but not limited to AAVF1/HSC1 (SEQ ID NO: 2 and 20 of WO2016049230), AAVF2/HSC2 (SEQ ID NO: 3 and 21 of WO2016049230), AAVF3/HSC3 (SEQ ID NO: 5 and 22 of WO2016049230), AAVF4/HSC4 (SEQ ID NO: 6 and 23 of WO2016049230), AAVF5/HSC5 (SEQ ID NO: 11 and 25 of WO2016049230), AAVF6/HSC6 (SEQ ID NO: 7 and 24 of WO2016049230), AAVF7/HSC7 (SEQ ID NO: 8 and 27 of WO2016049230), AAVF8/HSC8 (SEQ ID NO: 9 and 28 of WO2016049230), AAVF9/HSC9(SEQ ID NO: 10 and 29 of WO2016049230), AAVF11/HSC11 (SEQ ID NO: 4 and 26 of WO2016049230), AAVF12/HSC12 (SEQ ID NO: 12 and 30 of WO2016049230), AAVF13/HSC13 (SEQ ID NO: 14 and 31 of WO2016049230), AAVF14/HSC14 (SEQ ID NO: 15 and 32 of WO2016049230), AAVF15/HSC15 (SEQ ID NO: 16 and 33 of WO2016049230), AAVF16/HSC16 (SEQ ID NO: 17 and 34 of WO2016049230), AAVF17/HSC17 (SEQ ID NO: 13 and 35 of WO2016049230), or variants or derivatives thereof.

[0085] In some embodiments, the AAV serotype may be, or have, a sequence as described in U.S. Pat. No. 8,734,809, the contents of which are herein incorporated by reference in their entirety, such as, but not limited to, AAV CBr-E1 (SEQ ID NO: 13 and 87 of U.S. Pat. No. 8,734,809), AAV CBr-E2 (SEQ ID NO: 14 and 88 of U.S. Pat. No. 8,734,809), AAV CBr-E3 (SEQ ID NO: 15 and 89 of U.S. Pat. No. 8,734,809), AAV CBr-E4 (SEQ ID NO: 16 and 90 of U.S. Pat. No. 8,734,809), AAV CBr-E5 (SEQ ID NO: 17 and 91 of U.S. Pat. No. 8,734,809), AAV CBr-e5 (SEQ ID NO: 18 and 92 of U.S. Pat. No. 8,734,809), AAV CBr-E6 (SEQ ID NO: 19 and 93 of U.S. Pat. No. 8,734,809), AAV CBr-E7 (SEQ ID NO: 20 and 94 of U.S. Pat. No. 8,734,809). AAV CBr-E8 (SEQ ID NO: 21 and 95 of U.S. Pat. No. 8,734,809), AAV CLv-D1 (SEQ ID NO: 22 and 96 of U.S. Pat. No. 8,734,809), AAV CLv-D2 (SEQ ID NO: 23 and 97 of U.S. Pat. No. 8,734,809), AAV CLv-D3 (SEQ ID NO: 24 and 98 of U.S. Pat. No. 8,734,809), AAV CLv-D4 (SEQ ID NO: 25 and 99 of U.S. Pat. No. 8,734,809), AAV CLv-D5 (SEQ ID NO: 26 and 100 of U.S. Pat. No. 8,734,809), AAV CLv-D6 (SEQ ID NO: 27 and 101 of U.S. Pat. No. 8,734,809), AAV CLv-D7 (SEQ ID NO: 28 and 102 of U.S. Pat. No. 8,734,809), AAV CLv-D8 (SEQ ID NO: 29 and 103 of U.S. Pat. No. 8,734,809), AAV CLv-E1 (SEQ ID NO: 13 and 87 of U.S. Pat. No. 8,734,809), AAV CLv-R1 (SEQ ID NO: 30 and 104 of U.S. Pat. No. 8,734,809), AAV CLv-R2 (SEQ ID NO: 31 and 105 of U.S. Pat. No. 8,734,809), AAV CLv-R3 (SEQ ID NO: 32 and 106 of U.S. Pat. No. 8,734,809), AAV CLv-R4 (SEQ ID NO: 33 and 107 of U.S. Pat. No. 8,734,809), AAV CLv-R5 (SEQ ID NO: 34 and 108 of U.S. Pat. No. 8,734,809), AAV CLv-R6 (SEQ ID NO: 35 and 109 of U.S. Pat. No. 8,734,809), AAV CLv-R7 (SEQ ID NO: 36 and 110 of U.S. Pat. No. 8,734,809), AAV CLv-R8 (SEQ ID NO: 37 and 111 of U.S. Pat. No. 8,734,809), AAV CLv-R9 (SEQ ID NO: 38 and 112 of U.S. Pat. No. 8,734,809), AAV CLg-F1 (SEQ ID NO: 39 and 113 of U.S. Pat. No. 8,734,809), AAV CLg-F2 (SEQ ID NO: 40 and 114 of U.S. Pat. No. 8,734,809), AAV CLg-F3 (SEQ ID NO: 41 and 115 of U.S. Pat. No. 8,734,809), AAV CLg-F4 (SEQ ID NO: 42 and 116 of U.S. Pat. No. 8,734,809), AAV CLg-F5 (SEQ ID NO: 43 and 117 of U.S. Pat. No. 8,734,809), AAV CLg-F6 (SEQ ID NO: 43 and 117 of U.S. Pat. No. 8,734,809), AAV CLg˜F7 (SEQ ID NO: 44 and 118 of U.S. Pat. No. 8,734,809), AAV CLg-F8 (SEQ ID NO: 43 and 117 of U.S. Pat. No. 8,734,809), AAV CSp-1 (SEQ ID NO: 45 and 119 of U.S. Pat. No. 8,734,809), AAV CSp-10 (SEQ ID NO: 46 and 120 of U.S. Pat. No. 8,734,809), AAV CSp-11 (SEQ ID NO: 47 and 121 of U.S. Pat. No. 8,734,809), AAV CSp-2 (SEQ ID NO: 48 and 122 of U.S. Pat. No. 8,734,809), AAV CSp-3 (SEQ ID NO: 49 and 123 of U.S. Pat. No. 8,734,809), AAV CSp˜4 (SEQ ID NO: 50 and 124 of U.S. Pat. No. 8,734,809), AAV CSp-6 (SEQ ID NO: 51 and 125 of U.S. Pat. No. 8,734,809), AAV CSp-7 (SEQ ID NO: 52 and 126 of U.S. Pat. No. 8,734,809), AAV CSp-8 (SEQ ID NO: 53 and 127 of U.S. Pat. No. 8,734,809), AAV CSp-9(SEQ ID NO: 54 and 128 of U.S. Pat. No. 8,734,809), AAV CIit-2 (SEQ ID NO: 55 and 129 of U.S. Pat. No. 8,734,809), AAV CHt-3 (SEQ ID NO: 56 and 130 of U.S. Pat. No. 8,734,809), AAV CKd-I (SEQ ID NO: 57 and 131 of U.S. Pat. No. 8,734,809), AAV CKd-10 (SEQ ID NO: 58 and 132 of U.S. Pat. No. 8,734,809), AAV CKd-2 (SEQ ID NO: 59 and 133 of U.S. Pat. No. 8,734,809), AAV CKd-3 (SEQ ID NO: 60 and 134 of U.S. Pat. No. 8,734,809), AAV CKd-4 (SEQ ID NO: 61 and 135 of U.S. Pat. No. 8,734,809), AAV CKd-6 (SEQ ID NO: 62 and 136 of U.S. Pat. No. 8,734,809), AAV CKd-7 (SEQ ID NO: 63 and 137 of U.S. Pat. No. 8,734,809), AAV CKd-8 (SEQ ID NO: 64 and 138 of U.S. Pat. No. 8,734,809), AAV CLv-1 (SEQ ID NO: 35 and 139 of U.S. Pat. No. 8,734,809), AAV CLv-12 (SEQ ID NO: 66 and 140 of U.S. Pat. No. 8,734,809), AAV CLv-13 (SEQ ID NO: 67 and 141 of U.S. Pat. No. 8,734,809), AAV CLv-2 (SEQ ID NO: 68 and 142 of U.S. Pat. No. 8,734,809), AAV CLv-3 (SEQ ID NO: 69 and 143 of U.S. Pat. No. 8,734,809), AAV CI,v-4 (SEQ ID NO: 70 and 144 of U.S. Pat. No. 8,734,809), AAV CLv-6 (SEQ ID NO: 71and 145 of U.S. Pat. No. 8,734,809), AAV CLv-8 (SEQ ID NO: 72 and 146 of U.S. Pat. No. 8,734,809), AAV CKd-B1 (SEQ ID NO: 73 and 147 of U.S. Pat. No. 8,734,809), AAV CKd-B2 (SEQ ID NO: 74 and 148 of U.S. Pat. No. 8,734,809), AAV CKd-B3 (SEQ ID NO: 75 and 149 of U.S. Pat. No. 8,734,809), AAV CKd-B4 (SEQ ID NO: 76 and 150 of U.S. Pat. No. 8,734,809), AAV CKd-B5 (SEQ ID NO: 77 and 151 of U.S. Pat. No. 8,734,809), AAV CKd-B6 (SEQ ID NO: 78 and 152 of U.S. Pat. No. 8,734,809), AAV CK.d-B7 (SEQ ID NO: 79 and 153 of U.S. Pat. No. 8,734,809), AAV CKd-B8 (SEQ ID NO: 80 and 154 of U.S. Pat. No. 8,734,809), AAV CKd-H1 (SEQ ID NO: 81and 155 of U.S. Pat. No. 8,734,809), AAV CKd-H2 (SEQ ID NO: 82 and 156 of U.S. Pat. No. 8,734,809), AAV CKd-H3 (SEQ ID NO: 83 and. 1.57 of U.S. Pat. No. 8,734,809), AAV CKd-H4 (SEQ ID NO: 84 and 158 of U.S. Pat. No. 8,734,809), AAV CKd-H5 (SEQ ID NO: 85 and 159 of U.S. Pat. No. 8,734,809), AAV CKd-H6 (SEQ ID NO: 77 and 151 of U.S. Pat. No. 8,734,809), AAV CHt-1 (SEQ ID NO: 86 and 160 of U.S. Pat. No. 8,734,809), AAV CLv1-1 (SEQ ID NO: 171 of U.S. Pat. No. 8,734,809), AAV CLv1-2(SEQ ID NO: 172 of U.S. Pat. No. 8,734,809), AAV CLv1-3 (SEQ ID NO: 173 of U.S. Pat. No. 8,734,809), AAV CLv1-4 (SEQ ID NO: 174 of U.S. Pat. No. 8,734,809), AAV Clv1-7 (SEQ ID NO: 175 of U.S. Pat. No. 8,734,809), AAV Clv 1-8 (SEQ ID NO: 176 of U.S. Pat. No. 8,734,809), AAV Clv1-9 (SEQ ID NO: 177 of U.S. Pat. No. 8,734,809), AAV Clv1-1.0 (SEQ ID NO: 1.78 of U.S. Pat. No. 8,734,809), AAV. VR-355 (SEQ ID NO: 181 of U.S. Pat. No. 8,734,809), AAV.hu.48R3 (SEQ ID NO: 183 of U.S. Pat. No. 8,734,809), or variants or derivatives thereof.

[0086] In some embodiments, the AAV serotype raay be, or have, a sequence as described in International Publication No. WO2016065001, the contents of which are herein incorporated by reference in their entirety, such as, but not limited to AAV CHt-P2 (SEQ ID NO: 1 and 51 of WO2016065001), AAV CHt-P.5 (SEQ ID NO: 2 and 52 of WO2016065001). AAV CH1-P9 (SEQ ID NO: 3 and 53 of WO2016065001), AAV CBr-7.1 (SEQ ID NO: 4 and 54 of WO2016065001), AAV CBr-7.2 (SEQ ID NO: 5 and 55 of WO2016065001), AAV CBr-7.3 (SEQ ID NO: 6 and 56 of WO2016065001), AAV CBr-7.4 (SEQ ID NO: 7 and 57 of WO2016065001), AAV CBr-7.5 (SEQ ID NO: 8 and 58 of WO2016065001), AAV CBr-7.7 (SEQ ID NO: 9 and 59 of WO2016065001), AAV CBr-7.8 (SEQ ID NO: 10 and 60 of WO2016065001), AAV CBr-7.10 (SEQ ID NO: 11 and 61 of WO2016065001), AAV CKd-N3 (SEQ ID NO: 12 and 62 of WO2016065001), AAV CKd-N4 (SEQ ID NO: 13 and 63 of WO2016065001), AAV CKd-N9 (SEQ ID NO: 14 and 64 of WO20160650011 AAV CLv-L4 (SEQ ID NO: 15 and 65 of WO2016065001), AAV CLv-L5 (SEQ ID NO: 16 and 66 of WO2016065001), AAV CLv-L6 (SEQ ID NO: 17 and 67 of WO2016065001), AAV CLv-K1 (SEQ ID NO: 18 and 68 of WO2016065001), AAV CLv-K3 (SEQ ID NO: 19 and 69 of WO2016065001), AAV CLv-K6 (SEQ ID NO: 20 and 70 of WO2016065001), AAV CLv-M1 (SEQ ID NO: 21 and 71 of WO2016065001), AAV CLv-M11 (SEQ ID NO: 22 and 72 of WO2016065001), AAV CLv-M2 (SEQ ID NO: 23 and 73 of WO2016065001), AAV CLv-M5 (SEQ ID NO: 24 and 74 of WO2016065001), AAV CLv-M6 (SEQ ID NO: 25 and 75 of WO2016065001), AAV CLv-M7 (SEQ ID NO: 26 and 76 of WO2016065001), AAV CLv-M8 (SEQ ID NO: 27 and 77 of WO2016065001), AAV CLv-M9 (SEQ ID NO: 28 and 78 of WO2016065001), CHt-P1 (SEQ IDNO: 29 and 79 of WO2016065001), AAV CHt-P6 (SEQ ID NO: 30 and 80 of WO2016065001), AAV CHt-P8 (SEQ IDNO: 31 and 81 of WO2016065001), AAV CHt-6.1 (SEQ ID NO: 32 and 82 of WO2016065001). AAV CHt-6.10 (SEQ ID NO: 33 and 83 of WO2016065001), AAV CHt-6.5 (SEQ ID NO: 34 and 84 of WO2016065001), AAV CHt-6.6 (SEQ ID NO: 35 and 85 of WO2016065001), AAV CHt-6.7 (SEQ ID NO: 36 and 86 of WO2016065001), AAV CHt-6.8 (SEQ ID NO: 37 and 87 of WO2016065001), AAV CSp-8.10 (SEQ ID NO: 38 and 88 of WO2016065001), AAV CSp-8.2 (SEQ ID NO: 39 and 89 of WO2016065001), AAV CSp-8.4 (SEQ ID NO: 40 and 90 of WO2016065001), AAV CSp-8.5 (SEQ ID NO: 41 and 91 of WO2016065001), AAV CSp-8.6 (SEQ ID NO: 42 and 92 of WO2016065001), AAV CSp-8.7 (SEQ ID NO: 43 and 93 of WO2016065001), AAV CSp-8.8 (SEQ ID NO: 44 and 94 of WO2016065001), AAV CSp-8.9 (SEQ ID NO: 45 and 95 of WO2016065001), AAV CBr-B7.3 (SEQ ID NO: 46 and 96 of WO2016065001), AAV CBr-R7.4 (SEQ ID NO: 47 and 97 of WO2016065001), AAV3B (SEQ ID NO: 48 and 98 of WO2016065001). AAV4 (SEQ ID NO: 49 and 99 of WO2016065001). AAV5 (SEQ ID NO: 50 and 100 ofWO2016065001), or variants or derivatives thereof.

[0087] In one embodiment, the AAV may be a seroty pe selected from any of those found in Table 1.

[0088] In one embodiment, the AAV may comprise a sequence, fragment or variant thereof. of the sequences in Table 1.

[0089] In one embodiment, the AAV may be encoded by a sequence, fragment or variant as

[0090] described in Table 1.

TABLE 1
AAV Serotypes

| | SEQ | |
|---|---|---|
| Serotype | ID NO | Reference Information |
| AAV1 | 1 | US20150159173 SEQ ID NO: 11, |
| | | US20150315612 SEQ ID NO: 202 |
| AAV1 | 2 | US20160017295 SEQ ID NO: 1, |
| | | US20030138772 SEQ ID NO: 64, |
| | | US20150159173 SEQ ID NO: 27, |
| | | US20150315612 SEQ ID NO: 219, |
| | | U.S. Pat. No. 7,198,951 SEQ ID NO: 5 |
| AAV1 | 3 | US20030138772 SEQ ID NO: 6 |
| AAV1.3 | 4 | US20030138772 SEQ ID NO: 14 |
| AAV10 | 5 | US20030138772 SEQ ID NO: 117 |
| AAV10 | 6 | WO2015121501 SEQ ID NO: 9 |
| AAV10 | 7 | WO2015121501 SEQ ID NO: 8 |
| AAV11 | 8 | US20030138772 SEQ ID NO: 118 |
| AAV12 | 9 | US20030138772 SEQ ID NO: 119 |
| AAV2 | 10 | US20150159173 SEQ ID NO: 7, |
| | | US20150315612 SEQ ID NO: 211 |
| AAV2 | 11 | US20030138772 SEQ ID NO: 70, |
| | | US20150159173 SEQ ID NO: 23, |
| | | US20150315612 SEQ ID NO: 221, |
| | | US20160017295 SEQ ID NO: 2, |
| | | U.S. Pat. No. 6,156,303 SEQ ID NO: 4, |
| | | U.S. Pat. No. 7,198,951 SEQ ID NO: 4, |
| | | WO2015121501 SEQ ID NO: 1 |
| AAV2 | 12 | U.S. Pat. No. 6,156,303 SEQ ID NO: 8 |
| AAV2 | 13 | US20030138772 SEQ ID NO: 7 |
| AAV2 | 14 | U.S. Pat. No. 6,156,303 SEQ ID NO: 3 |
| AAV2.5T | 15 | U.S. Pat. No. 9,233,131 SEQ ID NO: 42 |
| AAV223.10 | 16 | US20030138772 SEQ ID NO: 75 |
| AAV223.2 | 17 | US20030138772 SEQ ID NO: 49 |
| AAV223.2 | 18 | US20030138772 SEQ ID NO: 76 |
| AAV223.4 | 19 | US20030138772 SEQ ID NO: 50 |
| AAV223.4 | 20 | US20030138772 SEQ ID NO: 73 |
| AAV223.5 | 21 | US20030138772 SEQ ID NO: 51 |
| AAV223.5 | 22 | US20030138772 SEQ ID NO: 74 |
| AAV223.6 | 23 | US20030138772 SEQ ID NO: 52 |
| AAV223.6 | 24 | US20030138772 SEQ ID NO: 78 |
| AAV223.7 | 25 | US20030138772 SEQ ID NO: 53 |
| AAV223.7 | 26 | US20030138772 SEQ ID NO: 77 |
| AAV29.3 | 27 | US20030138772 SEQ ID NO: 82 |
| AAV29.4 | 28 | US20030138772 SEQ ID NO: 12 |
| AAV29.5 | 29 | US20030138772 SEQ ID NO: 83 |
| AAV29.5 | 30 | US20030138772 SEQ ID NO: 13 |
| (AAVbb.2) | | |
| AAV3 | 31 | US20150159173 SEQ ID NO: 12 |
| AAV3 | 32 | US20030138772 SEQ ID NO: 71, |
| | | US20150159173 SEQ ID NO: 28, |
| | | US20160017295 SEQ ID NO: 3, |
| | | U.S. Pat. No. 7,198,951 SEQ ID NO: 6 |
| AAV3 | 33 | US20030138772 SEQ ID NO: 8 |
| AAV3.3b | 34 | US20030138772 SEQ ID NO: 72 |
| AAV3-3 | 35 | US20150315612 SEQ ID NO: 200 |
| AAV3-3 | 36 | US20150315612 SEQ ID NO: 217 |
| AAV3a | 37 | U.S. Pat. No. 6,156,303 SEQ ID NO: 5 |
| AAV3a | 38 | U.S. Pat. No. 6,156,303 SEQ ID NO: 9 |
| AAV3b | 39 | U.S. Pat. No. 6,156,303 SEQ ID NO: 6 |
| AAV3b | 40 | U.S. Pat. No. 6,156,303 SEQ ID NO: 10 |
| AAV3b | 41 | U.S. Pat. No. 6,156,303 SEQ ID NO: 1 |
| AAV4 | 42 | US20140348794 SEQ ID NO: 17 |
| AAV4 | 43 | US20140348794 SEQ ID NO: 5 |
| AAV4 | 44 | US20140348794 SEQ ID NO: 3 |
| AAV4 | 45 | US20140348794 SEQ ID NO: 14 |
| AAV4 | 46 | US20140348794 SEQ ID NO: 15 |
| AAV4 | 47 | US20140348794 SEQ ID NO: 19 |
| AAV4 | 48 | US20140348794 SEQ ID NO: 12 |
| AAV4 | 49 | US20140348794 SEQ ID NO: 13 |
| AAV4 | 50 | US20140348794 SEQ ID NO: 7 |
| AAV4 | 51 | US20140348794 SEQ ID NO: 8 |
| AAV4 | 52 | US20140348794 SEQ ID NO: 9 |
| AAV4 | 53 | US20140348794 SEQ ID NO: 2 |
| AAV4 | 54 | US20140348794 SEQ ID NO: 10 |
| AAV4 | 55 | US20140348794 SEQ ID NO: 11 |
| AAV4 | 56 | US20140348794 SEQ ID NO: 18 |
| AAV4 | 57 | US20030138772 SEQ ID NO: 63, |
| | | US20160017295 SEQ ID NO: 4, |
| | | US20140348794 SEQ ID NO: 4 |
| AAV4 | 58 | US20140348794 SEQ ID NO: 16 |
| AAV4 | 59 | US20140348794 SEQ ID NO: 20 |
| AAV4 | 60 | US20140348794 SEQ ID NO: 6 |
| AAV4 | 61 | US20140348794 SEQ ID NO: 1 |
| AAV42.2 | 62 | US20030138772 SEQ ID NO: 9 |
| AAV42.2 | 63 | US20030138772 SEQ ID NO: 102 |
| AAV42.3b | 64 | US20030138772 SEQ ID NO: 36 |
| AAV42.3B | 65 | US20030138772 SEQ ID NO: 107 |
| AAV42.4 | 66 | US20030138772 SEQ ID NO: 33 |
| AAV42.4 | 67 | US20030138772 SEQ ID NO: 88 |
| AAV42.8 | 68 | US20030138772 SEQ ID NO: 27 |
| AAV42.8 | 69 | US20030138772 SEQ ID NO: 85 |
| AAV43.1 | 70 | US20030138772 SEQ ID NO: 39 |
| AAV43.1 | 71 | US20030138772 SEQ ID NO: 92 |
| AAV43.12 | 72 | US20030138772 SEQ ID NO: 41 |
| AAV43.12 | 73 | US20030138772 SEQ ID NO: 93 |
| AAV43.20 | 74 | US20030138772 SEQ ID NO: 42 |
| AAV43.20 | 75 | US20030138772 SEQ ID NO: 99 |
| AAV43.21 | 76 | US20030138772 SEQ ID NO: 43 |
| AAV43.21 | 77 | US20030138772 SEQ ID NO: 96 |
| AAV43.23 | 78 | US20030138772 SEQ ID NO: 44 |
| AAV43.23 | 79 | US20030138772 SEQ ID NO: 98 |
| AAV43.25 | 80 | US20030138772 SEQ ID NO: 45 |
| AAV43.25 | 81 | US20030138772 SEQ ID NO: 97 |
| AAV43.5 | 82 | US20030138772 SEQ ID NO: 40 |
| AAV43.5 | 83 | US20030138772 SEQ ID NO: 94 |
| AAV4-4 | 84 | US20150315612 SEQ ID NO: 201 |
| AAV4-4 | 85 | US20150315612 SEQ ID NO: 218 |
| AAV44.1 | 86 | US20030138772 SEQ ID NO: 46 |
| AAV44.1 | 87 | US20030138772 SEQ ID NO: 79 |
| AAV44.5 | 88 | US20030138772 SEQ ID NO: 47 |
| AAV44.5 | 89 | US20030138772 SEQ ID NO: 80 |
| AAV4407 | 90 | US20150315612 SEQ ID NO: 90 |
| AAV5 | 91 | U.S. Pat. No. 7,427,396 SEQ ID NO: 1 |
| AAV5 | 92 | US20030138772 SEQ ID NO: 114 |
| AAV5 | 93 | US20160017295 SEQ ID NO: 5, |
| | | U.S. Pat. No. 7,427,396 SEQ ID NO: 2, |
| | | US20150315612 SEQ ID NO: 216 |
| AAV5 | 94 | US20150315612 SEQ ID NO: 199 |
| AAV6 | 95 | US20150159173 SEQ ID NO: 13 |
| AAV6 | 96 | US20030138772 SEQ ID NO: 65, |
| | | US20150159173 SEQ ID NO: 29, |
| | | US20160017295 SEQ ID NO: 6, |
| | | U.S. Pat. No. 6,156,303 SEQ ID NO: 7 |
| AAV6 | 97 | U.S. Pat. No. 6,156,303 SEQ ID NO: 11 |
| AAV6 | 98 | U.S. Pat. No. 6,156,303 SEQ ID NO: 2 |
| AAV6 | 99 | US20150315612 SEQ ID NO: 203 |
| AAV6 | 100 | US20150315612 SEQ ID NO: 220 |
| AAV6.1 | 101 | US20150159173 |
| AAV6.12 | 102 | US20150159173 |
| AAV6.2 | 103 | US20150159173 |
| AAV7 | 104 | US20150159173 SEQ ID NO: 14 |
| AAV7 | 105 | US20150315612 SEQ ID NO: 183 |
| AAV7 | 106 | US20030138772 SEQ ID NO: 2, |
| | | US20150159173 SEQ ID NO: 30, |
| | | US20150315612 SEQ ID NO: 181, |
| | | US20160017295 SEQ ID NO: 7 |
| AAV7 | 107 | US20030138772 SEQ ID NO: 3 |
| AAV7 | 108 | US20030138772 SEQ ID NO: 1, |
| | | US20150315612 SEQ ID NO: 180 |
| AAV7 | 109 | US20150315612 SEQ ID NO: 213 |
| AAV7 | 110 | US20150315612 SEQ ID NO: 222 |
| AAV8 | 111 | US20150159173 SEQ ID NO: 15 |
| AAV8 | 112 | US20150376240 SEQ ID NO: 7 |
| AAV8 | 113 | US20030138772 SEQ ID NO: 4, |
| | | US20150315612 SEQ ID NO: 182 |
| AAV8 | 114 | US20030138772 SEQ ID NO: 95, |
| | | US20140359799 SEQ ID NO: 1, |
| | | US20150159173 SEQ ID NO: 31, |
| | | US20160017295 SEQ ID NO: 8, |
| | | U.S. Pat. No. 7,198,951 SEQ ID NO: 7, |
| | | US20150315612 SEQ ID NO: 223 |
| AAV8 | 115 | US20150376240 SEQ ID NO: 8 |
| AAV8 | 116 | US20150315612 SEQ ID NO: 214 |
| AAV-8b | 117 | US20150376240 SEQ ID NO: 5 |
| AAV-8b | 118 | US20150376240 SEQ ID NO: 3 |
| AAV-8h | 119 | US20150376240 SEQ ID NO: 6 |
| AAV-8h | 120 | US20150376240 SEQ ID NO: 4 |
| AAV9 | 121 | US20030138772 SEQ ID NO: 5 |
| AAV9 | 122 | U.S. Pat. No. 7,198,951 SEQ ID NO: 1 |
| AAV9 | 123 | US20160017295 SEQ ID NO: 9 |
| AAV9 | 124 | US20030138772 SEQ ID NO: 100, |
| | | U.S. Pat. No. 7,198,951 SEQ ID NO: 2 |
| AAV9 | 125 | U.S. Pat. No. 7,198,951 SEQ ID NO: 3 |
| AAV9 | 126 | U.S. Pat. No. 7,906,111 SEQ ID NO: 3; |
| (AAVhu.14) | | WO2015038958 SEQ ID NO: 11 |
| AAV9 | 127 | U.S. Pat. No. 7,906,111 SEQ ID NO: 123; |
| (AAVhu.14) | | WO2015038958 SEQ ID NO: 2 |
| AAVA3.1 | 128 | US20030138772 SEQ ID NO: 120 |
| AAVA3.3 | 129 | US20030138772 SEQ ID NO: 57 |
| AAVA3.3 | 130 | US20030138772 SEQ ID NO: 66 |
| AAVA3.4 | 131 | US20030138772 SEQ ID NO: 54 |
| AAVA3.4 | 132 | US20030138772 SEQ ID NO: 68 |
| AAVA3.5 | 133 | US20030138772 SEQ ID NO: 55 |
| AAVA3.5 | 134 | US20030138772 SEQ ID NO: 69 |
| AAVA3.7 | 135 | US20030138772 SEQ ID NO: 56 |
| AAVA3.7 | 136 | US20030138772 SEQ ID NO: 67 |
| AAV29.3 | 137 | US20030138772 SEQ ID NO: 11 |
| (AAVbb.1) | | |
| AAVC2 | 138 | US20030138772 SEQ ID NO: 61 |
| AAVCh.5 | 139 | US20150159173 SEQ ID NO: 46, |
| | | US20150315612 SEQ ID NO: 234 |
| AAVcy.2 | 140 | US20030138772 SEQ ID NO: 15 |
| (AAV13.3) | | |
| AAV24.1 | 141 | US20030138772 SEQ ID NO: 101 |
| AAVcy.3 | 142 | US20030138772 SEQ ID NO: 16 |
| (AAV24.1) | | |
| AAV27.3 | 143 | US20030138772 SEQ ID NO: 104 |
| AAVcy.4 | 144 | US20030138772 SEQ ID NO: 17 |
| (AAV27.3) | | |
| AAVcy.5 | 145 | US20150315612 SEQ ID NO: 227 |
| AAV7.2 | 146 | US20030138772 SEQ ID NO: 103 |
| AAVcy.5 | 147 | US20030138772 SEQ ID NO: 18 |
| (AAV7.2) | | |
| AAV16.3 | 148 | US20030138772 SEQ ID NO: 105 |
| AAVcy.6 | 149 | US20030138772 SEQ ID NO: 10 |
| (AAV16.3) | | |
| AAVcy.5 | 150 | US20150159173 SEQ ID NO: 8 |
| AAVcy.5 | 151 | US20150159173 SEQ ID NO: 24 |
| AAVCy.5R1 | 152 | US20150159173 |
| AAVCy.5R2 | 153 | US20150159173 |
| AAVCy.5R3 | 154 | US20150159173 |
| AAVCy.5R4 | 155 | US20150159173 |
| AAVDJ | 156 | US20140359799 SEQ ID NO: 3, |
| | | U.S. Pat. No. 7,588,772 SEQ ID NO: 2 |
| AAVDJ | 157 | US20140359799 SEQ ID NO: 2, |
| | | U.S. Pat. No. 7,588,772 SEQ ID NO: 1 |
| AAVDJ-8 | 158 | U.S. Pat. No. 7,588,772; Grimm et al 2008 |
| AAVDJ-8 | 159 | U.S. Pat. No. 7,588,772; Grimm et al 2008 |
| AAVF5 | 160 | US20030138772 SEQ ID NO: 110 |
| AAVH2 | 161 | US20030138772 SEQ ID NO: 26 |
| AAVH6 | 162 | US20030138772 SEQ ID NO: 25 |
| AAVhE1.1 | 163 | U.S. Pat. No. 9,233,131 SEQ ID NO: 44 |
| AAVhEr1.14 | 164 | U.S. Pat. No. 9,233,131 SEQ ID NO: 46 |
| AAVhEr1.16 | 165 | U.S. Pat. No. 9,233,131 SEQ ID NO: 48 |
| AAVhEr1.18 | 166 | U.S. Pat. No. 9,233,131 SEQ ID NO: 49 |
| AAVhEr1.23 | 167 | U.S. Pat. No. 9,233,131 SEQ ID NO: 53 |
| (AAVhEr2.29) | | |
| AAVhEr1.35 | 168 | U.S. Pat. No. 9,233,131 SEQ ID NO: 50 |
| AAVhEr1.36 | 169 | U.S. Pat. No. 9,233,131 SEQ ID NO: 52 |
| AAVhEr1.5 | 170 | U.S. Pat. No. 9,233,131 SEQ ID NO: 45 |
| AAVhEr1.7 | 171 | U.S. Pat. No. 9,233,131 SEQ ID NO: 51 |
| AAVhEr1.8 | 172 | U.S. Pat. No. 9,233,131 SEQ ID NO: 47 |
| AAVhEr2.16 | 173 | U.S. Pat. No. 9,233,131 SEQ ID NO: 55 |
| AAVhEr2.30 | 174 | U.S. Pat. No. 9,233,131 SEQ ID NO: 56 |
| AAVhEr2.31 | 175 | U.S. Pat. No. 9,233,131 SEQ ID NO: 58 |
| AAVhEr2.36 | 176 | U.S. Pat. No. 9,233,131 SEQ ID NO: 57 |
| AAVhEr2.4 | 177 | U.S. Pat. No. 9,233,131 SEQ ID NO: 54 |
| AAVhEr3.1 | 178 | U.S. Pat. No. 9,233,131 SEQ ID NO: 59 |
| AAVhu.1 | 179 | US20150315612 SEQ ID NO: 46 |
| AAVhu.1 | 180 | US20150315612 SEQ ID NO: 144 |
| AAVhu.10 | 181 | US20150315612 SEQ ID NO: 56 |
| (AAV16.8) | | |
| AAVhu.10 | 182 | US20150315612 SEQ ID NO: 156 |
| (AAV16.8) | | |
| AAVhu.11 | 183 | US20150315612 SEQ ID NO: 57 |
| (AAV16.12) | | |
| AAVhu.11 | 184 | US20150315612 SEQ ID NO: 153 |
| (AAV16.12) | | |
| AAVhu.12 | 185 | US20150315612 SEQ ID NO: 59 |
| AAVhu.12 | 186 | US20150315612 SEQ ID NO: 154 |
| AAVhu.13 | 187 | US20150159173 SEQ ID NO: 16, |
| | | US20150315612 SEQ ID NO: 71 |
| AAVhu.13 | 188 | US20150159173 SEQ ID NO: 32, |
| | | US20150315612 SEQ ID NO: 129 |
| AAVhu.136.1 | 189 | US20150315612 SEQ ID NO: 165 |
| AAVhu.140.1 | 190 | US20150315612 SEQ ID NO: 166 |
| AAVhu.140.2 | 191 | US20150315612 SEQ ID NO: 167 |
| AAVhu.145.6 | 192 | US20150315612 SEQ ID No: 178 |
| AAVhu.15 | 193 | US20150315612 SEQ ID NO: 147 |
| AAVhu.15 | 194 | US20150315612 SEQ ID NO: 50 |
| (AAV33.4) | | |
| AAVhu.156.1 | 195 | US20150315612 SEQ ID No: 179 |
| AAVhu.16 | 196 | US20150315612 SEQ ID NO: 148 |
| AAVhu.16 | 197 | US20150315612 SEQ ID NO: 51 |
| (AAV33.8) | | |
| AAVhu.17 | 198 | US20150315612 SEQ ID NO: 83 |
| AAVhu.17 | 199 | US20150315612 SEQ ID NO: 4 |
| (AAV33.12) | | |
| AAVhu.172.1 | 200 | US20150315612 SEQ ID NO: 171 |
| AAVhu.172.2 | 201 | US20150315612 SEQ ID NO: 172 |
| AAVhu.173.4 | 202 | US20150315612 SEQ ID NO: 173 |
| AAVhu.173.8 | 203 | US20150315612 SEQ ID NO: 175 |
| AAVhu.18 | 204 | US20150315612 SEQ ID NO: 52 |
| AAVhu.18 | 205 | US20150315612 SEQ ID NO: 149 |
| AAVhu.19 | 206 | US20150315612 SEQ ID NO: 62 |
| AAVhu.19 | 207 | US20150315612 SEQ ID NO: 133 |
| AAVhu.2 | 208 | US20150315612 SEQ ID NO: 48 |
| AAVhu.2 | 209 | US20150315612 SEQ ID NO: 143 |
| AAVhu.20 | 210 | US20150315612 SEQ ID NO: 63 |
| AAVhu.20 | 211 | US20150315612 SEQ ID NO: 134 |
| AAVhu.21 | 212 | US20150315612 SEQ ID NO: 65 |
| AAVhu.21 | 213 | US20150315612 SEQ ID NO: 135 |
| AAVhu.22 | 214 | US20150315612 SEQ ID NO: 67 |
| AAVhu.22 | 215 | US20150315612 SEQ ID NO: 138 |
| AAVhu.23 | 216 | US20150315612 SEQ ID NO: 60 |
| AAVhu.23.2 | 217 | US20150315612 SEQ ID NO: 137 |
| AAVhu.24 | 218 | US20150315612 SEQ ID NO: 66 |
| AAVhu.24 | 219 | US20150315612 SEQ ID NO: 136 |
| AAVhu.25 | 220 | US20150315612 SEQ ID NO: 49 |
| AAVhu.25 | 221 | US20150315612 SEQ ID NO: 146 |
| AAVhu.26 | 222 | US20150159173 SEQ ID NO: 17, |
| | | US20150315612 SEQ ID NO: 61 |
| AAVhu.26 | 223 | US20150159173 SEQ ID NO: 33, |
| | | US20150315612 SEQ ID NO: 139 |
| AAVhu.27 | 224 | US20150315612 SEQ ID NO: 64 |
| AAVhu.27 | 225 | US20150315612 SEQ ID NO: 140 |
| AAVhu.28 | 226 | US20150315612 SEQ ID NO: 68 |
| AAVhu.28 | 227 | US20150315612 SEQ ID NO: 130 |
| AAVhu.29 | 228 | US20150315612 SEQ ID NO: 69 |
| AAVhu.29 | 229 | US20150159173 SEQ ID NO: 42, |
| | | US20150315612 SEQ ID NO: 132 |
| AAVhu.29 | 230 | US20150315612 SEQ ID NO: 225 |
| AAVhu.29R | 231 | US20150159173 |
| AAVhu.3 | 232 | US20150315612 SEQ ID NO: 44 |
| AAVhu.3 | 233 | US20150315612 SEQ ID NO: 145 |
| AAVhu.30 | 234 | US20150315612 SEQ ID NO: 70 |
| AAVhu.30 | 235 | US20150315612 SEQ ID NO: 131 |
| AAVhu.31 | 236 | US20150315612 SEQ ID NO: 1 |
| AAVhu.31 | 237 | US20150315612 SEQ ID NO: 121 |
| AAVhu.32 | 238 | US20150315612 SEQ ID NO: 2 |
| AAVhu.32 | 239 | US20150315612 SEQ ID NO: 122 |
| AAVhu.33 | 240 | US20150315612 SEQ ID NO: 75 |
| AAVhu.33 | 241 | US20150315612 SEQ ID NO: 124 |
| AAVhu.34 | 242 | US20150315612 SEQ ID NO: 72 |
| AAVhu.34 | 243 | US20150315612 SEQ ID NO: 125 |
| AAVhu.35 | 244 | US20150315612 SEQ ID NO: 73 |
| AAVhu.35 | 245 | US20150315612 SEQ ID NO: 164 |
| AAVhu.36 | 246 | US20150315612 SEQ ID NO: 74 |
| AAVhu.36 | 247 | US20150315612 SEQ ID NO: 126 |
| AAVhu.37 | 248 | US20150159173 SEQ ID NO: 34, |
| | | US20150315612 SEQ ID NO: 88 |
| AAVhu.37 | 249 | US20150315612 SEQ ID NO: 10, |
| (AAV106.1) | | US20150159173 SEQ ID NO: 18 |
| AAVhu.38 | 250 | US20150315612 SEQ ID NO: 161 |
| AAVhu.39 | 251 | US20150315612 SEQ ID NO: 102 |
| AAVhu.39 | 252 | US20150315612 SEQ ID NO: 24 |
| (AAVLG-9) | | |
| AAVhu.4 | 253 | US20150315612 SEQ ID NO: 47 |
| AAVhu.4 | 254 | US20150315612 SEQ ID NO: 141 |
| AAVhu.40 | 255 | US20150315612 SEQ ID NO: 87 |
| AAVhu.40 | 256 | US20150315612 SEQ ID No: 11 |
| (AAV114.3) | | |
| AAVhu.41 | 257 | US20150315612 SEQ ID NO: 91 |
| AAVhu.41 | 258 | US20150315612 SEQ ID NO: 6 |
| (AAV127.2) | | |
| AAVhu.42 | 259 | US20150315612 SEQ ID NO: 85 |
| AAVhu.42 | 260 | US20150315612 SEQ ID NO: 8 |
| (AAV127.5) | | |
| AAVhu.43 | 261 | US20150315612 SEQ ID NO: 160 |
| AAVhu.43 | 262 | US20150315612 SEQ ID NO: 236 |
| AAVhu.43 | 263 | US20150315612 SEQ ID NO: 80 |
| (AAV128.1) | | |
| AAVhu.44 | 264 | US20150159173 SEQ ID NO: 45, |
| | | US20150315612 SEQ ID NO: 158 |
| AAVhu.44 | 265 | US20150315612 SEQ ID NO: 81 |
| (AAV128.3) | | |
| AAVhu.44R1 | 266 | US20150159173 |
| AAVhu.44R2 | 267 | US20150159173 |
| AAVhu.44R3 | 268 | US20150159173 |
| AAVhu.45 | 269 | US20150315612 SEQ ID NO: 76 |
| AAVhu.45 | 270 | US20150315612 SEQ ID NO: 127 |
| AAVhu.46 | 271 | US20150315612 SEQ ID NO: 82 |
| AAVhu.46 | 272 | US20150315612 SEQ ID NO: 159 |
| AAVhu.46 | 273 | US20150315612 SEQ ID NO: 224 |
| AAVhu.47 | 274 | US20150315612 SEQ ID NO: 77 |
| AAVhu.47 | 275 | US20150315612 SEQ ID NO: 128 |
| AAVhu.48 | 276 | US20150159173 SEQ ID NO: 38 |
| AAVhu.48 | 277 | US20150315612 SEQ ID NO: 157 |
| AAVhu.48 | 278 | US20150315612 SEQ ID NO: 78 |
| (AAV130.4) | | |
| AAVhu.48R1 | 279 | US20150159173 |
| AAVhu.48R2 | 280 | US20150159173 |
| AAVhu.48R3 | 281 | US20150159173 |
| AAVhu.49 | 282 | US20150315612 SEQ ID NO: 209 |
| AAVhu.49 | 283 | US20150315612 SEQ ID NO: 189 |
| AAVhu.5 | 284 | US20150315612 SEQ ID NO: 45 |
| AAVhu.5 | 285 | US20150315612 SEQ ID NO: 142 |
| AAVhu.51 | 286 | US20150315612 SEQ ID NO: 208 |
| AAVhu.51 | 287 | US20150315612 SEQ ID NO: 190 |
| AAVhu.52 | 288 | US20150315612 SEQ ID NO: 210 |
| AAVhu.52 | 289 | US20150315612 SEQ ID NO: 191 |
| AAVhu.53 | 290 | US20150159173 SEQ ID NO: 19 |
| AAVhu.53 | 291 | US20150159173 SEQ ID NO: 35 |
| AAVhu.53 | 292 | US20150315612 SEQ ID NO: 176 |
| (AAV145.1) | | |
| AAVhu.54 | 293 | US20150315612 SEQ ID NO: 188 |
| AAVhu.54 | 294 | US20150315612 SEQ ID No: 177 |
| (AAV145.5) | | |
| AAVhu.55 | 295 | US20150315612 SEQ ID NO: 187 |
| AAVhu.56 | 296 | US20150315612 SEQ ID NO: 205 |
| AAVhu.56 | 297 | US20150315612 SEQ ID NO: 168 |
| (AAV145.6) | | |
| AAVhu.56 | 298 | US20150315612 SEQ ID NO: 192 |
| (AAV145.6) | | |
| AAVhu.57 | 299 | US20150315612 SEQ ID NO: 206 |
| AAVhu.57 | 300 | US20150315612 SEQ ID NO: 169 |
| AAVhu.57 | 301 | US20150315612 SEQ ID NO: 193 |
| AAVhu.58 | 302 | US20150315612 SEQ ID NO: 207 |
| AAVhu.58 | 303 | US20150315612 SEQ ID NO: 194 |
| AAVhu.6 | 304 | US20150315612 SEQ ID NO: 5 |
| (AAV3.1) | | |
| AAVhu.6 | 305 | US20150315612 SEQ ID NO: 84 |
| (AAV3.1) | | |
| AAVhu.60 | 306 | US20150315612 SEQ ID NO: 184 |
| AAVhu.60 | 307 | US20150315612 SEQ ID NO: 170 |
| (AAV161.10) | | |
| AAVhu.61 | 308 | US20150315612 SEQ ID NO: 185 |
| AAVhu.61 | 309 | US20150315612 SEQ ID NO: 174 |
| (AAV161.6) | | |
| AAVhu.63 | 310 | US20150315612 SEQ ID NO: 204 |
| AAVhu.63 | 311 | US20150315612 SEQ ID NO: 195 |
| AAVhu.64 | 312 | US20150315612 SEQ ID NO: 212 |
| AAVhu.64 | 313 | US20150315612 SEQ ID NO: 196 |
| AAVhu.66 | 314 | US20150315612 SEQ ID NO: 197 |
| AAVhu.67 | 315 | US20150315612 SEQ ID NO: 215 |
| AAVhu.67 | 316 | US20150315612 SEQ ID NO: 198 |
| AAVhu.7 | 317 | US20150315612 SEQ ID NO: 226 |
| AAVhu.7 | 318 | US20150315612 SEQ ID NO: 150 |
| AAVhu.7 | 319 | US20150315612 SEQ ID NO: 55 |
| (AAV7.3) | | |
| AAVhu.71 | 320 | US20150315612 SEQ ID NO: 79 |
| AAVhu.8 | 321 | US20150315612 SEQ ID NO: 53 |
| AAVhu.8 | 322 | US20150315612 SEQ ID NO: 12 |
| AAVhu.8 | 323 | US20150315612 SEQ ID NO: 151 |
| AAVhu.9 | 324 | US20150315612 SEQ ID NO: 58 |
| (AAV3.1) | | |
| AAVhu.9 | 325 | US20150315612 SEQ ID NO: 155 |
| (AAV3.1) | | |
| AAV-LK01 | 326 | US20150376607 SEQ ID NO: 2 |
| AAV-LK01 | 327 | US20150376607 SEQ ID NO: 29 |
| AAV-LK02 | 328 | US20150376607 SEQ ID NO: 3 |
| AAV-LK02 | 329 | US20150376607 SEQ ID NO: 30 |
| AAV-LK03 | 330 | US20150376607 SEQ ID NO: 4 |
| AAV-LK03 | 331 | WO2015121501 SEQ ID NO: 12, |
| | | US20150376607 SEQ ID NO: 31 |
| AAV-LK04 | 332 | US20150376607 SEQ ID NO: 5 |
| AAV-LK04 | 333 | US20150376607 SEQ ID NO: 32 |
| AAV-LK05 | 334 | US20150376607 SEQ ID NO: 6 |
| AAV-LK05 | 335 | US20150376607 SEQ ID NO: 33 |
| AAV-LK06 | 336 | US20150376607 SEQ ID NO: 7 |
| AAV-LK06 | 337 | US20150376607 SEQ ID NO: 34 |
| AAV-LK07 | 338 | US20150376607 SEQ ID NO: 8 |
| AAV-LK07 | 339 | US20150376607 SEQ ID NO: 35 |
| AAV-LK08 | 340 | US20150376607 SEQ ID NO: 9 |
| AAV-LK08 | 341 | US20150376607 SEQ ID NO: 36 |
| AAV-LK09 | 342 | US20150376607 SEQ ID NO: 10 |
| AAV-LK09 | 343 | US20150376607 SEQ ID NO: 37 |
| AAV-LK10 | 344 | US20150376607 SEQ ID NO: 11 |
| AAV-LK10 | 345 | US20150376607 SEQ ID NO: 38 |
| AAV-LK11 | 346 | US20150376607 SEQ ID NO: 12 |
| AAV-LK11 | 347 | US20150376607 SEQ ID NO: 39 |
| AAV-LK12 | 348 | US20150376607 SEQ ID NO: 13 |
| AAV-LK12 | 349 | US20150376607 SEQ ID NO: 40 |
| AAV-LK13 | 350 | US20150376607 SEQ ID NO: 14 |
| AAV-LK13 | 351 | US20150376607 SEQ ID NO: 41 |
| AAV-LK14 | 352 | US20150376607 SEQ ID NO: 15 |
| AAV-LK14 | 353 | US20150376607 SEQ ID NO: 42 |
| AAV-LK15 | 354 | US20150376607 SEQ ID NO: 16 |
| AAV-LK15 | 355 | US20150376607 SEQ ID NO: 43 |
| AAV-LK16 | 356 | US20150376607 SEQ ID NO: 17 |
| AAV-LK16 | 357 | US20150376607 SEQ ID NO: 44 |
| AAV-LK17 | 358 | US20150376607 SEQ ID NO: 18 |
| AAV-LK17 | 359 | US20150376607 SEQ ID NO: 45 |
| AAV-LK18 | 360 | US20150376607 SEQ ID NO: 19 |
| AAV-LK18 | 361 | US20150376607 SEQ ID NO: 46 |
| AAV-LK19 | 362 | US20150376607 SEQ ID NO: 20 |
| AAV-LK19 | 363 | US20150376607 SEQ ID NO: 47 |
| AAV-PAEC | 364 | US20150376607 SEQ ID NO: 1 |
| AAV-PAEC | 365 | US20150376607 SEQ ID NO: 48 |
| AAV-PAEC11 | 366 | US20150376607 SEQ ID NO: 26 |
| AAV-PAEC11 | 367 | US20150376607 SEQ ID NO: 54 |
| AAV-PAEC12 | 368 | US20150376607 SEQ ID NO: 27 |
| AAV-PAEC12 | 369 | US20150376607 SEQ ID NO: 51 |
| AAV-PAEC13 | 370 | US20150376607 SEQ ID NO: 28 |
| AAV-PAEC13 | 371 | US20150376607 SEQ ID NO: 49 |
| AAV-PAEC2 | 372 | US20150376607 SEQ ID NO: 21 |
| AAV-PAEC2 | 373 | US20150376607 SEQ ID NO: 56 |
| AAV-PAEC4 | 374 | US20150376607 SEQ ID NO: 22 |
| AAV-PAEC4 | 375 | US20150376607 SEQ ID NO: 55 |
| AAV-PAEC6 | 376 | US20150376607 SEQ ID NO: 23 |
| AAV-PAEC6 | 377 | US20150376607 SEQ ID NO: 52 |
| AAV-PAEC7 | 378 | US20150376607 SEQ ID NO: 24 |
| AAV-PAEC7 | 379 | US20150376607 SEQ ID NO: 53 |
| AAV-PAEC8 | 380 | US20150376607 SEQ ID NO: 25 |
| AAV-PAEC8 | 381 | US20150376607 SEQ ID NO: 50 |
| AAVpi.1 | 382 | US20150315612 SEQ ID NO: 28 |
| AAVpi.1 | 383 | US20150315612 SEQ ID NO: 93 |
| AAVpi.2 | 384 | US20150315612 SEQ ID NO: 30 |
| AAVpi.2 | 385 | US20150315612 SEQ ID NO: 95 |
| AAVpi.3 | 386 | US20150315612 SEQ ID NO: 29 |
| AAVpi.3 | 387 | US20150315612 SEQ ID NO: 94 |
| AAVrh.10 | 388 | US20150159173 SEQ ID NO: 9 |
| AAVrh.10 | 389 | US20150159173 SEQ ID NO: 25 |
| AAV44.2 | 390 | US20030138772 SEQ ID NO: 59 |
| AAVrh.10 | 391 | US20030138772 SEQ ID NO: 81 |
| (AAV44.2) | | |
| AAV42.1B | 392 | US20030138772 SEQ ID NO: 90 |
| AAVrh.12 | 393 | US20030138772 SEQ ID NO: 30 |
| (AAV42.1b) | | |
| AAVrh.13 | 394 | US20150159173 SEQ ID NO: 10 |
| AAVrh.13 | 395 | US20150159173 SEQ ID NO: 26 |
| AAVrh.13 | 396 | US20150315612 SEQ ID NO: 228 |
| AAVrh.13R | 397 | US20150159173 |
| AAV42.3A | 398 | US20030138772 SEQ ID NO: 87 |
| AAVrh.14 | 399 | US20030138772 SEQ ID NO: 32 |
| (AAV42.3a) | | |
| AAV42.5A | 400 | US20030138772 SEQ ID NO: 89 |
| AAVrh.17 | 401 | US20030138772 SEQ ID NO: 34 |
| (AAV42.5a) | | |
| AAV42.5B | 402 | US20030138772 SEQ ID NO: 91 |
| AAVrh.18 | 403 | US20030138772 SEQ ID NO: 29 |
| (AAV42.5b) | | |
| AAV42.6B | 404 | US20030138772 SEQ ID NO: 112 |
| AAVrh.19 | 405 | US20030138772 SEQ ID NO: 38 |
| (AAV42.6b) | | |
| AAVrh.2 | 406 | US20150159173 SEQ ID NO: 39 |
| AAVrh.2 | 407 | US20150315612 SEQ ID NO: 231 |
| AAVrh.20 | 408 | US20150159173 SEQ ID NO: 1 |
| AAV42.10 | 409 | US20030138772 SEQ ID NO: 106 |
| AAVrh.21 | 410 | US20030138772 SEQ ID NO: 35 |
| (AAV42.10) | | |
| AAV42.11 | 411 | US20030138772 SEQ ID NO: 108 |
| AAVrh.22 | 412 | US20030138772 SEQ ID NO: 37 |
| (AAV42.11) | | |
| AAV42.12 | 413 | US20030138772 SEQ ID NO: 113 |
| AAVrh.23 | 414 | US20030138772 SEQ ID NO: 58 |
| (AAV42.12) | | |
| AAV42.13 | 415 | US20030138772 SEQ ID NO: 86 |
| AAVrh.24 | 416 | US20030138772 SEQ ID NO: 31 |
| (AAV42.13) | | |
| AAV42.15 | 417 | US20030138772 SEQ ID NO: 84 |
| AAVrh.25 | 418 | US20030138772 SEQ ID NO: 28 |
| (AAV42.15) | | |
| AAVrh.2R | 419 | US20150159173 |
| AAVrh.31 | 420 | US20030138772 SEQ ID NO: 48 |
| (AAV223.1) | | |
| AAVC1 | 421 | US20030138772 SEQ ID NO: 60 |
| AAVrh.32 | 422 | US20030138772 SEQ ID NO: 19 |
| (AAVC1) | | |
| AAVrh.32/33 | 423 | US20150159173 SEQ ID NO: 2 |
| AAVrh.33 | 424 | US20030138772 SEQ ID NO: 20 |
| (AAVC3) | | |
| AAVC5 | 425 | US20030138772 SEQ ID NO: 62 |
| AAVrh.34 | 426 | US20030138772 SEQ ID NO: 21 |
| (AAVC5) | | |
| AAVF1 | 427 | US20030138772 SEQ ID NO: 109 |
| AAVrh.35 | 428 | US20030138772 SEQ ID NO: 22 |
| (AAVF1) | | |
| AAVF3 | 429 | US20030138772 SEQ ID NO: 111 |
| AAVrh.36 | 430 | US20030138772 SEQ ID NO: 23 |
| (AAVF3) | | |
| AAVrh.37 | 431 | US20030138772 SEQ ID NO: 24 |
| AAVrh.37 | 432 | US20150159173 SEQ ID NO: 40 |
| AAVrh.37 | 433 | US20150315612 SEQ ID NO: 229 |
| AAVrh.37R2 | 434 | US20150159173 |
| AAVrh.38 | 435 | US20150315612 SEQ ID NO: 7 |
| (AAVLG-4) | | |
| AAVrh.38 | 436 | US20150315612 SEQ ID NO: 86 |
| (AAVLG-4) | | |
| AAVrh.39 | 437 | US20150159173 SEQ ID NO: 20, |
| | | US20150315612 SEQ ID NO: 13 |
| AAVrh.39 | 438 | US20150159173 SEQ ID NO: 3, |
| | | US20150159173 SEQ ID NO: 36, |
| | | US20150315612 SEQ ID NO: 89 |
| AAVrh.40 | 439 | US20150315612 SEQ ID NO: 92 |
| AAVrh.40 | 440 | US20150315612 SEQ ID No: 14 |
| (AAVLG-10) | | |
| AAVrh.43 | 441 | US20150315612 SEQ ID NO: 43, |
| (AAVN721-R) | | US20150159173 SEQ ID NO: 21 |
| AAVrh.43 | 442 | US20150315612 SEQ ID NO: 163, |
| (AAVN721-8) | | US20150159173 SEQ ID NO: 37 |
| AAVrh.44 | 443 | US20150315612 SEQ ID NO: 34 |
| AAVrh.44 | 444 | US20150315612 SEQ ID NO: 111 |
| AAVrh.45 | 445 | US20150315612 SEQ ID NO: 41 |
| AAVrh.45 | 446 | US20150315612 SEQ ID NO: 109 |
| AAVrh.46 | 447 | US20150159173 SEQ ID NO: 22, |
| | | US20150315612 SEQ ID NO: 19 |
| AAVrh.46 | 448 | US20150159173 SEQ ID NO: 4, |
| | | US20150315612 SEQ ID NO: 101 |
| AAVrh.47 | 449 | US20150315612 SEQ ID NO: 38 |
| AAVrh.47 | 450 | US20150315612 SEQ ID NO: 118 |
| AAVrh.48 | 451 | US20150159173 SEQ ID NO: 44, |
| | | US20150315612 SEQ ID NO: 115 |
| AAVrh.48.1 | 452 | US20150159173 |
| AAVrh.48.1.2 | 453 | US20150159173 |
| AAVrh.48.2 | 454 | US20150159173 |
| AAVrh.48 | 455 | US20150315612 SEQ ID NO: 32 |
| (AAV1-7) | | |
| AAVrh.49 | 456 | US20150315612 SEQ ID NO: 25 |
| (AAV1-8) | | |
| AAVrh.49 | 457 | US20150315612 SEQ ID NO: 103 |
| (AAV1-8) | | |
| AAVrh.50 | 458 | US20150315612 SEQ ID NO: 23 |
| (AAV2-4) | | |
| AAVrh.50 | 459 | US20150315612 SEQ ID NO: 108 |
| (AAV2-4) | | |
| AAVrh.51 | 460 | US20150315612 SEQ ID NO: 22 |
| (AAV2-5) | | |
| AAVrh.51 | 461 | US20150315612 SEQ ID NO: 104 |
| (AAV2-5) | | |
| AAVrh.52 | 462 | US20150315612 SEQ ID NO: 18 |
| (AAV3-9) | | |
| AAVrh.52 | 463 | US20150315612 SEQ ID NO: 96 |
| (AAV3-9) | | |
| AAVrh.53 | 464 | US20150315612 SEQ ID NO: 97 |
| AAVrh.53 | 465 | US20150315612 SEQ ID NO: 17 |
| (AAV3-11) | | |
| AAVrh.53 | 466 | US20150315612 SEQ ID NO: 186 |
| (AAV3-11) | | |
| AAVrh.54 | 467 | US20150315612 SEQ ID NO: 40 |
| AAVrh.54 | 468 | US20150159173 SEQ ID NO: 49, |
| | | US20150315612 SEQ ID NO: 116 |
| AAVrh.55 | 469 | US20150315612 SEQ ID NO: 37 |
| AAVrh.55 | 470 | US20150315612 SEQ ID NO: 117 |
| (AAV4-19) | | |
| AAVrh.56 | 471 | US20150315612 SEQ ID NO: 54 |
| AAVrh.56 | 472 | US20150315612 SEQ ID NO: 152 |
| AAVrh.57 | 473 | US20150315612 SEQ ID NO: 26 |
| AAVrh.57 | 474 | US20150315612 SEQ ID NO: 105 |
| AAVrh.58 | 475 | US20150315612 SEQ ID NO: 27 |
| AAVrh.58 | 476 | US20150159173 SEQ ID NO: 48, |
| | | US20150315612 SEQ ID NO: 106 |
| AAVrh.58 | 477 | US20150315612 SEQ ID NO: 232 |
| AAVrh.59 | 478 | US20150315612 SEQ ID NO: 42 |
| AAVrh.59 | 479 | US20150315612 SEQ ID NO: 110 |
| AAVrh.60 | 480 | US20150315612 SEQ ID NO: 31 |
| AAVrh.60 | 481 | US20150315612 SEQ ID NO: 120 |
| AAVrh.61 | 482 | US20150315612 SEQ ID NO: 107 |
| AAVrh.61 | 483 | US20150315612 SEQ ID NO: 21 |
| (AAV2-3) | | |
| AAVrh.62 | 484 | US20150315612 SEQ ID NO: 33 |
| (AAV2-15) | | |
| AAVrh.62 | 485 | US20150315612 SEQ ID NO: 114 |
| (AAV2-15) | | |
| AAVrh.64 | 486 | US20150315612 SEQ ID NO: 15 |
| AAVrh.64 | 487 | US20150159173 SEQ ID NO: 43, |
| | | US20150315612 SEQ ID NO: 99 |
| AAVrh.64 | 488 | US20150315612 SEQ ID NO: 233 |
| AAVRh.64R1 | 489 | US20150159173 |
| AAVRh.64R2 | 490 | US20150159173 |
| AAVrh.65 | 491 | US20150315612 SEQ ID NO: 35 |
| AAVrh.65 | 492 | US20150315612 SEQ ID NO: 112 |
| AAVrh.67 | 493 | US20150315612 SEQ ID NO: 36 |
| AAVrh.67 | 494 | US20150315612 SEQ ID NO: 230 |
| AAVrh.67 | 495 | US20150159173 SEQ ID NO: 47, |
| | | US20150315612 SEQ ID NO: 113 |
| AAVrh.68 | 496 | US20150315612 SEQ ID NO: 16 |
| AAVrh.68 | 497 | US20150315612 SEQ ID NO: 100 |
| AAVrh.69 | 498 | US20150315612 SEQ ID NO: 39 |
| AAVrh.69 | 499 | US20150315612 SEQ ID NO: 119 |
| AAVrh.70 | 500 | US20150315612 SEQ ID NO: 20 |
| AAVrh.70 | 501 | US20150315612 SEQ ID NO: 98 |
| AAVrh.71 | 502 | US20150315612 SEQ ID NO: 162 |
| AAVrh.72 | 503 | US20150315612 SEQ ID NO: 9 |
| AAVrh.73 | 504 | US20150159173 SEQ ID NO: 5 |
| AAVrh.74 | 505 | US20150159173 SEQ ID NO: 6 |
| AAVrh.8 | 506 | US20150159173 SEQ ID NO: 41 |
| AAVrh.8 | 507 | US20150315612 SEQ ID NO: 235 |
| AAVrh.8R | 508 | US20150159173, |
| | | WO2015168666 SEQ ID NO: 9 |
| AAVrh.8R | 509 | WO2015168666 SEQ ID NO: 10 |
| A586R | | |
| mutant | | |
| AAVrh.8R | 510 | WO2015168666 SEQ ID NO: 11 |
| R533A | | |
| mutant | | |
| BAAV | 511 | U.S. Pat. No. 9,193,769 SEQ ID NO: 8 |
| (bovine AAV) | | |
| BAAV | 512 | U.S. Pat. No. 9,193,769 SEQ ID NO: 10 |
| (bovine AAV) | | |
| BAAV | 513 | U.S. Pat. No. 9,193,769 SEQ ID NO: 4 |
| (bovine AAV) | | |
| BAAV | 514 | U.S. Pat. No. 9,193,769 SEQ ID NO: 2 |
| (bovine AAV) | | |
| BAAV | 515 | U.S. Pat. No. 9,193,769 SEQ ID NO: 6 |
| (bovine AAV) | | |
| BAAV | 516 | U.S. Pat. No. 9,193,769 SEQ ID NO: 1 |
| (bovine AAV) | | |
| BAAV | 517 | U.S. Pat. No. 9,193,769 SEQ ID NO: 5 |
| (bovine AAV) | | |
| BAAV | 518 | U.S. Pat. No. 9,193,769 SEQ ID NO: 3 |
| (bovine AAV) | | |
| BAAV | 519 | U.S. Pat. No. 9,193,769 SEQ ID NO: 11 |
| (bovine AAV) | | |
| BAAV | 520 | U.S. Pat. No. 7,427,396 SEQ ID NO: 5 |
| (bovine AAV) | | |
| BAAV | 521 | U.S. Pat. No. 7,427,396 SEQ ID NO: 6 |
| (bovine AAV) | | |
| BAAV | 522 | U.S. Pat. No. 9,193,769 SEQ ID NO: 7 |
| (bovine AAV) | | |
| BAAV | 523 | U.S. Pat. No. 9,193,769 SEQ ID NO: 9 |
| (bovine AAV) | | |
| BNP61 AAV | 524 | US20150238550 SEQ ID NO: 1 |
| BNP61 AAV | 525 | US20150238550 SEQ ID NO: 2 |
| BNP62 AAV | 526 | US20150238550 SEQ ID NO: 3 |
| BNP63 AAV | 527 | US20150238550 SEQ ID NO: 4 |
| caprine AAV | 528 | U.S. Pat. No. 7,427,396 SEQ ID NO: 3 |
| caprine AAV | 529 | U.S. Pat. No. 7,427,396 SEQ ID NO: 4 |
| true type AAV | 530 | WO2015121501 SEQ ID NO: 2 |
| (ttAAV) | | |
| AAAV | 531 | U.S. Pat. No. 9,238,800 SEQ ID NO: 12 |
| (Avian AAV) | | |
| AAAV | 532 | U.S. Pat. No. 9,238,800 SEQ ID NO: 2 |
| (Avian AAV) | | |
| AAAV | 533 | U.S. Pat. No. 9,238,800 SEQ ID NO: 6 |
| (Avian AAV) | | |
| AAAV | 534 | U.S. Pat. No. 9,238,800 SEQ ID NO: 4 |
| (Avian AAV) | | |
| AAAV | 535 | U.S. Pat. No. 9,238,800 SEQ ID NO: 8 |
| (Avian AAV) | | |
| AAAV | 536 | U.S. Pat. No. 9,238,800 SEQ ID NO: 14 |
| (Avian AAV) | | |
| AAAV | 537 | U.S. Pat. No. 9,238,800 SEQ ID NO: 10 |
| (Avian AAV) | | |
| AAAV | 538 | U.S. Pat. No. 9,238,800 SEQ ID NO: 15 |
| (Avian AAV) | | |
| AAAV | 539 | U.S. Pat. No. 9,238,800 SEQ ID NO: 5 |
| (Avian AAV) | | |
| AAAV | 540 | U.S. Pat. No. 9,238,800 SEQ ID NO: 9 |
| (Avian AAV) | | |
| AAAV | 541 | U.S. Pat. No. 9,238,800 SEQ ID NO: 3 |
| (Avian AAV) | | |
| AAAV | 542 | U.S. Pat. No. 9,238,800 SEQ ID NO: 7 |
| (Avian AAV) | | |
| AAAV | 543 | U.S. Pat. No. 9,238,800 SEQ ID NO: 11 |
| (Avian AAV) | | |
| AAAV | 544 | U.S. Pat. No. 9,238,800 SEQ ID NO: 13 |
| (Avian AAV) | | |
| AAAV | 545 | U.S. Pat. No. 9,238,800 SEQ ID NO: 1 |
| (Avian AAV) | | |
| AAV Shuffle | 546 | US20160017295 SEQ ID NO: 23 |
| 100-1 | | |
| AAV Shuffle | 547 | US20160017295 SEQ ID NO: 11 |
| 100-1 | | |
| AAV Shuffle | 548 | US20160017295 SEQ ID NO: 37 |
| 100-2 | | |
| AAV Shuffle | 549 | US20160017295 SEQ ID NO: 29 |
| 100-2 | | |
| AAV Shuffle | 550 | US20160017295 SEQ ID NO: 24 |
| 100-3 | | |
| AAV Shuffle | 551 | US20160017295 SEQ ID NO: 12 |
| 100-3 | | |
| AAV Shuffle | 552 | US20160017295 SEQ ID NO: 25 |
| 100-7 | | |
| AAV Shuffle | 553 | US20160017295 SEQ ID NO: 13 |
| 100-7 | | |
| AAV Shuffle | 554 | US20160017295 SEQ ID NO: 34 |
| 10-2 | | |
| AAV Shuffle | 555 | US20160017295 SEQ ID NO: 26 |
| 10-2 | | |
| AAV Shuffle | 556 | US20160017295 SEQ ID NO: 35 |
| 10-6 | | |
| AAV Shuffle | 557 | US20160017295 SEQ ID NO: 27 |
| 10-6 | | |
| AAV Shuffle | 558 | US20160017295 SEQ ID NO: 36 |
| 10-8 | | |
| AAV Shuffle | 559 | US20160017295 SEQ ID NO: 28 |
| 10-8 | | |
| AAV SM 100-10 | 560 | US20160017295 SEQ ID NO: 41 |
| AAV SM 100-10 | 561 | US20160017295 SEQ ID NO: 33 |
| AAV SM 100-3 | 562 | US20160017295 SEQ ID NO: 40 |
| AAV SM 100-3 | 563 | US20160017295 SEQ ID NO: 32 |
| AAV SM 10-1 | 564 | US20160017295 SEQ ID NO: 38 |
| AAV SM 10-1 | 565 | US20160017295 SEQ ID NO: 30 |
| AAV SM 10-2 | 566 | US20160017295 SEQ ID NO: 10 |
| AAV SM 10-2 | 567 | US20160017295 SEQ ID NO: 22 |
| AAV SM 10-8 | 568 | US20160017295 SEQ ID NO: 39 |
| AAV SM 10-8 | 569 | US20160017295 SEQ ID NO: 31 |
| AAVF1/HSC1 | 570 | WO2016049230 SEQ ID NO: 20 |
| AAVF2/HSC2 | 571 | WO2016049230 SEQ ID NO: 21 |
| AAVF3/HSC3 | 572 | WO2016049230 SEQ ID NO: 22 |
| AAVF4/HSC4 | 573 | WO2016049230 SEQ ID NO: 23 |
| AAVF5/HSC5 | 574 | WO2016049230 SEQ ID NO: 25 |
| AAVF6/HSC6 | 575 | WO2016049230 SEQ ID NO: 24 |
| AAVF7/HSC7 | 576 | WO2016049230 SEQ ID NO: 27 |
| AAVF8/HSC8 | 577 | WO2016049230 SEQ ID NO: 28 |
| AAVF9/HSC9 | 578 | WO2016049230 SEQ ID NO: 29 |
| AAVF11/HSC11 | 579 | WO2016049230 SEQ ID NO: 26 |
| AAVF12/HSC12 | 580 | WO2016049230 SEQ ID NO: 30 |
| AAVF13/HSC13 | 581 | WO2016049230 SEQ ID NO: 31 |
| AAVF14/HSC14 | 582 | WO2016049230 SEQ ID NO: 32 |
| AAVF15/HSC15 | 583 | WO2016049230 SEQ ID NO: 33 |
| AAVF16/HSC16 | 584 | WO2016049230 SEQ ID NO: 34 |
| AAVF17/HSC17 | 585 | WO2016049230 SEQ ID NO: 35 |
| AAVF1/HSC1 | 586 | WO2016049230 SEQ ID NO: 2 |
| AAVF2/HSC2 | 587 | WO2016049230 SEQ ID NO: 3 |
| AAVF3/HSC3 | 588 | WO2016049230 SEQ ID NO: 5 |
| AAVF4/HSC4 | 589 | WO2016049230 SEQ ID NO: 6 |
| AAVF5/HSC5 | 590 | WO2016049230 SEQ ID NO: 11 |
| AAVF6/HSC6 | 591 | WO2016049230 SEQ ID NO: 7 |
| AAVF7/HSC7 | 592 | WO2016049230 SEQ ID NO: 8 |
| AAVF8/HSC8 | 593 | WO2016049230 SEQ ID NO: 9 |
| AAVF9/HSC9 | 594 | WO2016049230 SEQ ID NO: 10 |
| AAVF11/HSC11 | 595 | WO2016049230 SEQ ID NO: 4 |
| AAVF12/HSC12 | 596 | WO2016049230 SEQ ID NO: 12 |
| AAVF13/HSC13 | 597 | WO2016049230 SEQ ID NO: 14 |
| AAVF14/HSC14 | 598 | WO2016049230 SEQ ID NO: 15 |
| AAVF15/HSC15 | 599 | WO2016049230 SEQ ID NO: 16 |
| AAVF16/HSC16 | 600 | WO2016049230 SEQ ID NO: 17 |
| AAVF17/HSC17 | 601 | WO2016049230 SEQ ID NO: 13 |
| AAV CBr-E1 | 602 | U.S. Pat. No. 8,734,809 SEQ ID NO: 13 |
| AAV CBr-E2 | 603 | U.S. Pat. No. 8,734,809 SEQ ID NO: 14 |
| AAV CBr-E3 | 604 | U.S. Pat. No. 8,734,809 SEQ ID NO: 15 |
| AAV CBr-E4 | 605 | U.S. Pat. No. 8,734,809 SEQ ID NO: 16 |
| AAV CBr-E5 | 606 | U.S. Pat. No. 8,734,809 SEQ ID NO: 17 |
| AAV CBr-e5 | 607 | U.S. Pat. No. 8,734,809 SEQ ID NO: 18 |
| AAV CBr-E6 | 608 | U.S. Pat. No. 8,734,809 SEQ ID NO: 19 |
| AAV CBr-E7 | 609 | U.S. Pat. No. 8,734,809 SEQ ID NO: 20 |
| AAV CBr-E8 | 610 | U.S. Pat. No. 8,734,809 SEQ ID NO: 21 |
| AAV CLv-D1 | 611 | U.S. Pat. No. 8,734,809 SEQ ID NO: 22 |
| AAV CLv-D2 | 612 | U.S. Pat. No. 8,734,809 SEQ ID NO: 23 |
| AAV CLv-D3 | 613 | U.S. Pat. No. 8,734,809 SEQ ID NO: 24 |
| AAV CLv-D4 | 614 | U.S. Pat. No. 8,734,809 SEQ ID NO: 25 |
| AAV CLv-D5 | 615 | U.S. Pat. No. 8,734,809 SEQ ID NO: 26 |
| AAV CLv-D6 | 616 | U.S. Pat. No. 8,734,809 SEQ ID NO: 27 |
| AAV CLv-D7 | 617 | U.S. Pat. No. 8,734,809 SEQ ID NO: 28 |
| AAV CLv-D8 | 618 | U.S. Pat. No. 8,734,809 SEQ ID NO: 29 |
| AAV CLv-E1 | 619 | U.S. Pat. No. 8,734,809 SEQ ID NO: 13 |
| AAV CLv-R1 | 620 | U.S. Pat. No. 8,734,809 SEQ ID NO: 30 |
| AAV CLv-R2 | 621 | U.S. Pat. No. 8,734,809 SEQ ID NO: 31 |
| AAV CLv-R3 | 622 | U.S. Pat. No. 8,734,809 SEQ ID NO: 32 |
| AAV CLv-R4 | 623 | U.S. Pat. No. 8,734,809 SEQ ID NO: 33 |
| AAV CLv-R5 | 624 | U.S. Pat. No. 8,734,809 SEQ ID NO: 34 |
| AAV CLv-R6 | 625 | U.S. Pat. No. 8,734,809 SEQ ID NO: 35 |
| AAV CLv-R7 | 626 | U.S. Pat. No. 8,734,809 SEQ ID NO: 36 |
| AAV CLv-R8 | 627 | U.S. Pat. No. 8,734,809 SEQ ID NO: 37 |
| AAV CLv-R9 | 628 | U.S. Pat. No. 8,734,809 SEQ ID NO: 38 |
| AAV CLg-F1 | 629 | U.S. Pat. No. 8,734,809 SEQ ID NO: 39 |
| AAV CLg-F2 | 630 | U.S. Pat. No. 8,734,809 SEQ ID NO: 40 |
| AAV CLg-F3 | 631 | U.S. Pat. No. 8,734,809 SEQ ID NO: 41 |
| AAV CLg-F4 | 632 | U.S. Pat. No. 8,734,809 SEQ ID NO: 42 |
| AAV CLg-F5 | 633 | U.S. Pat. No. 8,734,809 SEQ ID NO: 43 |
| AAV CLg-F6 | 634 | U.S. Pat. No. 8,734,809 SEQ ID NO: 43 |
| AAV CLg-F7 | 635 | U.S. Pat. No. 8,734,809 SEQ ID NO: 44 |
| AAV CLg-F8 | 636 | U.S. Pat. No. 8,734,809 SEQ ID NO: 43 |
| AAV CSp-1 | 637 | U.S. Pat. No. 8,734,809 SEQ ID NO: 45 |
| AAV CSp-10 | 638 | U.S. Pat. No. 8,734,809 SEQ ID NO: 46 |
| AAV CSp-11 | 639 | U.S. Pat. No. 8,734,809 SEQ ID NO: 47 |
| AAV CSp-2 | 640 | U.S. Pat. No. 8,734,809 SEQ ID NO: 48 |
| AAV CSp-3 | 641 | U.S. Pat. No. 8,734,809 SEQ ID NO: 49 |
| AAV CSp-4 | 642 | U.S. Pat. No. 8,734,809 SEQ ID NO: 50 |
| AAV CSp-6 | 643 | U.S. Pat. No. 8,734,809 SEQ ID NO: 51 |
| AAV CSp-7 | 644 | U.S. Pat. No. 8,734,809 SEQ ID NO: 52 |
| AAV CSp-8 | 645 | U.S. Pat. No. 8,734,809 SEQ ID NO: 53 |
| AAV CSp-9 | 646 | U.S. Pat. No. 8,734,809 SEQ ID NO: 54 |
| AAV CHt-2 | 647 | U.S. Pat. No. 8,734,809 SEQ ID NO: 55 |
| AAV CHt-3 | 648 | U.S. Pat. No. 8,734,809 SEQ ID NO: 56 |
| AAV CKd-1 | 649 | U.S. Pat. No. 8,734,809 SEQ ID NO: 57 |
| AAV CKd-10 | 650 | U.S. Pat. No. 8,734,809 SEQ ID NO: 58 |
| AAV CKd-2 | 651 | U.S. Pat. No. 8,734,809 SEQ ID NO: 59 |
| AAV CKd-3 | 652 | U.S. Pat. No. 8,734,809 SEQ ID NO: 60 |
| AAV CKd-4 | 653 | U.S. Pat. No. 8,734,809 SEQ ID NO: 61 |
| AAV CKd-6 | 654 | U.S. Pat. No. 8,734,809 SEQ ID NO: 62 |
| AAV CKd-7 | 655 | U.S. Pat. No. 8,734,809 SEQ ID NO: 63 |
| AAV CKd-8 | 656 | U.S. Pat. No. 8,734,809 SEQ ID NO: 64 |
| AAV CLv-1 | 657 | U.S. Pat. No. 8,734,809 SEQ ID NO: 65 |
| AAV CLv-12 | 658 | U.S. Pat. No. 8,734,809 SEQ ID NO: 66 |
| AAV CLv-13 | 659 | U.S. Pat. No. 8,734,809 SEQ ID NO: 67 |
| AAV CLv-2 | 660 | U.S. Pat. No. 8,734,809 SEQ ID NO: 68 |
| AAV CLv-3 | 661 | U.S. Pat. No. 8,734,809 SEQ ID NO: 69 |
| AAV CLv-4 | 662 | U.S. Pat. No. 8,734,809 SEQ ID NO: 70 |
| AAV CLv-6 | 663 | U.S. Pat. No. 8,734,809 SEQ ID NO: 71 |
| AAV CLv-8 | 664 | U.S. Pat. No. 8,734,809 SEQ ID NO: 72 |
| AAV CKd-B1 | 665 | U.S. Pat. No. 8,734,809 SEQ ID NO: 73 |
| AAV CKd-B2 | 666 | U.S. Pat. No. 8,734,809 SEQ ID NO: 74 |
| AAV CKd-B3 | 667 | U.S. Pat. No. 8,734,809 SEQ ID NO: 75 |
| AAV CKd-B4 | 668 | U.S. Pat. No. 8,734,809 SEQ ID NO: 76 |
| AAV CKd-B5 | 669 | U.S. Pat. No. 8,734,809 SEQ ID NO: 77 |
| AAV CKd-B6 | 670 | U.S. Pat. No. 8,734,809 SEQ ID NO: 78 |
| AAV CKd-B7 | 671 | U.S. Pat. No. 8,734,809 SEQ ID NO: 79 |
| AAV CKd-B8 | 672 | U.S. Pat. No. 8,734,809 SEQ ID NO: 80 |
| AAV CKd-H1 | 673 | U.S. Pat. No. 8,734,809 SEQ ID NO: 81 |
| AAV CKd-H2 | 674 | U.S. Pat. No. 8,734,809 SEQ ID NO: 82 |
| AAV CKd-H3 | 675 | U.S. Pat. No. 8,734,809 SEQ ID NO: 83 |
| AAV CKd-H4 | 676 | U.S. Pat. No. 8,734,809 SEQ ID NO: 84 |
| AAV CKd-H5 | 677 | U.S. Pat. No. 8,734,809 SEQ ID NO: 85 |
| AAV CKd-H6 | 678 | U.S. Pat. No. 8,734,809 SEQ ID NO: 77 |
| AAV CHt-1 | 679 | U.S. Pat. No. 8,734,809 SEQ ID NO: 86 |
| AAV CLv1-1 | 680 | U.S. Pat. No. 8,734,809 SEQ ID NO: 171 |
| AAV CLv1-2 | 681 | U.S. Pat. No. 8,734,809 SEQ ID NO: 172 |
| AAV CLv1-3 | 682 | U.S. Pat. No. 8,734,809 SEQ ID NO: 173 |
| AAV CLv1-4 | 683 | U.S. Pat. No. 8,734,809 SEQ ID NO: 174 |
| AAV Clv1-7 | 684 | U.S. Pat. No. 8,734,809 SEQ ID NO: 175 |
| AAV Clv1-8 | 685 | U.S. Pat. No. 8,734,809 SEQ ID NO: 176 |
| AAV Clv1-9 | 686 | U.S. Pat. No. 8,734,809 SEQ ID NO: 177 |
| AAV Clv1-10 | 687 | U.S. Pat. No. 8,734,809 SEQ ID NO: 178 |
| AAV.VR-355 | 688 | U.S. Pat. No. 8,734,809 SEQ ID NO: 181 |
| AAV.hu.48R3 | 689 | U.S. Pat. No. 8,734,809 SEQ ID NO: 183 |
| AAV CBr-E1 | 690 | U.S. Pat. No. 8,734,809 SEQ ID NO: 87 |
| AAV CBr-E2 | 691 | U.S. Pat. No. 8,734,809 SEQ ID NO: 88 |
| AAV CBr-E3 | 692 | U.S. Pat. No. 8,734,809 SEQ ID NO: 89 |
| AAV CBr-E4 | 693 | U.S. Pat. No. 8,734,809 SEQ ID NO: 90 |
| AAV CBr-E5 | 694 | U.S. Pat. No. 8,734,809 SEQ ID NO: 91 |
| AAV CBr-e5 | 695 | U.S. Pat. No. 8,734,809 SEQ ID NO: 92 |
| AAV CBr-E6 | 696 | U.S. Pat. No. 8,734,809 SEQ ID NO: 93 |
| AAV CBr-E7 | 697 | U.S. Pat. No. 8,734,809 SEQ ID NO: 94 |
| AAV CBr-E8 | 698 | U.S. Pat. No. 8,734,809 SEQ ID NO: 95 |
| AAV CLv-D1 | 699 | U.S. Pat. No. 8,734,809 SEQ ID NO: 96 |
| AAV CLv-D2 | 700 | U.S. Pat. No. 8,734,809 SEQ ID NO: 97 |
| AAV CLv-D3 | 701 | U.S. Pat. No. 8,734,809 SEQ ID NO: 98 |
| AAV CLv-D4 | 702 | U.S. Pat. No. 8,734,809 SEQ ID NO: 99 |
| AAV CLv-D5 | 703 | U.S. Pat. No. 8,734,809 SEQ ID NO: 100 |
| AAV CLv-D6 | 704 | U.S. Pat. No. 8,734,809 SEQ ID NO: 101 |
| AAV CLv-D7 | 705 | U.S. Pat. No. 8,734,809 SEQ ID NO: 102 |
| AAV CLv-D8 | 706 | U.S. Pat. No. 8,734,809 SEQ ID NO: 103 |
| AAV CLv-E1 | 707 | U.S. Pat. No. 8,734,809 SEQ ID NO: 87 |
| AAV CLv-R1 | 708 | U.S. Pat. No. 8,734,809 SEQ ID NO: 104 |
| AAV CLv-R2 | 709 | U.S. Pat. No. 8,734,809 SEQ ID NO: 105 |
| AAV CLv-R3 | 710 | U.S. Pat. No. 8,734,809 SEQ ID NO: 106 |
| AAV CLv-R4 | 711 | U.S. Pat. No. 8,734,809 SEQ ID NO: 107 |
| AAV CLv-R5 | 712 | U.S. Pat. No. 8,734,809 SEQ ID NO: 108 |
| AAV CLv-R6 | 713 | U.S. Pat. No. 8,734,809 SEQ ID NO: 109 |
| AAV CLv-R7 | 714 | U.S. Pat. No. 8,734,809 SEQ ID NO: 110 |
| AAV CLv-R8 | 715 | U.S. Pat. No. 8,734,809 SEQ ID NO: 111 |
| AAV CLv-R9 | 716 | U.S. Pat. No. 8,734,809 SEQ ID NO: 112 |
| AAV CLg-F1 | 717 | U.S. Pat. No. 8,734,809 SEQ ID NO: 113 |
| AAV CLg-F2 | 718 | U.S. Pat. No. 8,734,809 SEQ ID NO: 114 |
| AAV CLg-F3 | 719 | U.S. Pat. No. 8,734,809 SEQ ID NO: 115 |
| AAV CLg-F4 | 720 | U.S. Pat. No. 8,734,809 SEQ ID NO: 116 |
| AAV CLg-F5 | 721 | U.S. Pat. No. 8,734,809 SEQ ID NO: 117 |
| AAV CLg-F6 | 722 | U.S. Pat. No. 8,734,809 SEQ ID NO: 117 |
| AAV CLg-F7 | 723 | U.S. Pat. No. 8,734,809 SEQ ID NO: 118 |
| AAV CLg-F8 | 724 | U.S. Pat. No. 8,734,809 SEQ ID NO: 117 |
| AAV CSp-1 | 725 | U.S. Pat. No. 8,734,809 SEQ ID NO: 119 |
| AAV CSp-10 | 726 | U.S. Pat. No. 8,734,809 SEQ ID NO: 120 |
| AAV CSp-11 | 727 | U.S. Pat. No. 8,734,809 SEQ ID NO: 121 |
| AAV CSp-2 | 728 | U.S. Pat. No. 8,734,809 SEQ ID NO: 122 |
| AAV CSp-3 | 729 | U.S. Pat. No. 8,734,809 SEQ ID NO: 123 |
| AAV CSp-4 | 730 | U.S. Pat. No. 8,734,809 SEQ ID NO: 124 |
| AAV CSp-6 | 731 | U.S. Pat. No. 8,734,809 SEQ ID NO: 125 |
| AAV CSp-7 | 732 | U.S. Pat. No. 8,734,809 SEQ ID NO: 126 |
| AAV CSp-8 | 733 | U.S. Pat. No. 8,734,809 SEQ ID NO: 127 |
| AAV CSp-9 | 734 | U.S. Pat. No. 8,734,809 SEQ ID NO: 128 |
| AAV CHt-2 | 735 | U.S. Pat. No. 8,734,809 SEQ ID NO: 129 |
| AAV CHt-3 | 736 | U.S. Pat. No. 8,734,809 SEQ ID NO: 130 |
| AAV CKd-1 | 737 | U.S. Pat. No. 8,734,809 SEQ ID NO: 131 |
| AAV CKd-10 | 738 | U.S. Pat. No. 8,734,809 SEQ ID NO: 132 |
| AAV CKd-2 | 739 | U.S. Pat. No. 8,734,809 SEQ ID NO: 133 |
| AAV CKd-3 | 740 | U.S. Pat. No. 8,734,809 SEQ ID NO: 134 |
| AAV CKd-4 | 741 | U.S. Pat. No. 8,734,809 SEQ ID NO: 135 |
| AAV CKd-6 | 742 | U.S. Pat. No. 8,734,809 SEQ ID NO: 136 |
| AAV CKd-7 | 743 | U.S. Pat. No. 8,734,809 SEQ ID NO: 137 |
| AAV CKd-8 | 744 | U.S. Pat. No. 8,734,809 SEQ ID NO: 138 |
| AAV CLv-1 | 745 | U.S. Pat. No. 8,734,809 SEQ ID NO: 139 |
| AAV CLv-12 | 746 | U.S. Pat. No. 8,734,809 SEQ ID NO: 140 |
| AAV CLv-13 | 747 | U.S. Pat. No. 8,734,809 SEQ ID NO: 141 |
| AAV CLv-2 | 748 | U.S. Pat. No. 8,734,809 SEQ ID NO: 142 |
| AAV CLv-3 | 749 | U.S. Pat. No. 8,734,809 SEQ ID NO: 143 |
| AAV CLv-4 | 750 | U.S. Pat. No. 8,734,809 SEQ ID NO: 144 |
| AAV CLv-6 | 751 | U.S. Pat. No. 8,734,809 SEQ ID NO: 145 |
| AAV CLv-8 | 752 | U.S. Pat. No. 8,734,809 SEQ ID NO: 146 |
| AAV CKd-B1 | 753 | U.S. Pat. No. 8,734,809 SEQ ID NO: 147 |
| AAV CKd-B2 | 754 | U.S. Pat. No. 8,734,809 SEQ ID NO: 148 |
| AAV CKd-B3 | 755 | U.S. Pat. No. 8,734,809 SEQ ID NO: 149 |
| AAV CKd-B4 | 756 | U.S. Pat. No. 8,734,809 SEQ ID NO: 150 |
| AAV CKd-B5 | 757 | U.S. Pat. No. 8,734,809 SEQ ID NO: 151 |
| AAV CKd-B6 | 758 | U.S. Pat. No. 8,734,809 SEQ ID NO: 152 |
| AAV CKd-B7 | 759 | U.S. Pat. No. 8,734,809 SEQ ID NO: 153 |
| AAV CKd-B8 | 760 | U.S. Pat. No. 8,734,809 SEQ ID NO: 154 |
| AAV CKd-H1 | 761 | U.S. Pat. No. 8,734,809 SEQ ID NO: 155 |
| AAV CKd-H2 | 762 | U.S. Pat. No. 8,734,809 SEQ ID NO: 156 |
| AAV CKd-H3 | 763 | U.S. Pat. No. 8,734,809 SEQ ID NO: 157 |
| AAV CKd-H4 | 764 | U.S. Pat. No. 8,734,809 SEQ ID NO: 158 |
| AAV CKd-H5 | 765 | U.S. Pat. No. 8,734,809 SEQ ID NO: 159 |
| AAV CKd-H6 | 766 | U.S. Pat. No. 8,734,809 SEQ ID NO: 151 |
| AAV CHt-1 | 767 | U.S. Pat. No. 8,734,809 SEQ ID NO: 160 |
| AAV CHt-P2 | 768 | WO2016065001 SEQ ID NO: 1 |
| AAV CHt-P5 | 769 | WO2016065001 SEQ ID NO: 2 |
| AAV CHt-P9 | 770 | WO2016065001 SEQ ID NO: 3 |
| AAV CBr-7.1 | 771 | WO2016065001 SEQ ID NO: 4 |
| AAV CBr-7.2 | 772 | WO2016065001 SEQ ID NO: 5 |
| AAV CBr-7.3 | 773 | WO2016065001 SEQ ID NO: 6 |
| AAV CBr-7.4 | 774 | WO2016065001 SEQ ID NO: 7 |
| AAV CBr-7.5 | 775 | WO2016065001 SEQ ID NO: 8 |
| AAV CBr-7.7 | 776 | WO2016065001 SEQ ID NO: 9 |
| AAV CBr-7.8 | 777 | WO2016065001 SEQ ID NO: 10 |
| AAV CBr-7.10 | 778 | WO2016065001 SEQ ID NO: 11 |
| AAV CKd-N3 | 779 | WO2016065001 SEQ ID NO: 12 |
| AAV CKd-N4 | 780 | WO2016065001 SEQ ID NO: 13 |
| AAV CKd-N9 | 781 | WO2016065001 SEQ ID NO: 14 |
| AAV CLv-L4 | 782 | WO2016065001 SEQ ID NO: 15 |
| AAV CLv-L5 | 783 | WO2016065001 SEQ ID NO: 16 |
| AAV CLv-L6 | 784 | WO2016065001 SEQ ID NO: 17 |
| AAV CLv-K1 | 785 | WO2016065001 SEQ ID NO: 18 |
| AAV CLv-K3 | 786 | WO2016065001 SEQ ID NO: 19 |
| AAV CLv-K6 | 787 | WO2016065001 SEQ ID NO: 20 |
| AAV CLv-M1 | 788 | WO2016065001 SEQ ID NO: 21 |
| AAV CLv-M11 | 789 | WO2016065001 SEQ ID NO: 22 |
| AAV CLv-M2 | 790 | WO2016065001 SEQ ID NO: 23 |
| AAV CLv-M5 | 791 | WO2016065001 SEQ ID NO: 24 |
| AAV CLv-M6 | 792 | WO2016065001 SEQ ID NO: 25 |
| AAV CLv-M7 | 793 | WO2016065001 SEQ ID NO: 26 |
| AAV CLv-M8 | 794 | WO2016065001 SEQ ID NO: 27 |
| AAV CLv-M9 | 795 | WO2016065001 SEQ ID NO: 28 |
| AAV CHt-P1 | 796 | WO2016065001 SEQ ID NO: 29 |
| AAV CHt-P6 | 797 | WO2016065001 SEQ ID NO: 30 |
| AAV CHt-P8 | 798 | WO2016065001 SEQ ID NO: 31 |
| AAV CHt-6.1 | 799 | WO2016065001 SEQ ID NO: 32 |
| AAV CHt-6.10 | 800 | WO2016065001 SEQ ID NO: 33 |
| AAV CHt-6.5 | 801 | WO2016065001 SEQ ID NO: 34 |
| AAV CHt-6.6 | 802 | WO2016065001 SEQ ID NO: 35 |
| AAV CHt-6.7 | 803 | WO2016065001 SEQ ID NO: 36 |
| AAV CHt-6.8 | 804 | WO2016065001 SEQ ID NO: 37 |
| AAV CSp-8.10 | 805 | WO2016065001 SEQ ID NO: 38 |
| AAV CSp-8.2 | 806 | WO2016065001 SEQ ID NO: 39 |
| AAV CSp-8.4 | 807 | WO2016065001 SEQ ID NO: 40 |
| AAV CSp-8.5 | 808 | WO2016065001 SEQ ID NO: 41 |
| AAV CSp-8.6 | 809 | WO2016065001 SEQ ID NO: 42 |
| AAV CSp-8.7 | 810 | WO2016065001 SEQ ID NO: 43 |
| AAV CSp-8.8 | 811 | WO2016065001 SEQ ID NO: 44 |
| AAV CSp-8.9 | 812 | WO2016065001 SEQ ID NO: 45 |
| AAV CBr-B7.3 | 813 | WO2016065001 SEQ ID NO: 46 |
| AAV CBr-B7.4 | 814 | WO2016065001 SEQ ID NO: 47 |
| AAV3B | 815 | WO2016065001 SEQ ID NO: 48 |
| AAV4 | 816 | WO2016065001 SEQ ID NO: 49 |
| AAV5 | 817 | WO2016065001 SEQ ID NO: 50 |
| AAV CHt-P2 | 818 | WO2016065001 SEQ ID NO: 51 |
| AAV CHt-P5 | 819 | WO2016065001 SEQ ID NO: 52 |
| AAV CHt-P9 | 820 | WO2016065001 SEQ ID NO: 53 |
| AAV CBr-7.1 | 821 | WO2016065001 SEQ ID NO: 54 |
| AAV CBr-7.2 | 822 | WO2016065001 SEQ ID NO: 55 |
| AAV CBr-7.3 | 823 | WO2016065001 SEQ ID NO: 56 |
| AAV CBr-7.4 | 824 | WO2016065001 SEQ ID NO: 57 |
| AAV CBr-7.5 | 825 | WO2016065001 SEQ ID NO: 58 |
| AAV CBr-7.7 | 826 | WO2016065001 SEQ ID NO: 59 |
| AAV CBr-7.8 | 827 | WO2016065001 SEQ ID NO: 60 |
| AAV CBr-7.10 | 828 | WO2016065001 SEQ ID NO: 61 |
| AAV CKd-N3 | 829 | WO2016065001 SEQ ID NO: 62 |
| AAV CKd-N4 | 830 | WO2016065001 SEQ ID NO: 63 |
| AAV CKd-N9 | 831 | WO2016065001 SEQ ID NO: 64 |
| AAV CLv-L4 | 832 | WO2016065001 SEQ ID NO: 65 |
| AAV CLv-L5 | 833 | WO2016065001 SEQ ID NO: 66 |
| AAV CLv-L6 | 834 | WO2016065001 SEQ ID NO: 67 |
| AAV CLv-K1 | 835 | WO2016065001 SEQ ID NO: 68 |
| AAV CLv-K3 | 836 | WO2016065001 SEQ ID NO: 69 |
| AAV CLv-K6 | 837 | WO2016065001 SEQ ID NO: 70 |
| AAV CLv-M1 | 838 | WO2016065001 SEQ ID NO: 71 |
| AAV CLv-M11 | 839 | WO2016065001 SEQ ID NO: 72 |
| AAV CLv-M2 | 840 | WO2016065001 SEQ ID NO: 73 |
| AAV CLv-M5 | 841 | WO2016065001 SEQ ID NO: 74 |
| AAV CLv-M6 | 842 | WO2016065001 SEQ ID NO: 75 |
| AAV CLv-M7 | 843 | WO2016065001 SEQ ID NO: 76 |
| AAV CLv-M8 | 844 | WO2016065001 SEQ ID NO: 77 |
| AAV CLv-M9 | 845 | WO2016065001 SEQ ID NO: 78 |
| AAV CHt-P1 | 846 | WO2016065001 SEQ ID NO: 79 |
| AAV CHt-P6 | 847 | WO2016065001 SEQ ID NO: 80 |
| AAV CHt-P8 | 848 | WO2016065001 SEQ ID NO: 81 |
| AAV CHt-6.1 | 849 | WO2016065001 SEQ ID NO: 82 |
| AAV CHt-6.10 | 850 | WO2016065001 SEQ ID NO: 83 |
| AAV CHt-6.5 | 851 | WO2016065001 SEQ ID NO: 84 |
| AAV CHt-6.6 | 852 | WO2016065001 SEQ ID NO: 85 |
| AAV CHt-6.7 | 853 | WO2016065001 SEQ ID NO: 86 |
| AAV CHt-6.8 | 854 | WO2016065001 SEQ ID NO: 87 |
| AAV CSp-8.10 | 855 | WO2016065001 SEQ ID NO: 88 |
| AAV CSp-8.2 | 856 | WO2016065001 SEQ ID NO: 89 |
| AAV CSp-8.4 | 857 | WO2016065001 SEQ ID NO: 90 |
| AAV CSp-8.5 | 858 | WO2016065001 SEQ ID NO: 91 |
| AAV CSp-8.6 | 859 | WO2016065001 SEQ ID NO: 92 |
| AAV CSp-8.7 | 860 | WO2016065001 SEQ ID NO: 93 |
| AAV CSp-8.8 | 861 | WO2016065001 SEQ ID NO: 94 |
| AAV CSp-8.9 | 862 | WO2016065001 SEQ ID NO: 95 |
| AAV CBr-B7.3 | 863 | WO2016065001 SEQ ID NO: 96 |
| AAV CBr-B7.4 | 864 | WO2016065001 SEQ ID NO: 97 |
| AAV3B | 865 | WO2016065001 SEQ ID NO: 98 |
| AAV4 | 866 | WO2016065001 SEQ ID NO: 99 |
| AAV5 | 867 | WO2016065001 SEQ ID NO: 100 |
| AAVPHP.B or | 868 | WO2015038958 SEQ ID NO: 8 and 13; |
| G2B-26 | | GenBankALU85156.1 |
| AAVPHP.B | 869 | WO2015038958 SEQ ID NO: 9 |
| AAVG2B-13 | 870 | WO2015038958 SEQ ID NO: 12 |
| AAVTH1.1-32 | 871 | WO2015038958 SEQ ID NO: 14 |
| AAVTH1.1-35 | 872 | WO2015038958 SEQ ID NO: 15 |

[0091] Each of the patents, applications and/or publications listed in Table 1 are hereby incorporated by reference in their entirety.

[0092] In one embodiment, the AAV serotype may be, or may have a sequence as described in International Patent Publication WO2015038958, the contents of which are herein incorporated by reference in their entirety, such as, but not limited to, AAV9 (SEQ ID NO: 2 and 11 of WO2015038958, herein SEQ ID NO: 127 and 126 respectively), PHP.R (SEQ ID NO: 8 and 9 of WO2015038958, herein SEQ ID NO: 868 and 869 respectively), G2B-13 (SEQ ID NO: 12 of WO2015038958, herein SEQ ID NO: 870), G2B-26 (SEQ ID NO: 13 of WO2015038958, herein SEQ ID NO: 868 and 869 respectively), TH1.1-32 (SEQ ID NO: 14 of WO2015038958, herein SEQ ID NO: 871), TH1.1-35 (SEQ ID NO: 15 of WO2015038958, herein SEQ ID NO: 872) or variants thereof. Further, any of the targeting peptides or amino acid inserts described in WO2015038958, may be inserted into any parent AAV serotype, such as, but not limited to, AAV9 (SEQ ID NO: 126 for the DNA sequence and SEQ ID NO: 127 for the amino acid sequence). In one embodiment, the amino acid insert is inserted between amino acids 586-592of the parent AAV (e.g., AAV9). In another embodiment, the amino acid insert is inserted between amino acids 588-589 of the parent AAV sequence. The amino acid insert may be, but is not limited to, any of the following amino acid sequences, TLAVPFK (SEQ ID NO: 1 of WO2015038958, herein SEQ ID NO: 873), KFPVALT (SEQ ID NO: 3 of WO2015038958; herein SEQ ID NO: 874), LAVPFK (SEQ ID NO: 31 of WO2015038958: herein SEQ ID NO: 875), AVPFK (SEQ ID NO: 32 of WO2015038958; herein SEQ ID NO: 876), VPFK (SEQ ID NO: 33 of WO2015038958; herein SEQ ID NO: 877), TLAVPF (SEQ ID NO: 34 of WO2015038958; herein SEQ ID NO: 878), TLA VP (SEQ ID NO: 35 of WO2015038958; herein SEQ ID NO: 879), TLAV (SEQ ID NO: 36 of WO2015038958; herein SEQ ID NO: 880), SVSKPFL (SEQ ID NO: 28 of WO2015038958, herein SEQ ID NO: 881). FTLTTPK (SEQ ID NO: 29 of WO2015038958; herein SEQ ID NO: 882), MNATKNV (SEQ ID NO: 30 of WO2015038958; herein SEQ ID NO: 883), QSSQTPR (SEQ ID NO: 54 of WG2015038958; herein SEQ ID NO: 884), ILGTGTS (SEQ ID NO: 55 of WO2015038958; herein SEQ ID NO: 885), TRTNPEA (SEQ ID NO: 56 of WO2015038958; herein SEQ ID NO: 886), NGGTSSS (SEQ ID NO: 58 of WO2015038958, herein SEQ ID NO: 887), or YTLSQGW (SEQ ID NO: 60 of WO2015038958; herein SEQ ID NO: 888), Non-limiting examples of nucleotide sequences that may encode the amino acid inserts include the following, AAGTTTCCTGTGGCGTTGACT (SEQ ID NO: 3 of WO2015038958; herein SEQ ID NO: 889), ACTTTGGCGGTGCCTTTTAAG (SEQ ID NO: 24 and 49 of WO2015038958; herein SEQ ID NO: 890), AGTGTGAGTAAGCCTTTTTTG (SEQ ID NO: 25 of WO2015038958; herein SEQ ID NO: 891), TTTACGTTGACGACGCCTAAG (SEQ ID NO: 26 of WO2015038958, herein SEQ ID NO: 892). ATGAATGCTACGAAGAATGTG (SEQ ID NO: 27 of WO2015038958; herein SEQ ID NO: 893), CAGTCGTCGCAGACGCCTAGG (SEQ ID NO: 48 of WO2015038958, herein SEQ ID NO: 894), ATTCTGGGGACTGGTACTTCG (SEQ ID NO: 50 and 52 of WO2015038958; herein SEQ ID NO: 895), ACGCGGACTAATCCTGAGGCT (SEQ ID NO: 51 of WO2015038958; herein SEQ ID NO: 896), AATGGGGGGACTAGTAGTTCT (SEQ ID NO: 53 of WO2015038958, herem SEQ ID NO: 897), or TATACTTTGTCGCAGGGTTGG (SEQ ID NO: 59 of WO2015038958; herem SEQ ID NO: 898).

### Viral Genome Component: Inverted Terminal Repeats (ITRs)

[0093] The AAV particles of the present invention comprise a viral genome with at least one ITR region and a payload region. In one embodiment, the viral genome has two ITRs. These two ITRs flank the payload region at the 5′ and 3′ ends. The ITRs function as origins of replication comprising recognition sites for replication. ITRs comprise sequence regions which can be complementary find symmetrically arranged ITRs incorporated into viral genomes of the invention may be comprised of naturally occurring polynucleotide sequences or recombinantly derived polynucleotide sequences.

[0094] The ITRs may be derived from the same serotype as the capsid, selected from any of the serotypes listed in Table 1, or a derivative thereof. The ITR may be of a different serotype than the capsid. In one embodiment, the AAV particle has more than one ITR. In a non-limiting example, the AAV particle has a viral genome comprising two ITRs. In one embodiment, the ITRs are of the same serotype as one another. In another embodiment, the ITRs are of different serotypes. Non-limiting examples include zero, one or both of the ITRs having the same serotype as the capsid. In one embodiment both ITRs of the viral genome of the AAV particle are AAV2 ITRs.

[0095] Independently, each ITR may be about 100 to about 150 nucleotides in length. An ITR may be about 100-105 nucleotides in length, 106-110 nucleotides in length, 111-115 nucleotides in length, 116-120 nucleotides in length, 121-125 nucleotides in length, 126-130 nucleotides in length, 131-135 nucleotides in length, 136-140 nucleotides in length, 141-145 nucleotides in length or 146-150 nucleotides in length. In one embodiment, the ITRs are 14-142 nucleotides in length. Non-limiting examples of ITR length are 102, 140, 141, 142, 145 nucleotides in length, and those having at least 95% identity thereto.

### Viral Genome Component: Promoters

[0096] In one embodiment, the payload region of the viral genome comprises at least one element to enhance the transgene target specificity and expression (See e.g., Powell et al. Viral Expression Cassette Elements to Enhance Transgene Target Specificity and Expression in Gene Therapy, 2015; the contents of which are herein incorporated by reference in its entirety). Non-limiting examples of elements to enhance the transgene target specificity and expression include promoters, endogenous miRNAs, post-transcriptional regulatory elements (PREs), polyadenylation (PolyA) signal sequences and upstream enhancers (USEs), CMV enhancers and introns.

[0097] A person skilled in the art may recognize that expression of the polypeptides of the invention in a target cell may require a specific promoter, including but not limited to, a promoter that is species specific, inducible, tissue-specific, or cell cycle-specific (Parr et al., Nat. Med.3:1145-9 (1997); the contents of which are herein incorporated by reference in their entirety).

[0098] In one embodiment, the promoter is deemed to be efficient when it drives expression of the polypeptide(s) encoded in the payload region of the viral genome of the AAV particle.

[0099] In one embodiment, the promoter is a promoter deemed to be efficient when it drives expression in the cell being targeted.

[0100] In one embodiment, the promoter drives expression of the polypeptides of the invention (e.g., a functional antibody) for a period of time in targeted tissues. Expression driven by a promoter may be for a period of 1 hour, 2, hours, 3 hours. 4 hours, 5 hours, 6 hours, 7 hours, 8 hours, 9 hours, 10 hours, 11 hours, 12 hours, 13 hours, 14 hours, 15 hours, 16 hours, 17 hours, 18 hours, 19 hours, 20 hours, 21 hours, 22 hours, 23 hours, 1 day, 2 days, 3 days, 4 days, 5 days, 6 days, 1 week, 8 days, 9 days, 10 days, 11 days, 12 days, 13 days, 2 weeks, 15 days, 16 days, 17 days, 18 days, 19 days, 20 days, 3 weeks, 22 days, 23 days, 24 days. 25 days, 26 days. 27 days. 28 days, 29 days, 30 days, 31 days, 1 month, 2 months, 3 months, 4 months, 5 months, 6 months, 7 months, 8 months, 9 months, 10 months, 11 months, 1 year, 13 months, 14 months, 15 months, 16 months, 17 months, 18 months. 19 months, 20 months, 21 months, 22 months, 23 months, 2 years, 3 years, 4 years, 5 years, 6 years, 7 years, 8 years, 9 years, 10 years or more than 10 years. Expression may be for 1-5 hours, 1-12 hours, 1-2 days, 1-5 days, 1-2 weeks, 1-3 weeks, 1-4 weeks, 1-2 months, 1-4 months, 1-6 months, 2-6 months, 3-6 months. 3-9 months, 4-8 months, 6-12 months, 1-2 years, 1-5 years, 2-5 years, 3-6 years, 3-8 years, 4-8 years, or 5-10 years.

[0101] In one embodiment, the promoter drives expression of the polypeptides of the invention (e.g., a functional antibody) for at least 1 month, 2 months, 3 months, 4 months, 5 months, 6 months, 7 months, 8 months, 9 months, 10 months, 11 months, 1 year, 2 years, 3 years 4 years, 5 years, 6 years, 7 years, 8 years, 9 years, 10 years, 11 years, 12 years, 13 years, 14 years, 15 years, 16 years, 17 years, 18 years, 19 years, 20 years, 21 years, 22 years, 23 years, 24 years, 25 years, 26 years, 27 years, 28 years, 29 years, 30 years, 31 years, 32 years, 33 years, 34 years, 35 years, 36 years, 37 years, 38 years, 39 years, 40 years, 41 years, 42 years, 43 years, 44 years, 45 years, 46 years, 47 years, 48 years, 49 years, 50 years, 55 years, 60 years, 65 years, or more than 65 years,

[0102] Promoters may be naturally occurring or non-naturally occurring. Non-limiting examples of promoters include viral promoters, plant promoters and mammalian promoters. In some embodiments, the promoters may be human promoters. In some embodiments, the promoter may be truncated.

[0103] Promoters which drive or promote expression in most tissues include, but are not limited to, human elongation factor 1α-subunit (EF1α), cytomegalovirus (CMV) immediate-early enhancer and/or promoter, chicken β-actin (CBA) and its derivative CAG, β glucuronidase (GUSB), or ubiquitin C (UBC). Tissue-specific expression elements can be used to restrict expression to certain cell types such as, but not limited to, muscle specific promoters, B cell promoters, monocyte promoters, leukocyte promoters, macrophage promoters, pancreatic acinar cell promoters, endothelial cell promoters, lung tissue promoters, astrocyte promoters, or nervous system promoters which can be used to restrict expression to neurons, astrocytes, or oligodendrocytes.

[0104] Non-limiting examples of muscle-specific promoters include mammalian muscle creatine kinase (MCK) promoter, mammalian desmin (DES) promoter, mammalian troponin I (TNNI2) promoter, and mammalian skeletal alpha-actm (ASKA) promoter (see, e.g. U.S. Patent Publication US20110212529, the contents of which are herein incorporated by reference in their entirely).

[0105] Non-limiting examples of tissue-specific expression elements for neurons include neuron-specific enolase (NSE), platelet-derived growth factor (PDGF), platelet-derived growth factor B-chain (PDGF-β), synapsin (Syn), methyl-CpG binding protein 2 (MeCP2), Ca²⁺/calmodulin-dependent protein kinase II (CaMKII), metabotropic glutamate receptor 2 (mGluR2), neurofilament light (NFL) or heavy (NFH), β-globin minigene nβ2, preproenkephalin (PPE), enkephalin (Enk) and excitatory amino acid transporter 2 (EAAT2) promoters. Non-limiting examples of tissue-specific expression elements for astrocytes include glial fibrillary acidic protein (GFAP) and EAAT2 promoters. A non-limiting example of a tissue-specific expression element for oligodendrocytes includes the myelin basic protein (MBP) promoter.

[0106] In one embodiment, the promoter may be less than 1 kb. The promoter may have a length of 200, 210, 220, 230, 240, 250, 260, 270, 280, 290, 300, 310, 320, 330, 340, 350, 360, 370, 380. 390, 400, 410, 420, 430, 440, 450, 460, 470, 480, 490, 500, 510, 520, 530, 540, 550, 560, 570, 580, 590, 600, 610, 620, 630, 640, 650, 660, 670, 680, 690, 700, 710, 720, 730, 740, 750, 760, 770, 780, 790, 800, or more than 800 nucleotides. The promoter may have a length between 200-300, 200-400, 200-500, 200-600, 200-700, 200-800, 300-400. 300-500, 300-600, 300-700, 300-800, 400-500, 400-600, 400-700, 400-800, 500-600, 500-700, 500-800, 600-700, 600-800, or 700-800.

[0107] In one embodiment, the promoter may be a combination of two or more components of the same or different starting or parental promoters such as, but not limited to, CMV and CBA. Each component may have a length of 200, 210, 220, 230, 240, 250, 260, 270, 280, 290, 300, 310, 320, 330. 340, 350, 360, 370, 380, 381, 382, 383, 384, 385, 386, 387, 388. 389, 390, 400, 410, 420, 430, 440, 450, 460, 470, 480. 490, 500, 510, 520. 530, 540, 550, 560, 570. 580, 590, 600, 610, 620, 630, 640, 650, 660, 670, 680, 690, 700, 710, 720, 730, 740, 750, 760. 770, 780, 790, 800, or more than 800. Each component may have a length between 200-300, 200-400, 200-500, 200-600, 200-700, 200-800, 300-400, 300-500, 300-600, 300-700, 300-800, 400-500, 400-600, 400-700, 400-800, 500-600, 500-700, 500-800, 600-700, 600-800 or 700-800. In one embodiment, the promoter is a combination of a 382 nucleotide CMV-enhancer sequence and a 260 nucleotide CBA-promoter sequence.

[0108] In one embodiment, the viral genome comprises a ubiquitous promoter. Non-limiting examples of ubiquitous promoters include CMV. CBA (including derivatives CAG, CBh, etc.), EF-1α, PGK, UBC, GUSB (hGBp), and UCOE (promoter of HNRPA2B1-CBX3). Yu et al. (Molecular Pain 2011, 7.63; the contents of which are herein incorporated by reference in their entirety) evaluated the expression of eGFP under the CAG, EFα, PGK and UBC promoters in rat DRG cells and primary DRG cells using lenti viral vectors and found that UBC showed weaker expression than the other 3 promoters and only 10-12% glial expression was seen for all promoters. Soderblom et al. (E. Neuro 2015; the contents of which are herein incorporated by reference in its entirety) evaluated the expression of eGFP in AAV8 with CMV and UBC promoters and AAV2 with the CMV promoter after injection in the motor cortex. Intranasal administration of a plasmid containing a UBC or EF1α promoter showed a sustained airway expression greater than the expression with the CMV promoter (See e.g., Gill et al, Gene Therapy 2001, Vol. 8, 1539-1546; the contents of which are herein incorporated by reference in their entirety ). Flusam et al. (Gene Therapy 2009; the contents of which are herein incorporated by reference in its entirety) evaluated an TβH construct with a hGUSB promoter, aHSV-1LAT promoter and an NSE promoter and found that the HβH construct showed weaker expression than NSE in mouse brain. Passini and Wolfe (J. Virol. 2001, 12382-12392, the contents of which are herein incorporated by reference in its entirety) evaluated the long-term effects of the HβH vector following an intraventricular injection in neonatal mice and found that there was sustained expression for at least 1 year. Low expression in all brain regions was found by Xu et al. (Gene Therapy 2001. 8, 1323-1332, the contents of which are herein incorporated by reference in their entirety) when NFL and NFH promoters were used as compared to the CMV-lacZ, CMV-luc, EF, GFAP, hENK, nAChR, PPE, PPE+ wpre, NSE (0.3 kb), NSE (1.8 kb) and NSE (1.8 kb+wpre). Xu et al. found that the promoter activity in descending order was NSE (1.8 kb), EF, NSE (0.3 kb), GFAP, CMV, hENK, PPE, NFL and NFH. NFL is a 650 nucleontide promoter and NFH is a 920 nucleotide promoter which are both absent in the liver but NFH is abundant in the sensory proprioceptive neurons, brain and spinal cord and NFH is present in the heart. Scn8a is a 470 nucleotide promoter which expresses throughout the DR.G, spinal cord and brain with particularly high expression seen in the hippocampal neurons and cerebellar Purkinje cells, cortex, thalamus, and hypothalamus (See e.g., Drews et al. Identification of evolutionary conserved, functional noncoding elements in the promoter region of the sodium channel gene SCN8A, Mamm Genome (2007) 18:723-731; and Raymond et al. Expression of Alternatively Spliced Sodium Channel α-subunit genes. Journal of Biological Chemistry (2004) 279(44) 46234-46241; the contents of each of which are herein incorporated by reference in their entireties).

[0109] Any of promoters taught by the aforementioned Yu, Soderblom, Gill, Husain, Passini, Xu, Drews, or Raymond may be used in the present inventions.

[0110] In one embodiment, the promoter is not cell specific.

[0111] In one embodiment, the promoter is a ubiquitin c (UBC) promoter. The UBC promoter may have a size of 300-350 nucleotides. As anon-limiting example, the UBC promoter is 332 nucleotides.

[0112] In one embodiment, the promoter is a β-glucuronidase (GUSB) promoter. The GUSB promoter may have a size of 350-400 nucleotides. As anon-limiting example, the GUSB promoter is 378 nucleotides.

[0113] In one embodiment, the promoter is a neurofilament light (NFL) promoter. The NFL promoter may have a size of 600-700 nucleotides. As a non-limiting example, the NFL promoter is 650 nucleotides,

[0114] In one embodiment, the promoter is a neurofilament heavy (NFH) promoter. The NFH promoter may have a size of 900-950 nucleotides. As a non-limiting example, the NFH promoter is 920 nucleotides.

[0115] In one embodiment, the promoter is a scn8a promoter. The scn8a promoter may have a size of 450-500 nucleotides. As a non-limiting example, the scnBa promoter is 470 nucleotides.

[0116] In one embodiment, the promoter is a. phosphoglycerate kinase 1 (PGK) promoter.

[0117] In one embodiment, the promoter is a chicken β-actin (CBA) promoter.

[0118] In one embodiment, the promoter is a cytomegalovirus (CMV) promoter.

[0119] In one embodiment, the promoter is a liver or a skeletal muscle promoter. Non-limiting examples of liver promoters include human α-1-antitrypsin (hAAT) and thyroxine binding globulin (TBG). Non-limiting examples of skeletal muscle promoters include Desmin, MCK or synthetic C5-12.

[0120] In one embodiment, the promoter is a RNA pol III promoter. As a non-limiting example, the RNA pol III promoter is U6. As a non-limiting example, the RN A pol III promoter is HI.

[0121] In one embodiment, the viral genome comprises two promoters. As a non-limiting example, the promoters are an EF1α promoter and a CMV promoter.

[0122] In one embodiment, the viral genome comprises an enhancer element, a promoter and/or a 5′UTR intron. The enhancer element, also referred to herein as an “enhancer,” may be, but is not limited to, a CMV enhancer, the promoter may be, but is not limited to, a CMV, CBA, UBC, GUSB, NSE, Synapsm, MeCP2, and GFAP promoter and the 5′UTR/intron may be, but is not limited to, SV40, and CBA-MVM. As a non-limiting example, the enhancer, promoter and/or intron used in combination may be: (1) CMV enhancer, CMV promoter, SV40 5′UTR intron; (2) CMV enhancer, CBA promoter, SV 40 5′UTR intron; (3) CMV enhancer, CBA promoter, CBA-MVM 5′UTR intron; (4) UBC promoter; (5) GUSB promoter; (6) NSE promoter, (7) Synapsm promoter; (8) MeCP2 promoter; and (9) GFAP promoter.

[0123] In one embodiment, the viral genome comprises an engineered promoter.

[0124] In another embodiment, the viral genome comprises a promoter from a naturally expressed protein.

### Viral Genome Component: Untranslated Regions (UTRs)

[0125] By definition, wild type untranslated regions (UTRs) of a gene are transcribed but not translated. Generally, the 5′UTR starts at the transcription start site and ends at the start codon and the 3′ UTR starts immediately following the stop codon and continues until the termination signal for transcription.

[0126] Features typically found in abundantly expressed genes of specific target organs may be engineered into UTRs to enhance the stability and protein production. As a non-limiting example, a 5′ UTR from mRNA normally expressed in the liver (e.g., albumin, serum amyloid A, Apolipoprotein A/B/E, transferrin, alpha fetoprotein, erythropoietin, or Factor VIII) may be used in the viral genomes of the AAV particles of the invention to enhance expression in hepatic cell lines or liver.

[0127] While not wishing to be bound by theory, wild-type 5′ untranslated regions (UTRs) include features which play roles in translation initiation, Kozak sequences, which are commonly known to be involved in the process by which the ribosome initiates translation of many genes, are usually included in 5′ UTRs. Kozak sequences have the consensus CCR(A/G)CCAUGG, where R is a purine (adenine or guanine) three bases upstream of the start codon (ATG), which is followed by another ‘G’.

[0128] In one embodiment, the 5′UTR in the viral genome includes a Kozak sequence.

[0129] In one embodiment, the 5′ UTR in the viral genome does not include a Kozak sequence.

[0130] While not wishing to be bound by theory, wild-type 3′ UTRs are known to have stretches of Adenosines and Uridines embedded therein. These AU rich signatures are particularly prevalent in genes with high rates of turnover. Based on their sequence features and functional properties, the AU rich elements (AREs) can be separated into three classes (Chen et al, 1995, the contents of which are herein incorporated by reference in its entirety): Class I AREs, such as, but not limited to, c-Myc and MyoD, contain several dispersed copies of an AUUUA motif within U-rich regions. Class II AREs, such as, but not limited to, GM-CSF and TNF-a, possess two or more overlapping UUAUUUA(U/A)(U/A) nonamers. Class III ARES, such as, but not limited to, c-Jun and Myogenin, are less well defined. These U rich regions do not contain an AUUUA motif. Most proteins binding to the AREs are known to destabilize the messenger, whereas members of the ELAV family, most notably HuR, have been documented to increase the stability of mRNA. HuR binds to AREs of all the three classes. Engineering the HuR specific binding sites into the 3′ UTR of nucleic acid molecules will lead to HuR binding and thus, stabilization of the message in vivo.

[0131] Introduction, removal or modification of 3′ UTR AU rich elements (AREs) can be used to modulate the stability of polynucleotides. When engineering specific polynucleotides, e.g., payload regions of viral genomes, one or more copies of an ARE can be introduced to make polynucleotides less stable and thereby curtail translation and decrease production of the resultant protein. Likewise, AREs can be identified and removed or mutated to increase the intracellular stability and thus increase translation and production of the resultant protein.

[0132] In one embodiment, the 3′ UTR of the viral genome may include an oligo(dT) sequence for tenrplated addition of a poly-A tail,

[0133] In one embodiment, the viral genome may include at least one miRNA seed, binding site or full sequence. microRNAs (or miRNA or miR) are 19-25 nucleotide noncoding RNAs that bind to the sites of nucleic acid targets and down-regulate gene expression either by reducing nucleic acid molecule stability or by inhibiting translation. A microRNA sequence comprises a “seed” region, i.e., a sequence in the region of positions 2-8 of the mature microRNA, which sequence has perfect Watson-Crick complementarity to the miRNA target sequence of the nucleic acid.

[0134] In one embodiment, the viral genome may be engineered to include, alter or remove at least one miRNA binding site, sequence, or seed region.

[0135] Any UTR from any gene known in the art may be incorporated into the viral genome of the AAV particle. These UTRs, or portions thereof, may be placed in the same orientation as in the gene from which they were selected or they may be altered in orientation or location. In one embodiment, the UTR used in the viral genome of the AAV particle may be inverted, shortened, lengthened, made with one or more other 5′ UTRs or 3′ UTRs known in the art. As used herein, the term “altered” as it relates to a UTR, means that the UTR has been changed in some way in relation to a reference sequence. For example, a 3′ or 5′ UTR may be altered relative to a wild type or native UTR by the change in orientation or location as taught above or may be altered by the inclusion of additional nucleotides, deletion of nucleotides, swapping or transposition of nucleotides.

[0136] In one embodiment, the viral genome of the AAV particle comprises at least one artificial UTRs which is not a variant of a wild type UTR.

[0137] In one embodiment, the viral genome of the AAV particle comprises UTRs which have been selected from a family of transcripts whose proteins share a common function, structure, feature or property.

### Viral Genome Component: Polyadenylation Sequence

[0138] In one embodiment, the viral genome of the AAV particles of the present invention comprise at least one polyadenylation sequence. The viral genome of the AAV particle may comprise a polyadenylation sequence between the 3′ end of the payload coding sequence and the 5′ end of the 3′ITR.

[0139] In one embodiment, the polyadenylation sequence or “polyA sequence” may range from, absent to about 500 nucleotides in length. The polyadenylation sequence may be, but is not limited to, 1,2, 3, 4. 5, 6, 7, 8, 9, 10, 11, 12, 13, 14, 15, 16, 17, 18, 19, 20, 21, 22, 23, 24, 25, 26, 27, 28, 29, 30, 31, 32, 33, 34, 35, 36, 37, 38, 39, 40, 41, 42, 43, 44, 45, 46, 47, 48, 49, 50, 51, 52, 53, 54, 55, 56, 57, 58, 59, 60, 61, 62, 63, 64, 65, 66, 67, 68, 69, 70, 71, 72, 73, 74, 75, 76, 77, 78, 79, 80, 81, 82, 83, 84, 85, 86, 87, 88, 89, 90, 91, 92, 93, 94, 95, 96, 97, 98, 99, 100, 101, 102, 103, 104. 105, 106, 107, 108, 109, 110, 111, 112, 113, 114, 115, 116, 117, 118, 119, 120, 121, 122, 123, 124, 125, 126, 127, 128, 129, 130, 131, 132, 133, 134, 135, 136, 137, 138, 139, 140, 141, 142, 143, 144, 145, 146, 147, 148, 149, 150, 151, 152, 153, 154, 155, 156, 157, 158, 159, 160, 161, 162, 163, 164, 165, 166, 167, 168, 169, 170, 171, 172, 173, 174, 175, 176, 177, 178, 179, 180, 181, 182, 183, 184, 185, 186, 187, 188, 189, 190, 191, 192, 193, 194, 195, 196. 197, 198, 199, 200, 201, 202, 203, 204, 205, 206, 207, 208, 209, 210, 211, 212, 213, 214, 215, 216, 217, 218, 219, 220, 221, 222, 223, 224, 225, 226, 227, 228, 229, 230, 231, 232, 233, 234, 235, 236, 237, 238, 239, 240, 241, 242, 243, 244, 245, 246, 247, 248, 249, 250, 251, 252, 253, 254, 255, 256, 257, 258, 259, 260, 261, 262, 263, 264, 265, 266, 267, 268, 269, 270, 271, 272, 273, 274, 275, 276, 277, 278, 279, 280, 281, 282, 283, 284, 285, 286, 287, 288, 289, 290, 291, 292, 293, 294, 295, 296, 297, 298, 299, 300, 301, 302, 303, 304, 305, 306, 307, 308, 309, 310, 311, 312, 313, 314, 315, 316, 317, 318, 319, 320, 321, 322, 323, 324, 325, 326, 327, 328, 329, 330, 331, 332, 333, 334, 335, 336, 337, 338, 339, 340, 341, 342, 343, 344, 345, 346, 347, 348, 349, 350, 351, 352, 353, 354, 355, 356, 357, 358, 359, 360, 361, 362, 363, 364, 365, 366, 367, 368, 369, 370, 371, 372, 373, 374, 375, 376, 377, 378, 379, 380, 381, 382, 383, 384, 385, 386, 387, 388, 389, 390, 391, 392, 393, 394, 395, 396, 397, 398, 399, 400, 401, 402, 403, 404, 405, 406, 407, 408, 409, 410, 411, 412, 413, 414, 415, 416, 417, 418, 419, 420, 421, 422, 423. 424, 425, 426, 427, 428, 429, 430, 431, 432, 433, 434, 435, 436, 437, 438, 439, 440, 441, 442, 443, 444, 445, 446, 447, 448, 449, 450, 451, 452, 453, 454, 455, 456, 457, 458, 459, 460, 461, 462, 463, 464, 465, 466, 467, 468, 469, 470, 471, 472, 473, 474, 475, 476, 477, 478, 479, 480, 481, 482, 483, 484, 485, 486, 487, 488, 489, 490, 491, 492, 493, 494, 495, 496, 497, 498, 499, and 500 nucleotides in length.

[0140] In one embodiment the polyadenylation sequence is 50-100 nucleotides in length.

[0141] In one embodiment, the polyadenylation sequence is 50-150 nucleotides in length.

[0142] In one embodiment, the polyadenylation sequence is 50-160 nucleotides in length.

[0143] In one embodiment, the polyadenylation sequence is 50-200 nucleotides in length.

[0144] In one embodiment, the polyadenylation sequence is 60-100 nucleotides in length.

[0145] In one embodiment, the polyadenylation sequence is 60-150 nucleotides in length.

[0146] In one embodiment, the polyadenylation sequence is 60-160 nucleotides in length.

[0147] In one embodiment, the polyadenylation sequence is 60-200 nucleotides in length.

[0148] In one embodiment, the polyadenylation sequence is 70-100 nucleotides in length.

[0149] In one embodiment, the polyadenylation sequence is 70-150 nucleotides in length.

[0150] In one embodiment, the polyadenylation sequence is 70-1.60 nucleotides in length.

[0151] In one embodiment, the polyadenylation sequence is 70-200 nucleotides in length.

[0152] In one embodiment, the polyadenylation sequence is 80-100 nucleotides in length.

[0153] In one embodiment, the polyadenylation sequence is 80-150 nucleotides in length.

[0154] In one embodiment, the poiyadenyiation sequence is 80-160 nucleotides in length.

[0155] In one embodiment, the poiyadenyiation sequence is 80-200 nucleotides in length,

[0156] In one embodiment, the poiyadenyiation sequence is 90-100 nucleotides in length,

[0157] In one embodiment, the poiyadenyiation sequence is 90-150 nucleotides in length.

[0158] In one embodiment, the poiyadenyiation sequence is 90-160 nucleotides in length.

[0159] In one embodiment, the poiyadenyiation sequence is 90-200 nucleotides in length.

### Viral Genome Component: Linkers

[0160] Viral genomes of the invention may be engineered with one or more spacer or linker regions to separate coding or non-coding regions.

[0161] In one embodiment, the payload region of the AAV particle may optionally encode one or more linker sequences. In some cases, the linker may be a peptide linker that may be used to connect the polypeptides encoded by the payload region (i.e., light and heavy antibody chains during expression). Some peptide linkers may be cleaved after expression to separate heavy and light chain domains, allowing assembly of mature antibodies or antibody fragments. Linker cleavage may be enzymatic. In some cases, linkers comprise an enzymatic cleavage site to facilitate intracellular or extracellular cleavage. Some payload regions encode linkers that interrupt polypeptide synthesis during translation of the linker sequence from a mRNA transcript. Such linkers may facilitate the translation of separate protein domains (e.g., heavy and light chain antibody domains) from a single transcript. In some cases, two or more linkers are encoded by a payload region of the viral genome. Non-limiting examples of linkers that may be encoded by the payload region of an AAV particle viral genome are given in Table 2.

TABLE 2
Linkers

| Linker | | SEQ ID NO or |
|---|---|---|
| No. | Description | SEQUENCE |
| L1 | Internal ribosome entry site (IRES) | 899 |
| L2 | Foot and month disease virus 2A (F2A) | 900 |
| L3 | Porcine teschovirus-1 virus 2A (P2A) | 901 |
| L4 | Furin cleavage site (F) | 902 |
| L5 | 5xG4S (SEQ ID NO: 4321) | 903 |
| L6 | 1,4-alpha-glucan-branching enzyme | CHP |
| L7 | 1,4-alpha-glucan-branching enzyme | 904 |
| L8 | 1,4-beta-N-acetylmuramidase | FKK |
| L9 | 1,4-beta-N-acetylmuramidase | 905 |
| L10 | 1,4-beta-N-acetylmuramidase | 906 |
| L11 | 1,4-beta-N-acetylmuramidase | 907 |
| L12 | 1,4-beta-N-acetylmuramidase | 908 |
| L13 | 1,4-beta-N-acetylmuramidase | 909 |
| L14 | 1,4-beta-N-acetylmuramidase | 910 |
| L15 | 1,4-beta-N-acetylmuramidase | 911 |
| L16 | 1,4-beta-N-acetylmuramidase | 912 |
| L17 | 1,4-beta-N-acetylmuramidase | 913 |
| L18 | 1,4-beta-N-acetylmuramidase | 914 |
| L19 | 150aa long hypothetical transcriptional regulator | 915 |
| L20 | 150aa long hypothetical transcriptional regulator | 916 |
| L21 | 1-deoxy-D-xylulose 5-phosphate reductoisomerase | 917 |
| L22 | 1-deoxy-D-xylulose 5-phosphate reductoisomerase | 918 |
| L23 | 1-deoxy-D-xylulose 5-phosphate reductoisomerase | 919 |
| L24 | 1-deoxy-D-xylulose 5-phosphate reductoisomerase | 920 |
| L25 | 235aa long hypothetical biotin-[acetyl-CoA-carboxylase] ligase | 921 |
| L26 | 235aa long hypothetical biotin-[acetyl-CoA-carboxylase] ligase | 922 |
| L27 | 235aa long hypothetical biotin-[acetyl-CoA-carboxylase] ligase | 923 |
| L28 | 2-dehydropantoate 2-reductase | 924 |
| L29 | 2-dehydropantoate 2-reductase | 925 |
| L30 | 2-dehydropantoate 2-reductase | 926 |
| L31 | 2-dehydropantoate 2-reductase | 927 |
| L32 | 2-dehydropantoate 2-reductase | 928 |
| L33 | 2-dehydropantoate 2-reductase | 929 |
| L34 | 2-dehydropantoate 2-reductase, putative | 930 |
| L35 | 2-dehydropantoate 2-reductase, putative | 931 |
| L36 | 4-alpha-glucanotransferase | 932 |
| L37 | 4-alpha-glucanotransferase | 933 |
| L38 | 4-alpha-glucanotransferase | 934 |
| L39 | 4-diphosphocytidyl-2C-methyl-D-erythritol kinase | HAA |
| L40 | 4-diphosphocytidyl-2C-methyl-D-erythritol kinase | 935 |
| L41 | 4-diphosphocytidyl-2C-methyl-D-erythritol kinase | 936 |
| L42 | 4-diphosphocytidyl-2C-methyl-D-erythritol kinase | 937 |
| L43 | 4-diphosphocytidyl-2C-methyl-D-erythritol kinase | 938 |
| L44 | 4-hydroxyphenylpyruvate dioxygenase | 939 |
| L45 | 5-13 amino acids from the N termini of human Ck and CH1 domains linker | 940 |
| L46 | 5-13 amino acids from the N termini of human Ck and CH1 domains linker | ERK |
| L47 | 5-13 amino acids from the N termini of human Ck and CH1 domains linker | 941 |
| L48 | 5-13 amino acids from the N termini of human Ck and CH1 domains linker | 942 |
| L49 | 5-13 amino acids from the N termini of human Ck and CH1 domains linker | 943 |
| L50 | 5-13 amino acids from the N termini of human Ck and CH1 domains linker | 944 |
| L51 | 5′-exonuclease | 945 |
| L52 | 5-methyltetrahydropteroyltriglutamate--homocysteinemethyltransferase | ARL |
| L53 | 5-methyltetrahydropteroyltriglutamate--homocysteinemethyltransferase | 946 |
| L54 | 5-methyltetrahydropteroyltriglutamate--homocysteinemethyltransferase | 947 |
| L55 | 5-methyltetrahydropteroyltriglutamate--homocysteinemethyltransferase | 948 |
| L56 | 5-methyltetrahydropteroyltriglutamate--homocysteinemethyltransferase | 949 |
| L57 | 5′-nucleotidase | 950 |
| L58 | 5′-nucleotidase | 951 |
| L59 | 5′-nucleotidase | 952 |
| L60 | 5′-nucleotidase | 953 |
| L61 | 704aa long hypothetical glycosyltransferase | 954 |
| L62 | 704aa long hypothetical glycosyltransferase | 955 |
| L63 | 80 kDa nuclear cap binding protein | 956 |
| L64 | 80 kDa nuclear cap binding protein | 957 |
| L65 | 80 kDa nuclear cap binding protein | 958 |
| L66 | 80 kDa nuclear cap binding protein | 959 |
| L67 | Acetaldehyde dehydrogenase (acylating) | 960 |
| L68 | Acetaldehyde dehydrogenase (acylating) | 961 |
| L69 | Acetolactate synthase isozyme III small subunit | 962 |
| L70 | Acetylcholine receptor protein, alpha chain | 963 |
| L71 | Acetylcholine receptor protein, beta chain | 964 |
| L72 | Aconitate hydratase 2 | 965 |
| L73 | Aconitate hydratase 2 | 966 |
| L74 | Aconitate hydratase 2 | 967 |
| L75 | Aconitate hydratase 2 | 968 |
| L76 | Aconitate hydratase 2 | 969 |
| L77 | Acriflavine resistance protein B | DWY |
| L78 | Acriflavine resistance protein B | GGS |
| L79 | Acriflavine resistance protein B | IDQ |
| L80 | Acriflavine resistance protein B | NKV |
| L81 | Acriflavine resistance protein B | SEA |
| L82 | Acriflavine resistance protein B | 970 |
| L83 | Acriflavine resistance protein B | 971 |
| L84 | Acriflavine resistance protein B | 972 |
| L85 | Acriflavine resistance protein B | 973 |
| L86 | Acriflavine resistance protein B | 974 |
| L87 | Acriflavine resistance protein B | 975 |
| L88 | Acriflavine resistance protein B | 976 |
| L89 | Acriflavine resistance protein B | 977 |
| L90 | Acriflavine resistance protein B | 978 |
| L91 | Acriflavine resistance protein B | 979 |
| L92 | Acriflavine resistance protein B | 980 |
| L93 | Acriflavine resistance protein B | 981 |
| L94 | Acriflavine resistance protein B | 982 |
| L95 | Acriflavine resistance protein B | 983 |
| L96 | Acriflavine resistance protein B | 984 |
| L97 | Acriflavine resistance protein B | 985 |
| L98 | Acriflavine resistance protein B | 986 |
| L99 | Acriflavine resistance protein B | 987 |
| L100 | Acriflavine resistance protein B | 988 |
| L101 | Acriflavine resistance protein B | 989 |
| L102 | Acriflavine resistance protein B | 990 |
| L103 | Acriflavine resistance protein B | 991 |
| L104 | Acriflavine resistance protein B | 992 |
| L105 | Acriflavine resistance protein B | 993 |
| L106 | Acyl-CoA thioesterase II | 994 |
| L107 | Acyl-CoA thioesterase II | 995 |
| L108 | Acyl-CoA thioesterase II | 996 |
| L109 | Acyl-CoA thioesterase II | 997 |
| L110 | Acyl-CoA thioesterase II | 998 |
| L111 | Acyl-coenzyme A thioesterase 4 | 999 |
| L112 | Acyl-coenzyme A thioesterase 4 | 1000 |
| L113 | Acyl-coenzyme A thioesterase 4 | 1001 |
| L114 | Acyl-coenzyme A thioesterase 4 | 1002 |
| L115 | Acyl-coenzyme A thioesterase 4 | 1003 |
| L116 | Adenine glycosylase | 1004 |
| L117 | Adenylate cyclase | 1005 |
| L118 | Aerolysin | 1006 |
| L119 | Aerolysin | 1007 |
| L120 | Agglutinin | DWK |
| L121 | Agglutinin isolectin 1 | 1008 |
| L122 | Agglutinin isolectin 1 | 1009 |
| L123 | Aldehyde ferredoxin oxidoreductase | 1010 |
| L124 | Aldehyde oxidoreductase | 1011 |
| L125 | Aldehyde oxidoreductase | 1012 |
| L126 | Aldehyde oxidoreductase | 1013 |
| L127 | Aldehyde oxidoreductase | 1014 |
| L128 | Aldehyde oxidoreductase | 1015 |
| L129 | Alkyl hydroperoxide reductase subunit F | 1016 |
| L130 | Alkyl hydroperoxide reductase subunit F | 1017 |
| L131 | Alkyl hydroperoxide reductase subunit F | 1018 |
| L132 | Alkyl hydroperoxide reductase subunit F | 1019 |
| L133 | Alkyl hydroperoxide reductase subunit F | 1020 |
| L134 | Alkyl hydroperoxide reductase subunit F | 1021 |
| L135 | Alkyl hydroperoxide reductase subunit F | 1022 |
| L136 | Alkyl hydroperoxide reductase subunit F | 1023 |
| L137 | Alkyl hydroperoxide reductase subunit F | 1024 |
| L138 | Alkyl hydroperoxide reductase subunit F | 1025 |
| L139 | Allantoicase | 1026 |
| L140 | Allantoicase | 1027 |
| L141 | Alliin lyase 1 | SAV |
| L142 | Alliin lyase 1 | 1028 |
| L143 | Alliin lyase 1 | 1029 |
| L144 | Alliin lyase 1 | 1030 |
| L145 | Alliin lyase 1 | 1031 |
| L146 | Alpha amylase | 1032 |
| L147 | Alpha amylase | 1033 |
| L148 | Alpha-actinin 1 | 1034 |
| L149 | Alpha-actinin 1 | 1035 |
| L150 | Alpha-adaptin C | 1036 |
| L151 | Alpha-amylase | 1037 |
| L152 | Alpha-glucuronidase | LSD |
| L153 | Alpha-glucuronidase | 1038 |
| L154 | Alpha-glucuronidase | 1039 |
| L155 | Alpha-glucuronidase | 1040 |
| L156 | Alpha-glucuronidase | 1041 |
| L157 | Alpha-glucuronidase | 1042 |
| L158 | Alpha-glucuronidase | 1043 |
| L159 | Alpha-glucuronidase | 1044 |
| L160 | Alpha-glucuronidase | 1045 |
| L161 | Alpha-glucuronidase | 1046 |
| L162 | Alpha-glucuronidase | 1047 |
| L163 | Alpha-glucuronidase | 1048 |
| L164 | Alpha-glucuronidase | 1049 |
| L165 | Alpha-glucuronidase | 1050 |
| L166 | Alpha-glucuronidase | 1051 |
| L167 | Alpha-glucuronidase | 1052 |
| L168 | Alpha-glucuronidase | 1053 |
| L169 | Alpha-glucuronidase | 1054 |
| L170 | Alpha-glucuronidase | 1055 |
| L171 | Alpha-glucuronidase | 1056 |
| L172 | Alpha-glucuronidase | 1057 |
| L173 | Alpha-glucuronidase | 1058 |
| L174 | Alpha-L-arabinofuranosidase B | 1059 |
| L175 | Alpha-mannosidase | 1060 |
| L176 | Alr2269 protein | 1061 |
| L177 | AMP nucleosidase | 1062 |
| L178 | AMP nucleosidase | 1063 |
| L179 | AMP nucleosidase | 1064 |
| L180 | Angiopoietin-1 receptor | DAG |
| L181 | Angiopoietin-1 receptor | NSG |
| L182 | Angiopoietin-1 receptor | TSA |
| L183 | Angiopoietin-1 receptor | VPR |
| L184 | Angiopoietin-1 receptor | 1065 |
| L185 | Angiopoietin-1 receptor | 1066 |
| L186 | Angiopoietin-1 receptor | 1067 |
| L187 | Angiopoietin-1 receptor | 1068 |
| L188 | Angiopoietin-1 receptor | 1069 |
| L189 | Angiopoietin-1 receptor | 1070 |
| L190 | Angiopoietin-1 receptor | 1071 |
| L191 | Angiopoietin-1 receptor | 1072 |
| L192 | Angiopoietin-1 receptor | 1073 |
| L193 | Angiopoietin-1 receptor | 1074 |
| L194 | Angiopoietin-1 receptor | 1075 |
| L195 | Angiopoietin-1 receptor | 1076 |
| L196 | Angiopoietin-1 receptor | 1077 |
| L197 | Angiopoietin-1 receptor | 1078 |
| L198 | Angiopoietin-1 receptor | 1079 |
| L199 | Angiopoietin-1 receptor | 1080 |
| L200 | Angiopoietin-1 receptor | 1081 |
| L201 | Angiopoietin-1 receptor | 1082 |
| L202 | Angiopoietin-1 receptor | 1083 |
| L203 | Angiopoietin-1 receptor | 1084 |
| L204 | Angiopoietin-1 receptor | 1085 |
| L205 | Annexin A2 | QNK |
| L206 | Annexin A2 | 1086 |
| L207 | Annexin A2 | 1087 |
| L208 | Anthranilate phosphoribosyltransferase | 1088 |
| L209 | AP-2 complex subunit beta-2 | 1089 |
| L210 | Archaeosine tRNA-guanine transglycosylase | LGI |
| L211 | Archaeosine tRNA-guanine transglycosylase | 1090 |
| L212 | Archaeosine tRNA-guanine transglycosylase | 1091 |
| L213 | Archaeosine tRNA-guanine transglycosylase | 1092 |
| L214 | Archaeosine tRNA-guanine transglycosylase | 1093 |
| L215 | Archaeosine tRNA-guanine transglycosylase | 1094 |
| L216 | Archaeosine tRNA-guanine transglycosylase | 1095 |
| L217 | Archaeosine tRNA-guanine transglycosylase | 1096 |
| L218 | Archeal exosome RNA binding protein rrp4 | 1097 |
| L219 | Archeal exosome RNA binding protein rrp4 | 1098 |
| L220 | Archeal exosome RNA binding protein rrp4 | 1099 |
| L221 | Arginyl-tRNA synthetase | IDY |
| L222 | Arginyl-tRNA synthetase | 1100 |
| L223 | Arginyl-tRNA synthetase | 1101 |
| L224 | Arginyl-tRNA synthetase | 1102 |
| L225 | Arrestin | 1103 |
| L226 | Arrestin | 1104 |
| L227 | Arsenite oxidase | 1105 |
| L228 | Artificial linker | PGS |
| L229 | Artificial linker | ATK |
| L230 | Artificial linker | ASK |
| L231 | Artificial linker | 1106 |
| L232 | Artificial linker | 1107 |
| L233 | Artificial linker | 1108 |
| L234 | Artificial linker | 1109 |
| L235 | Artificial linker | 1110 |
| L236 | Artificial linker | 1111 |
| L237 | ATP phosphoribosyltransferase | ANR |
| L238 | ATP-dependent DNA helicase | YDP |
| L239 | ATP-dependent DNA helicase | 1112 |
| L240 | ATP-dependent DNA helicase | 1113 |
| L241 | ATP-dependent DNA helicase | 1114 |
| L242 | ATP-dependent DNA helicase | 1115 |
| L243 | ATP-dependent DNA helicase | 1116 |
| L244 | ATP-dependent DNA helicase | 1117 |
| L245 | ATP-dependent DNA helicase | 1118 |
| L246 | ATP-dependent DNA helicase | 1119 |
| L247 | AT-rich DNA-binding protein | 1120 |
| L248 | AT-rich DNA-binding protein | 1121 |
| L249 | Axonin-1 | DEG |
| L250 | Axonin-1 | ECF |
| L251 | Axonin-1 | 1122 |
| L252 | Axonin-1 | 1123 |
| L253 | Axonin-1 | 1124 |
| L254 | Axonin-1 | 1125 |
| L255 | Axonin-1 | 1126 |
| L256 | Axonin-1 | 1127 |
| L257 | Axonin-1 | 1128 |
| L258 | Bacilysin biosynthesis protein BacB | 1129 |
| L259 | Bacilysin biosynthesis protein BacB | 1130 |
| L260 | Bacilysin biosynthesis protein BacB | 1131 |
| L261 | Bacilysin biosynthesis protein BacB | 1132 |
| L262 | Bacilysin biosynthesis protein BacB | 1133 |
| L263 | Bacteriophage Mu transposase | 1134 |
| L264 | Bacteriophage Mu transposase | 1135 |
| L265 | Benzoyl-CoA-dihydrodiol lyase | 1136 |
| L266 | Benzoyl-CoA-dihydrodiol lyase | 1137 |
| L267 | Benzoyl-CoA-dihydrodiol lyase | 1138 |
| L268 | Benzoyl-CoA-dihydrodiol lyase | 1139 |
| L269 | Benzoyl-CoA-dihydrodiol lyase | 1140 |
| L270 | Benzoylformate decarboxylase | 1141 |
| L271 | Benzoylformate decarboxylase | 1142 |
| L272 | Benzoylformate decarboxylase | 1143 |
| L273 | Beta-amylase | 1144 |
| L274 | Beta-galactosidase | AIS |
| L275 | Beta-galactosidase | 1145 |
| L276 | Beta-galactosidase | 1146 |
| L277 | Beta-galactosidase | 1147 |
| L278 | Beta-galactosidase | 1148 |
| L279 | Beta-galactosidase | 1149 |
| L280 | Beta-galactosidase | 1150 |
| L281 | Beta-galactosidase | 1151 |
| L282 | Beta-galactosidase | 1152 |
| L283 | Beta-galactosidase | 1153 |
| L284 | Beta-galactosidase | 1154 |
| L285 | Beta-galactosidase | 1155 |
| L286 | Beta-galactosidase | 1156 |
| L287 | Beta-galactosidase | 1157 |
| L288 | Beta-galactosidase | 1158 |
| L289 | Beta-galactosidase | 1159 |
| L290 | Beta-galactosidase | 1160 |
| L291 | Beta-galactosidase | 1161 |
| L292 | Beta-galactosidase | 1162 |
| L293 | Beta-galactosidase | 1163 |
| L294 | Beta-galactosidase | 1164 |
| L295 | Beta-galactosidase | 1165 |
| L296 | Beta-galactosidase | 1166 |
| L297 | Beta-N-acetylhexosaminidase | QRE |
| L298 | Beta-N-acetylhexosaminidase | 1167 |
| L299 | Beta-N-acetylhexosaminidase | 1168 |
| L300 | Beta-N-acetylhexosaminidase | 1169 |
| L301 | Bifunctional NMN adenylyltransferase/Nudix hydrolase | 1170 |
| L302 | Bifunctional purine biosynthesis protein PURH | 1171 |
| L303 | Biliverdin reductase A | EHV |
| L304 | Biliverdin reductase A | LME |
| L305 | Biliverdin reductase A | 1172 |
| L306 | Biliverdin reductase A | 1173 |
| L307 | Biodegradative arginine decarboxylase | TVQ |
| L308 | Biodegradative arginine decarboxylase | 1174 |
| L309 | Biodegradative arginine decarboxylase | 1175 |
| L310 | Biodegradative arginine decarboxylase | 1176 |
| L311 | Biodegradative arginine decarboxylase | 1177 |
| L312 | Biodegradative arginine decarboxylase | 1178 |
| L313 | Biodegradative arginine decarboxylase | 1179 |
| L314 | Biodegradative arginine decarboxylase | 1180 |
| L315 | Biodegradative arginine decarboxylase | 1181 |
| L316 | Biodegradative arginine decarboxylase | 1182 |
| L317 | Biodegradative arginine decarboxylase | 1183 |
| L318 | Biodegradative arginine decarboxylase | 1184 |
| L319 | Biodegradative arginine decarboxylase | 1185 |
| L320 | Biotin carboxylase | 1186 |
| L321 | Bowman-Birk trypsin inhibitor | 1187 |
| L322 | Bpt4 gene 59 helicase assembly protein | KQI |
| L323 | BRCA1-associated RING domain protein 1 | 1188 |
| L324 | BRCA1-associated RING domain protein 1 | 1189 |
| L325 | BRCA1-associated RING domain protein 1 | 1190 |
| L326 | Breast cancer 2 | 1191 |
| L327 | Breast cancer 2 | 1192 |
| L328 | Breast cancer 2 | 1193 |
| L329 | Breast cancer 2 | 1194 |
| L330 | Breast cancer 2 | 1195 |
| L331 | Breast cancer 2 | 1196 |
| L332 | Butyrate response factor 2 | 1197 |
| L333 | C4b-binding protein | YKR |
| L334 | C4b-binding protein | 1198 |
| L335 | C5a peptidase | 1199 |
| L336 | C5a peptidase | 1200 |
| L337 | C5a peptidase | 1201 |
| L338 | C5a peptidase | 1202 |
| L339 | C5a peptidase | 1203 |
| L340 | C5a peptidase | 1204 |
| L341 | C5a peptidase | 1205 |
| L342 | C5a peptidase | 1206 |
| L343 | C5a peptidase | 1207 |
| L344 | C5a peptidase | 1208 |
| L345 | C5a peptidase | 1209 |
| L346 | C5a peptidase | 1210 |
| L347 | C5a peptidase | 1211 |
| L348 | Calcium-binding protein | 1212 |
| L349 | CarA | 1213 |
| L350 | CarA | 1214 |
| L351 | Carbamoyl phosphate synthetase (small chain) | 1215 |
| L352 | Carbamoyl phosphate synthetase (small chain) | 1216 |
| L353 | Carbamoyl phosphate synthetase (small chain) | 1217 |
| L354 | Carbamoyl phosphate synthetase (small chain) | 1218 |
| L355 | Carbamoyl phosphate synthetase (small chain) | 1219 |
| L356 | Carbon monoxide dehydrogenase/acetyl-CoA synthase subunitalpha | 1220 |
| L357 | Carboxypeptidase Gp180 residues 503-882 | HRG |
| L358 | Catabolite activation-like protein | 1221 |
| L359 | Catabolite activation-like protein | 1222 |
| L360 | Catechol 2,3-dioxygenase | 1223 |
| L361 | Cation-independent mannose 6-phosphate receptor | 1224 |
| L362 | CD3 epsilon and gamma ectodomain fragment complex | 1225 |
| L363 | CD3 epsilon and gamma ectodomain fragment complex | 1226 |
| L364 | Cell filamentation protein | SNP |
| L365 | Cell filamentation protein | 1227 |
| L366 | Cell filamentation protein | 1228 |
| L367 | Cellular coagulation factor XIII zymogen | DIT |
| L368 | Cellular coagulation factor XIII zymogen | NSD |
| L369 | Cellular coagulation factor XIII zymogen | TDT |
| L370 | Cellular coagulation factor XIII zymogen | 1229 |
| L371 | Cellular coagulation factor XIII zymogen | 1230 |
| L372 | Cellular coagulation factor XIII zymogen | 1231 |
| L373 | Cellular coagulation factor XIII zymogen | 1232 |
| L374 | Cellular coagulation factor XIII zymogen | 1233 |
| L375 | Cellular coagulation factor XIII zymogen | 1234 |
| L376 | Cellular coagulation factor XIII zymogen | 1235 |
| L377 | Cellular coagulation factor XIII zymogen | 1236 |
| L378 | Cellular coagulation factor XIII zymogen | 1237 |
| L379 | Cellular coagulation factor XIII zymogen | 1238 |
| L380 | Cellular coagulation factor XIII zymogen | 1239 |
| L381 | Cellular coagulation factor XIII zymogen | 1240 |
| L382 | Cellular coagulation factor XIII zymogen | 1241 |
| L383 | Cellular coagulation factor XIII zymogen | 1242 |
| L384 | Cellular coagulation factor XIII zymogen | 1243 |
| L385 | Cellular coagulation factor XIII zymogen | 1244 |
| L386 | Cellular coagulation factor XIII zymogen | 1245 |
| L387 | Cellular coagulation factor XIII zymogen | 1246 |
| L388 | Cellular coagulation factor XIII zymogen | 1247 |
| L389 | Cellulase | 1248 |
| L390 | Cellulase | 1249 |
| L391 | Cellulase | 1250 |
| L392 | Cellulase | 1251 |
| L393 | Cellulase | 1252 |
| L394 | Cellulase | 1253 |
| L395 | Cellulase | 1254 |
| L396 | Cellulase | 1255 |
| L397 | Cellulase | 1256 |
| L398 | Cellulase linker | 1257 |
| L399 | Cellulase linker | 1258 |
| L400 | Cellulase linker | 1259 |
| L401 | Cellulase linker | 1260 |
| L402 | Chaperone protein FimC | KLR |
| L403 | Chaperone protein FimC | QAA |
| L404 | Chaperone protein FimC | 1261 |
| L405 | Chaperone protein FimC | 1262 |
| L406 | Chaperone protein HscB | RHP |
| L407 | Chaperone protein HscB | 1263 |
| L408 | CheB methylesterase | 1264 |
| L409 | CheB methylesterase | 1265 |
| L410 | CheB methylesterase | 1266 |
| L411 | Chelatase, putative | 1267 |
| L412 | Chemotaxis receptor methyltransferase cheR | 1268 |
| L413 | Chemotaxis receptor methyltransferase cheR | 1269 |
| L414 | Chemotaxis receptor methyltransferase cheR | 1270 |
| L415 | Cholesterol oxidase | 1271 |
| L416 | Cholesterol oxidase | 1272 |
| L417 | Cholesterol oxidase | 1273 |
| L418 | Cholesterol oxidase | 1274 |
| L419 | Cholesterol oxidase | 1275 |
| L420 | Cholesterol oxidase | 1276 |
| L421 | Cholesterol oxidase | 1277 |
| L422 | Cholesterol oxidase | 1278 |
| L423 | Cholesterol oxidase | 1279 |
| L424 | Cholesterol oxidase | 1280 |
| L425 | Cholesterol oxidase | 1281 |
| L426 | Cholesterol oxidase | 1282 |
| L427 | Chromatin structure-remodeling complex protein RSC4 | KNL |
| L428 | Chromatin structure-remodeling complex protein RSC4 | 1283 |
| L429 | Chromatin structure-remodeling complex protein RSC4 | 1284 |
| L430 | Chromatin structure-remodeling complex protein RSC4 | 1285 |
| L431 | Chromodomain-helicase-DNA-binding protein 1 | 1286 |
| L432 | Chromodomain-helicase-DNA-binding protein 1 | 1287 |
| L433 | Cleavable disulfide | 1288 |
| L434 | Cleavable disulfide | 1289 |
| L435 | Cleavable disulfide | 1290 |
| L436 | Cleavable disulfide | 1291 |
| L437 | Cleavable disulfide | 1292 |
| L438 | Cleavable disulfide | 1293 |
| L439 | Cleavable disulfide | 1294 |
| L440 | Cleavable disulfide | 1295 |
| L441 | Cleavable disulfide | 1296 |
| L442 | Cleavable disulfide | 1297 |
| L443 | Cleavable disulfide | 1298 |
| L444 | Colicin Ia | 1299 |
| L445 | Collagen adhesin | 1300 |
| L446 | Complement C3 beta chain | 1301 |
| L447 | Complement C3 beta chain | 1302 |
| L448 | Complement C3 beta chain | 1303 |
| L449 | Complement C3 beta chain | 1304 |
| L450 | Complement decay-accelerating factor | EIY |
| L451 | Complement factor H | KRP |
| L452 | Complement receptor type 2 | 1305 |
| L453 | Conserved hypothetical protein | 1306 |
| L454 | Conserved hypothetical protein MTH1747 | DIR |
| L455 | Conserved hypothetical protein MTH1747 | 1307 |
| L456 | Conserved hypothetical protein MTH1747 | 1308 |
| L457 | Conserved hypothetical protein MTH1747 | 1309 |
| L458 | Conserved hypothetical protein MTH1747 | 1310 |
| L459 | Conserved hypothetical protein MTH1747 | 1311 |
| L460 | Conserved hypothetical protein MTH1747 | 1312 |
| L461 | Conserved hypothetical protein MTH1747 | 1313 |
| L462 | Conserved protein (MTH177) | 1314 |
| L463 | Creatine amidinohydrolase | 1315 |
| L464 | Cruciferin | 1316 |
| L465 | Cruciferin | 1317 |
| L466 | Cruciferin | 1318 |
| L467 | Cruciferin | 1319 |
| L468 | Cruciferin | 1320 |
| L469 | Cruciferin | 1321 |
| L470 | Cruciferin | 1322 |
| L471 | CSL3 | 1323 |
| L472 | CSL3 | 1324 |
| L473 | CTP synthase | 1325 |
| L474 | CTP synthase | 1326 |
| L475 | Cullin homolog | HKN |
| L476 | Cullin homolog | 1327 |
| L477 | Cullin homolog | 1328 |
| L478 | Cullin homolog | 1329 |
| L479 | Cullin homolog | 1330 |
| L480 | Cullin homolog | 1331 |
| L481 | Cyclin A2 | 1332 |
| L482 | Cysteine-rich secretory protein | 1333 |
| L483 | Cytidine deaminase | 1334 |
| L484 | Cytidine deaminase | 1335 |
| L485 | Cytidine deaminase | 1336 |
| L486 | Cytochrome b-c1 complex subunit Rieske, mitochondrial | 1337 |
| L487 | Cytochrome c oxidase subunit 2 | QAV |
| L488 | Cytochrome c oxidase subunit 2 | 1338 |
| L489 | Cytochrome c oxidase subunit 2 | 1339 |
| L490 | Cytochrome c oxidase subunit 2 | 1340 |
| L491 | Cytochrome c oxidase subunit 2 | 1341 |
| L492 | Cytochrome c4 | GGK |
| L493 | Cytochrome c4 | QGM |
| L494 | D-aminopeptidase | 1342 |
| L495 | DDMC | 1343 |
| L496 | DDMC | 1344 |
| L497 | Deltex protein | 1345 |
| L498 | Deoxyuridine 5′-triphosphate nucleotidohydrolase | 1346 |
| L499 | Diaminopimelate epimerase | 1347 |
| L500 | Diaminopimelate epimerase | 1348 |
| L501 | Diaminopimelate epimerase | 1349 |
| L502 | Di-heme peroxidase | SGC |
| L503 | Di-heme peroxidase | 1350 |
| L504 | Dihydropyrimidine dehydrogenase | 1351 |
| L505 | Dihydropyrimidine dehydrogenase | 1352 |
| L506 | Dihydropyrimidine dehydrogenase | 1353 |
| L507 | Dihydropyrimidine dehydrogenase | 1354 |
| L508 | Dihydropyrimidine dehydrogenase | 1355 |
| L509 | Dihydropyrimidine dehydrogenase | 1356 |
| L510 | Dihydropyrimidine dehydrogenase | 1357 |
| L511 | Dihydropyrimidine dehydrogenase | 1358 |
| L512 | Dihydropyrimidine dehydrogenase | 1359 |
| L513 | Dihydropyrimidine dehydrogenase | 1360 |
| L514 | Dihydropyrimidine dehydrogenase | 1361 |
| L515 | Dihydropyrimidine dehydrogenase | 1362 |
| L516 | Dihydropyrimidine dehydrogenase | 1363 |
| L517 | Dihydropyrimidine dehydrogenase | 1364 |
| L518 | Dihydropyrimidine dehydrogenase | 1365 |
| L519 | Dihydropyrimidine dehydrogenase | 1366 |
| L520 | Dihydropyrimidine dehydrogenase | 1367 |
| L521 | Dihydropyrimidine dehydrogenase | 1368 |
| L522 | Dihydropyrimidine dehydrogenase | 1369 |
| L523 | Dihydropyrimidine dehydrogenase | 1370 |
| L524 | Dihydropyrimidine dehydrogenase | 1371 |
| L525 | Dihydropyrimidine dehydrogenase | 1372 |
| L526 | Dihydropyrimidine dehydrogenase | 1373 |
| L527 | Dihydropyrimidine dehydrogenase | 1374 |
| L528 | Dihydropyrimidine dehydrogenase | 1375 |
| L529 | Dihydropyrimidine dehydrogenase | 1376 |
| L530 | Dihydropyrimidine dehydrogenase | 1377 |
| L531 | Dihydropyrimidine dehydrogenase | 1378 |
| L532 | Dihydropyrimidine dehydrogenase | 1379 |
| L533 | Dihydropyrimidine dehydrogenase | 1380 |
| L534 | Dihydropyrimidine dehydrogenase | 1381 |
| L535 | Discoidin-1 subunit A | 1382 |
| L536 | Discoidin-1 subunit A | 1383 |
| L537 | Discoidin-1 subunit A | 1384 |
| L538 | Dissimilatory copper-containing nitritereductase | 1385 |
| L539 | D-lactate dehydrogenase | DTF |
| L540 | D-lactate dehydrogenase | 1386 |
| L541 | D-lactate dehydrogenase | 1387 |
| L542 | D-lactate dehydrogenase | 1388 |
| L543 | D-lactate dehydrogenase | 1389 |
| L544 | D-lactate dehydrogenase | 1390 |
| L545 | D-lactate dehydrogenase | 1391 |
| L546 | DNA damage-binding protein 1 | LCA |
| L547 | DNA damage-binding protein 1 | 1392 |
| L548 | DNA damage-binding protein 1 | 1393 |
| L549 | DNA damage-binding protein 1 | 1394 |
| L550 | DNA damage-binding protein 1 | 1395 |
| L551 | DNA damage-binding protein 1 | 1396 |
| L552 | DNA damage-binding protein 1 | 1397 |
| L553 | DNA damage-binding protein 1 | 1398 |
| L554 | DNA damage-binding protein 1 | 1399 |
| L555 | DNA damage-binding protein 1 | 1400 |
| L556 | DNA damage-binding protein 1 | 1401 |
| L557 | DNA damage-binding protein 1 | 1402 |
| L558 | DNA damage-binding protein 1 | 1403 |
| L559 | DNA damage-binding protein 1 | 1404 |
| L560 | DNA damage-binding protein 1 | 1405 |
| L561 | DNA damage-binding protein 1 | 1406 |
| L562 | DNA damage-binding protein 1 | 1407 |
| L563 | DNA damage-binding protein 1 | 1408 |
| L564 | DNA damage-binding protein 1 | 1409 |
| L565 | DNA damage-binding protein 1 | 1410 |
| L566 | DNA damage-binding protein 1 | 1411 |
| L567 | DNA damage-binding protein 1 | 1412 |
| L568 | DNA damage-binding protein 1 | 1413 |
| L569 | DNA gyrase B | ALS |
| L570 | DNA gyrase B | 1414 |
| L571 | DNA gyrase B | 1415 |
| L572 | DNA gyrase B | 1416 |
| L573 | DNA gyrase B | 1417 |
| L574 | DNA gyrase B | 1418 |
| L575 | DNA gyrase B | 1419 |
| L576 | DNA gyrase B | 1420 |
| L577 | DNA gyrase B | 1421 |
| L578 | DNA gyrase B | 1422 |
| L579 | DNA gyrase B | 1423 |
| L580 | DNA gyrase B | 1424 |
| L581 | DNA ligase | 1425 |
| L582 | DNA ligase | 1426 |
| L583 | DNA ligase | 1427 |
| L584 | DNA ligase | 1428 |
| L585 | DNA ligase | 1429 |
| L586 | DNA mismatch repair protein MutS | MDA |
| L587 | DNA mismatch repair protein MutS | SII |
| L588 | DNA mismatch repair protein MutS | 1430 |
| L589 | DNA mismatch repair protein MutS | 1431 |
| L590 | DNA mismatch repair protein MutS | 1432 |
| L591 | DNA mismatch repair protein MutS | 1433 |
| L592 | DNA mismatch repair protein MutS | 1434 |
| L593 | DNA polymerase | FSP |
| L594 | DNA polymerase | RQF |
| L595 | DNA polymerase | 1435 |
| L596 | DNA polymerase | 1436 |
| L597 | DNA polymerase | 1437 |
| L598 | DNA polymerase | 1438 |
| L599 | DNA polymerase | 1439 |
| L600 | DNA polymerase | 1440 |
| L601 | DNA polymerase | 1441 |
| L602 | DNA polymerase | 1442 |
| L603 | DNA polymerase alpha subunit B | 1443 |
| L604 | DNA polymerase alpha subunit B | 1444 |
| L605 | DNA polymerase alpha subunit B | 1445 |
| L606 | DNA polymerase alpha subunit B | 1446 |
| L607 | DNA polymerase alpha subunit B | 1447 |
| L608 | DNA polymerase alpha subunit B | 1448 |
| L609 | DNA polymerase alpha subunit B | 1449 |
| L610 | DNA polymerase alpha subunit B | 1450 |
| L611 | DNA polymerase alpha subunit B | 1451 |
| L612 | DNA polymerase alpha subunit B | 1452 |
| L613 | DNA polymerase eta | ALS |
| L614 | DNA polymerase eta | 1453 |
| L615 | DNA polymerase eta | 1454 |
| L616 | DNA polymerase eta | 1455 |
| L617 | DNA polymerase eta | 1456 |
| L618 | DNA polymerase eta | 1457 |
| L619 | DNA polymerase I | AGV |
| L620 | DNA polymerase I | ELE |
| L621 | DNA polymerase I | 1458 |
| L622 | DNA primase | DHK |
| L623 | DNA primase | 1459 |
| L624 | DNA primase | 1460 |
| L625 | DNA primase | 1461 |
| L626 | DNA primase | 1462 |
| L627 | DNA primase | 1463 |
| L628 | DNA primase | 1464 |
| L629 | DNA primase | 1465 |
| L630 | DNA primase/helicase | AGY |
| L631 | DNA primase/helicase | 1466 |
| L632 | DNA primase/helicase | 1467 |
| L633 | DNA primase/helicase | 1468 |
| L634 | DNA primase/helicase | 1469 |
| L635 | DNA primase/helicase | 1470 |
| L636 | DNA primase/helicase | 1471 |
| L637 | DNA primase/helicase | 1472 |
| L638 | DNA primase/helicase | 1473 |
| L639 | DNA primase/helicase | 1474 |
| L640 | DNA primase/helicase | 1475 |
| L641 | DNA topoisomerase 2 | EES |
| L642 | DNA topoisomerase 2 | IPI |
| L643 | DNA topoisomerase 2 | KEL |
| L644 | DNA topoisomerase 2 | 1476 |
| L645 | DNA topoisomerase 2 | 1477 |
| L646 | DNA topoisomerase 2 | 1478 |
| L647 | DNA topoisomerase 2 | 1479 |
| L648 | DNA topoisomerase 2 | 1480 |
| L649 | DNA topoisomerase 2 | 1481 |
| L650 | DNA topoisomerase 2 | 1482 |
| L651 | DNA topoisomerase 2 | 1483 |
| L652 | DNA topoisomerase 2 | 1484 |
| L653 | DNA topoisomerase I | 1485 |
| L654 | DNA topoisomerase I | 1486 |
| L655 | DNA topoisomerase I | 1487 |
| L656 | DNA topoisomerase II, alpha isozyme | PDL |
| L657 | DNA topoisomerase II, alpha isozyme | 1488 |
| L658 | DNA topoisomerase II, alpha isozyme | 1489 |
| L659 | DNA topoisomerase II, alpha isozyme | 1490 |
| L660 | DNA topoisomerase II, alpha isozyme | 1491 |
| L661 | DNA topoisomerase II, alpha isozyme | 1492 |
| L662 | DNA topoisomerase II, alpha isozyme | 1493 |
| L663 | DNA topoisomerase II, alpha isozyme | 1494 |
| L664 | DNA topoisomerase II, alpha isozyme | 1495 |
| L665 | DNA topoisomerase VI A subunit | 1496 |
| L666 | DNA topoisomerase VI A subunit | 1497 |
| L667 | DNA topoisomerase VI A subunit | 1498 |
| L668 | DNA topoisomerase VI A subunit | 1499 |
| L669 | DNA topoisomerase VI A subunit | 1500 |
| L670 | DNA topoisomerase VI A subunit | 1501 |
| L671 | DNA-3-methyladenine glycosylase 2 | 1502 |
| L672 | DNA-binding response regulator MtrA | 1503 |
| L673 | DNA-directed RNA polymerase beta chain | 1504 |
| L674 | DNA-directed RNA polymerase beta chain | 1505 |
| L675 | DNA-directed RNA polymerase beta chain | 1506 |
| L676 | DNA-directed RNA polymerase beta chain | 1507 |
| L677 | DNA-directed RNA polymerase beta chain | 1508 |
| L678 | DNA-directed RNA polymerase beta chain | 1509 |
| L679 | DNA-directed RNA polymerase beta chain | 1510 |
| L680 | DNA-directed RNA polymerase beta chain | 1511 |
| L681 | DNA-directed RNA polymerase II 14.2 kDa polypeptide | 1512 |
| L682 | DNA-directed RNA polymerase II 14.2 kDa polypeptide | 1513 |
| L683 | DNA-directed RNA polymerase, subunit E′ (rpoe1) | 1514 |
| L684 | DNA-directed RNA polymerase, subunit E′ (rpoe1) | 1515 |
| L685 | DNA-directed RNA polymerases I, II, and III 27 kDa polypeptide | ITP |
| L686 | DNA-directed RNA polymerases I, II, and III 27 kDa polypeptide | 1516 |
| L687 | DNA-directed RNA polymerases I, II, and III 27 kDa polypeptide | 1517 |
| L688 | DNA-directed RNA polymerases I, II, and III 27 kDa polypeptide | 1518 |
| L689 | DNA-directed RNA polymerases I, II, and III 27 kDa polypeptide | 1519 |
| L690 | Drosophila neuroglian | 1520 |
| L691 | Dystroglycan | 1521 |
| L692 | Dystrophin | 1522 |
| L693 | Dystrophin | 1523 |
| L694 | Dystrophin | 1524 |
| L695 | Dystrophin | 1525 |
| L696 | Dystrophin | 1526 |
| L697 | Dystrophin | 1527 |
| L698 | Dystrophin | 1528 |
| L699 | E2A DNA-binding protein | 1529 |
| L700 | E2A DNA-binding protein | 1530 |
| L701 | E3 sumo-protein ligase SIZ1 | 1531 |
| L702 | E3 sumo-protein ligase SIZ1 | 1532 |
| L703 | E3 sumo-protein ligase SIZ1 | 1533 |
| L704 | Early switch protein xol-1 2.2k splice form | 1534 |
| L705 | EGF-like module containing mucin-like hormonereceptor-like 2 precursor | 1535 |
| L706 | EGF-like module containing mucin-like hormonereceptor-like 2 precursor | 1536 |
| L707 | Elongation factor 1-gamma 1 | 1537 |
| L708 | Elongation factor 1-gamma 1 | 1538 |
| L709 | Elongation factor g | 1539 |
| L710 | Elongation factor G | 1540 |
| L711 | Elongation factor G | 1541 |
| L712 | Elongation factor G | 1542 |
| L713 | Elongation factor G | 1543 |
| L714 | Elongation factor G | 1544 |
| L715 | Elongation factor G | 1545 |
| L716 | Elongation factor G | 1546 |
| L717 | Elongation factor G | 1547 |
| L718 | Elongation factor G | 1548 |
| L719 | Elongation factor P | 1549 |
| L720 | Elongation factor Ts | 1550 |
| L721 | Elongation factor Ts | 1551 |
| L722 | Elongation factor Ts | 1552 |
| L723 | Elongation factor Tu (ef-Tu) | 1553 |
| L724 | Endoglucanase | 1554 |
| L725 | Endonuclease PI-SceI | 1555 |
| L726 | Endonuclease PI-SceI | 1556 |
| L727 | Endonuclease PI-SceI | 1557 |
| L728 | Endonuclease PI-SceI | 1558 |
| L729 | Endonuclease PI-SceI | 1559 |
| L730 | Endonuclease PI-SceI | 1560 |
| L731 | Endonuclease PI-SceI | 1561 |
| L732 | Endonuclease PI-SceI | 1562 |
| L733 | Endonuclease PI-SceI | 1563 |
| L734 | Enterobactin synthetase component F | 1564 |
| L735 | Enterobactin synthetase component F | 1565 |
| L736 | Enterobactin synthetase component F | 1566 |
| L737 | Enterobactin synthetase component F | 1567 |
| L738 | Enterobactin synthetase component F | 1568 |
| L739 | Enterobactin synthetase component F | 1569 |
| L740 | Enterobactin synthetase component F | 1570 |
| L741 | Enterobactin synthetase component F | 1571 |
| L742 | Enterobactin synthetase component F | 1572 |
| L743 | Enterochelin esterase | 1573 |
| L744 | Epo receptor | EVV |
| L745 | Epo receptor | 1574 |
| L746 | Erythrocyte binding antigen region II | 1575 |
| L747 | Erythrocyte binding antigen region II | 1576 |
| L748 | Erythrocyte binding antigen region II | 1577 |
| L749 | Erythrocyte binding antigen region II | 1578 |
| L750 | Erythrocyte binding antigen region II | 1579 |
| L751 | E-selectin | 1580 |
| L752 | Esterase EstA | SAP |
| L753 | Esterase EstA | 1581 |
| L754 | Esterase EstA | 1582 |
| L755 | Eukaryotic peptide chain release factor GTP-binding subunit | 1583 |
| L756 | Exonuclease I | RQP |
| L757 | Exonuclease I | 1584 |
| L758 | FascIclIn I | SDP |
| L759 | FascIclIn I | 1585 |
| L760 | Fibrillin-1 | 1586 |
| L761 | Fibrillin-1 | 1587 |
| L762 | Fibrillin-1 | 1588 |
| L763 | Fibrillin-1 | 1589 |
| L764 | Fibrillin-1 | 1590 |
| L765 | Fibronectin | 1591 |
| L766 | Fibronectin | 1592 |
| L767 | Fibronectin | 1593 |
| L768 | Flagellar hook protein FlgE | 1594 |
| L769 | Flagellar hook protein FlgE | 1595 |
| L770 | Flagellar hook protein FlgE | 1596 |
| L771 | Flagellar hook protein FlgE | 1597 |
| L772 | Flagellar hook protein FlgE | 1598 |
| L773 | Flagellar hook protein FlgE | 1599 |
| L774 | Flagellar hook protein FlgE | 1600 |
| L775 | Flavohemoprotein | 1601 |
| L776 | Flexible G/S rich linker | G |
| L777 | Flexible G/S rich linker | S |
| L778 | Flexible G/S rich linker | GG |
| L779 | Flexible G/S rich linker | GS |
| L780 | Flexible G/S rich linker | GGS |
| L781 | Flexible G/S rich linker | GGG |
| L782 | Flexible G/S rich linker | 1602 |
| L783 | Flexible G/S rich linker | 1603 |
| L784 | Flexible G/S rich linker | 1604 |
| L785 | Flexible G/S rich linker | 1605 |
| L786 | Flexible G/S rich linker | 1606 |
| L787 | Flexible G/S rich linker | 1607 |
| L788 | Flexible G/S rich linker | 1608 |
| L789 | Flexible G/S rich linker | 1609 |
| L790 | Flexible G/S rich linker | 1610 |
| L791 | Flexible G/S rich linker | 1611 |
| L792 | Flexible G/S rich linker | 1612 |
| L793 | Flexible G/S rich linker | 1613 |
| L794 | Flexible G/S rich linker | 1614 |
| L795 | Flexible G/S rich linker | 1615 |
| L796 | Focal adhesion kinase 1 | 1616 |
| L797 | FolC bifunctional protein | 1617 |
| L798 | FolC bifunctional protein | 1618 |
| L799 | FolC bifunctional protein | 1619 |
| L800 | FolC bifunctional protein | 1620 |
| L801 | FolC bifunctional protein | 1621 |
| L802 | FolC bifunctional protein | 1622 |
| L803 | FolC bifunctional protein | 1623 |
| L804 | FolC bifunctional protein | 1624 |
| L805 | Follistatin | 1625 |
| L806 | Formate dehydrogenase (large subunit) | YDK |
| L807 | Formate dehydrogenase (large subunit) | 1626 |
| L808 | Formate dehydrogenase (large subunit) | 1627 |
| L809 | Formate dehydrogenase (large subunit) | 1628 |
| L810 | Formate dehydrogenase (large subunit) | 1629 |
| L811 | Formate dehydrogenase (large subunit) | 1630 |
| L812 | Formate dehydrogenase (large subunit) | 1631 |
| L813 | Formate dehydrogenase (large subunit) | 1632 |
| L814 | Formate dehydrogenase (large subunit) | 1633 |
| L815 | Formate dehydrogenase (large subunit) | 1634 |
| L816 | Formate dehydrogenase (large subunit) | 1635 |
| L817 | Formate dehydrogenase (large subunit) | 1636 |
| L818 | Formate dehydrogenase (large subunit) | 1637 |
| L819 | Formate dehydrogenase, nitrate-inducible major subunit | 1638 |
| L820 | Formate dehydrogenase, nitrate-inducible, major subunit | 1639 |
| L821 | Formate dehydrogenase, nitrate-inducible, major subunit | 1640 |
| L822 | Formate dehydrogenase, nitrate-inducible, major subunit | 1641 |
| L823 | Formate dehydrogenase, nitrate-inducible, major subunit | 1642 |
| L824 | Formate dehydrogenase, nitrate-inducible, major subunit | 1643 |
| L825 | Formate dehydrogenase, nitrate-inducible, major subunit | 1644 |
| L826 | Formate dehydrogenase, nitrate-inducible, major subunit | 1645 |
| L827 | Formate dehydrogenase, nitrate-inducible, major subunit | 1646 |
| L828 | Formate dehydrogenase, nitrate-inducible, major subunit | 1647 |
| L829 | Formate dehydrogenase, nitrate-inducible, major subunit | 1648 |
| L830 | Formate dehydrogenase, nitrate-inducible, major subunit | 1649 |
| L831 | Formate dehydrogenase, nitrate-inducible, major subunit | 1650 |
| L832 | Formate dehydrogenase, nitrate-inducible, major subunit | 1651 |
| L833 | Fumarylacetoacetate hydrolase | 1652 |
| L834 | Galactose oxidase | GSV |
| L835 | Galactose oxidase | GWK |
| L836 | Galactose oxidase | IAE |
| L837 | Galactose oxidase | KRQ |
| L838 | Galactose oxidase | QDT |
| L839 | Galactose oxidase | TPN |
| L840 | Galactose oxidase | 1653 |
| L841 | Galactose oxidase | 1654 |
| L842 | Galactose oxidase | 1655 |
| L843 | Galactose oxidase | 1656 |
| L844 | Galactose oxidase | 1657 |
| L845 | Galactose oxidase | 1658 |
| L846 | Galactose oxidase | 1659 |
| L847 | Galactose oxidase | 1660 |
| L848 | Galactose oxidase | 1661 |
| L849 | Galactose oxidase | 1662 |
| L850 | Galactose oxidase | 1663 |
| L851 | Galactose oxidase | 1664 |
| L852 | Galactose oxidase | 1665 |
| L853 | Galactose oxidase | 1666 |
| L854 | Galactose oxidase | 1667 |
| L855 | Galactose oxidase | 1668 |
| L856 | Galactose oxidase | 1669 |
| L857 | Galactose oxidase | 1670 |
| L858 | Galactose oxidase | 1671 |
| L859 | Galactose oxidase | 1672 |
| L860 | Galactose oxidase | 1673 |
| L861 | Galactose oxidase | 1674 |
| L862 | Galactose oxidase | 1675 |
| L863 | Galactose oxidase | 1676 |
| L864 | Gamma B-crystallin | 1677 |
| L865 | Gamma-delta T-cell receptor | 1678 |
| L866 | Gelation factor | DSS |
| L867 | Gelation factor | 1679 |
| L868 | Gelation factor | 1680 |
| L869 | Gelation factor | 1681 |
| L870 | Gene activator alpha | 1682 |
| L871 | Gingipain R | 1683 |
| L872 | Glucodextranase | 1684 |
| L873 | Glucodextranase | 1685 |
| L874 | Glucodextranase | 1686 |
| L875 | Glucosamine-fructose-6-phosphate aminotransferase | YEQ |
| L876 | Glucosamine-fructose-6-phosphate aminotransferase | 1687 |
| L877 | Glucosamine-fructose-6-phosphate aminotransferase | 1688 |
| L878 | Glucosamine-fructose-6-phosphate aminotransferase | 1689 |
| L879 | Glucosamine-fructose-6-phosphate aminotransferase | 1690 |
| L880 | Glucosamine-fructose-6-phosphate aminotransferase | 1691 |
| L881 | Glucosamine-fructose-6-phosphate aminotransferase | 1692 |
| L882 | Glucosamine-fructose-6-phosphate aminotransferase | 1693 |
| L883 | Glucosamine-fructose-6-phosphate aminotransferase | 1694 |
| L884 | Glucosamine-fructose-6-phosphate aminotransferase | 1695 |
| L885 | Glucosamine-fructose-6-phosphate aminotransferase | 1696 |
| L886 | Glucose-1-phosphate adenylyltransferase small subunit | 1697 |
| L887 | Glucose-1-phosphate adenylyltransferase small subunit | 1698 |
| L888 | Glucose-6-phosphate isomerase | KNA |
| L889 | Glucose-6-phosphate isomerase | VGF |
| L890 | Glucose-6-phosphate isomerase | 1699 |
| L891 | Glucose-6-phosphate isomerase | 1700 |
| L892 | Glucose-6-phosphate isomerase, conjectural | 1701 |
| L893 | Glutamate dehydrogenase | 1702 |
| L894 | Glutamate dehydrogenase | 1703 |
| L895 | Glutamate receptor interacting protein | 1704 |
| L896 | Glutamate synthase [NADPH] large chain | 1705 |
| L897 | Glutamate synthase [NADPH] large chain | 1706 |
| L898 | Glutamate synthase [NADPH] large chain | 1707 |
| L899 | Glutamate synthase [NADPH] large chain | 1708 |
| L900 | Glutamate synthase [NADPH] large chain | 1709 |
| L901 | Glutamate synthase [NADPH] large chain | 1710 |
| L902 | Glutamate synthase [NADPH] large chain | 1711 |
| L903 | Glutamine synthetase | 1712 |
| L904 | Glutamine synthetase | 1713 |
| L905 | Glutamyl-tRNA synthetase | 1714 |
| L906 | Glutamyl-tRNA synthetase | 1715 |
| L907 | Glutamyl-tRNA synthetase | 1716 |
| L908 | Glutamyl-tRNA synthetase | 1717 |
| L909 | Glutamyl-tRNA synthetase | 1718 |
| L910 | Glutamyl-tRNA synthetase | 1719 |
| L911 | Glutamyl-tRNA synthetase | 1720 |
| L912 | Glutamyl-tRNA synthetase | 1721 |
| L913 | Glutaredoxin 2 | 1722 |
| L914 | Glutathione S-transferase | 1723 |
| L915 | Glutathione S-transferase | 1724 |
| L916 | Glutathione S-transferase | 1725 |
| L917 | Glutathione S-transferase 1-6 | 1726 |
| L918 | Glutathione S-transferase A1 | 1727 |
| L919 | Glutathione S-transferase I | NKP |
| L920 | Glutathione S-transferase I | 1728 |
| L921 | Glutathione synthetase | 1729 |
| L922 | Glutathione transferase GST1-4 | 1730 |
| L923 | Glutathione transferase GST1-4 | 1731 |
| L924 | Glutathione transferase sigma class | 1732 |
| L925 | Glycerol-3-phosphate dehydrogenase [NAD(P)+] | 1733 |
| L926 | Glycine cleavage system transcriptionalrepressor, putative | 1734 |
| L927 | Glycolipid-anchored surface protein 2 | 1735 |
| L928 | Glycolipid-anchored surface protein 2 | 1736 |
| L929 | Glycyl-tRNA synthetase | KFA |
| L930 | Glycyl-tRNA synthetase | 1737 |
| L931 | Glycyl-tRNA synthetase | 1738 |
| L932 | Glycyl-tRNA synthetase | 1739 |
| L933 | Glycyl-tRNA synthetase | 1740 |
| L934 | Glycyl-tRNA synthetase | 1741 |
| L935 | Glycyl-tRNA synthetase | 1742 |
| L936 | Glycyl-tRNA synthetase | 1743 |
| L937 | Glycyl-tRNA synthetase | 1744 |
| L938 | Glycyl-tRNA synthetase | 1745 |
| L939 | Growth hormone receptor | 1746 |
| L940 | Growth hormone receptor | 1747 |
| L941 | Harmonin | 1748 |
| L942 | HasR protein | 1749 |
| L943 | HasR protein | 1750 |
| L944 | Hemin transport protein HemS | 1751 |
| L945 | Hemin transport protein HemS | 1752 |
| L946 | Hemin transport protein HemS | 1753 |
| L947 | Hemoglobin | 1754 |
| L948 | Hemolytic lectin CEL-iii | 1755 |
| L949 | Hepatocyte nuclear factor 6 | 1756 |
| L950 | Histidyl-tRNA synthetase | 1757 |
| L951 | HNH homing endonuclease | 1758 |
| L952 | HNH homing endonuclease | 1759 |
| L953 | HNH homing endonuclease | 1760 |
| L954 | Homoserine dehydrogenase | 1761 |
| L955 | Homoserine kinase | 1762 |
| L956 | Homosetine kinase | 1763 |
| L957 | Homoserine kinase | 1764 |
| L958 | Homoserine kinase | 1765 |
| L959 | HTH-type transcriptional regulator MqsA (Ygit/B3021) | 1766 |
| L960 | HTH-type transcriptional repressor YvoA | 1767 |
| L961 | HTH-type transcriptional repressor YvoA | 1768 |
| L962 | Human IgG1 middle hinge linker | 1769 |
| L963 | Human IgG1 upper hinge linker | 1770 |
| L964 | Human IgG3 middle hinge linker | 1771 |
| L965 | Human IgG3m15 middle hinge linker | 1772 |
| L966 | Human IgG4 lower hinge linker | 1773 |
| L967 | Human IgG4 middle hinge linker | 1774 |
| L968 | Human IgG4 upper hinge linker | 1775 |
| L969 | Hybrid cluster protein | 1776 |
| L970 | Hybrid cluster protein | 1777 |
| L971 | Hybrid cluster protein | 1778 |
| L972 | Hybrid cluster protein | 1779 |
| L973 | Hybrid cluster protein | 1780 |
| L974 | Hypothetical conserved protein, GK1056 | 1781 |
| L975 | Hypothetical membrane spanning protein | 1782 |
| L976 | Hypothetical methylmalonyl-CoA decarboxylase alpha subunit | 1783 |
| L977 | Hypothetical methylmalonyl-CoA decarboxylase alpha subunit | 1784 |
| L978 | Hypothetical methylmalonyl-CoA decarboxylase alpha subunit | 1785 |
| L979 | Hypothetical methylmalonyl-CoA decarboxylase alpha subunit | 1786 |
| L980 | Hypothetical methylmalonyl-CoA decarboxylase alpha subunit | 1787 |
| L981 | Hypothetical methylmalonyl-CoA decarboxylase alpha subunit | 1788 |
| L982 | Hypothetical methylmalonyl-CoA decarboxylase alpha subunit | 1789 |
| L983 | Hypothetical protein | AEP |
| L984 | Hypothetical protein | 1790 |
| L985 | Hypothetical protein APE0525 | PTL |
| L986 | Hypothetical protein APE0525 | 1791 |
| L987 | Hypothetical protein LOC449832 | 1792 |
| L988 | Hypothetical protein LOC449832 | 1793 |
| L989 | Hypothetical protein PA4388 | 1794 |
| L990 | Hypothetical protein PA5201 | ASE |
| L991 | Hypothetical protein PA5201 | QDP |
| L992 | Hypothetical protein PA5201 | VKL |
| L993 | Hypothetical protein PA5201 | 1795 |
| L994 | Hypothetical protein PA5201 | 1796 |
| L995 | Hypothetical protein PA5201 | 1797 |
| L996 | Hypothetical protein PA5201 | 1798 |
| L997 | Hypothetical protein PA5201 | 1799 |
| L998 | Hypothetical protein PA5201 | 1800 |
| L999 | Hypothetical protein PA5201 | 1801 |
| L1000 | Hypothetical protein PA5201 | 1802 |
| L1001 | Hypothetical protein PA5201 | 1803 |
| L1002 | Hypothetical protein PA5201 | 1804 |
| L1003 | Hypothetical protein PA5201 | 1805 |
| L1004 | Hypothetical protein PA5201 | 1806 |
| L1005 | Hypothetical protein PA5201 | 1807 |
| L1006 | Hypothetical protein PA5201 | 1808 |
| L1007 | Hypothetical protein PA5201 | 1809 |
| L1008 | Hypothetical protein PA5201 | 1810 |
| L1009 | Hypothetical protein PA5201 | 1811 |
| L1010 | Hypothetical protein PA5201 | 1812 |
| L1011 | Hypothetical protein PA5201 | 1813 |
| L1012 | Hypothetical protein PA5201 | 1814 |
| L1013 | Hypothetical protein PH0495 | ASN |
| L1014 | Hypothetical protein PH0495 | 1815 |
| L1015 | Hypothetical protein PH0495 | 1816 |
| L1016 | Hypothetical protein PH0495 | 1817 |
| L1017 | Hypothetical protein PH0495 | 1818 |
| L1018 | Hypothetical protein PH0510 | 1819 |
| L1019 | Hypothetical protein PH0510 | 1820 |
| L1020 | Hypothetical protein PH1313 | 1821 |
| L1021 | Hypothetical protein PH1313 | 1822 |
| L1022 | Hypothetical protein SLR0953 | 1823 |
| L1023 | Hypothetical protein SLR0953 | 1824 |
| L1024 | Hypothetical protein SLR0953 | 1825 |
| L1025 | Hypothetical protein SLR0953 | 1826 |
| L1026 | Hypothetical protein SLR0953 | 1827 |
| L1027 | Hypothetical protein YIGZ | 1828 |
| L1028 | Hypothetical protein YIGZ | 1829 |
| L1029 | Hypothetical protein YJIA | 1830 |
| L1030 | Hypothetical protein YJIA | 1831 |
| L1031 | Hypothetical protein YJIA | 1832 |
| L1032 | Hypothetical protein YJIA | 1833 |
| L1033 | Hypothetical protein YJIA | 1834 |
| L1034 | Hypothetical tRNA/rRNA methyltransferase YJFH | 1835 |
| L1035 | Hypothetical tRNA/rRNA methyltransferase YJFH | 1836 |
| L1036 | IclR transcriptional regulator | 1837 |
| L1037 | IclR transcriptional regulator | 1838 |
| L1038 | IclR transcriptional regulator | 1839 |
| L1039 | IclR transcriptional regulator | 1840 |
| L1040 | Integrase | 1841 |
| L1041 | Interferon, alpha-inducible protein (clone IFI-15k) | 1842 |
| L1042 | Interleukin-1 receptor, type I | AIF |
| L1043 | Interleukin-1 receptor, type I | 1843 |
| L1044 | Interleukin-1 receptor, type I | 1844 |
| L1045 | Interleukin-1 receptor, type I | 1845 |
| L1046 | Interleukin-12 subunit p40 | FFI |
| L1047 | Interleukin-12 subunit p40 | 1846 |
| L1048 | Interleukin-12 subunit p40 | 1847 |
| L1049 | Interleukin-12 subunit p40 | 1848 |
| L1050 | Interleukin-12 subunit p40 | 1849 |
| L1051 | Interleukin-12 subunit p40 | 1850 |
| L1052 | lnterleukin-12 subunit p40 | 1851 |
| L1053 | Interleukin-12 subunit p40 | 1852 |
| L1054 | Interleukin-2 receptor alpha chain | 1853 |
| L1055 | Interleukin-2 receptor alpha chain | 1854 |
| L1056 | Internalin B | VTQ |
| L1057 | Internalin B | 1855 |
| L1058 | Internalin B | 1856 |
| L1059 | Internalin B | 1857 |
| L1060 | Internalin B | 1858 |
| L1061 | Internalin B | 1859 |
| L1062 | Internalin B | 1860 |
| L1063 | Internalin B | 1861 |
| L1064 | Internalin B | 1862 |
| L1065 | Internalin B | 1863 |
| L1066 | Internalin B | 1864 |
| L1067 | Internalin B | 1865 |
| L1068 | Internalin B | 1866 |
| L1069 | Intimin | SLV |
| L1070 | Intimin | 1867 |
| L1071 | Intimin | 1868 |
| L1072 | Intimin | 1869 |
| L1073 | Intron-encoded DNA endonuclease I-anil | 1870 |
| L1074 | Intron-encoded DNA endonuclease I-anil | 1871 |
| L1075 | Invasin | KST |
| L1076 | Invasin | 1872 |
| L1077 | Invasin | 1873 |
| L1078 | Invasin | 1874 |
| L1079 | Invasin | 1875 |
| L1080 | Invasin | 1876 |
| L1081 | Invasin | 1877 |
| L1082 | Invasin | 1878 |
| L1083 | Invasin | 1879 |
| L1084 | Invasin | 1880 |
| L1085 | Invasin | 1881 |
| L1086 | Invasin | 1882 |
| L1087 | Invasin | 1883 |
| L1088 | Iron hydrogenase 1 | GAE |
| L1089 | Iron hydrogenase 1 | 1884 |
| L1090 | Iron hydrogenase 1 | 1885 |
| L1091 | Iron hydrogenase 1 | 1886 |
| L1092 | Iron hydrogenase 1 | 1887 |
| L1093 | Iron hydrogenase 1 | 1888 |
| L1094 | Iron hydrogenase 1 | 1889 |
| L1095 | Iron hydrogenase 1 | 1890 |
| L1096 | Iron hydrogenase 1 | 1891 |
| L1097 | Iron hydrogenase 1 | 1892 |
| L1098 | Iron hydrogenase 1 | 1893 |
| L1099 | Iron hydrogenase 1 | 1894 |
| L1100 | Iron hydrogenase 1 | 1895 |
| L1101 | Iron hydrogenase 1 | 1896 |
| L1102 | Iron transport protein | 1897 |
| L1103 | Isoflavanone 4′-O-methyltransferase | 1898 |
| L1104 | Isoflavanone 4′-O-methyltransferase | 1899 |
| L1105 | Junctional adhesion molecule 1 | 1900 |
| L1106 | Junctional adhesion molecule 1 | 1901 |
| L1107 | Junctional adhesion molecule 1 | 1902 |
| L1108 | Kanamycin nucleotidyltransferase | 1903 |
| L1109 | Kanamycin nucleotidyltransferase | 1904 |
| L1110 | Kanamycin nucleotidyltransferase | 1905 |
| L1111 | Kanamycin nucleotidyltransferase | 1906 |
| L1112 | Kelch-like protein 11 | 1907 |
| L1113 | Kexin | ISE |
| L1114 | Kexin | 1908 |
| L1115 | Kexin | 1909 |
| L1116 | Kexin | 1910 |
| L1117 | Kexin | 1911 |
| L1118 | Kexin | 1912 |
| L1119 | Kexin | 1913 |
| L1120 | Kexin | 1914 |
| L1121 | Ku70 | 1915 |
| L1122 | Ku70 | 1916 |
| L1123 | Ku70 | 1917 |
| L1124 | Ku70 | 1918 |
| L1125 | Ku80 | 1919 |
| L1126 | Laccase-1 | 1920 |
| L1127 | Laccase-1 | 1921 |
| L1128 | Laccase-1 | 1922 |
| L1129 | Laccase-1 | 1923 |
| L1130 | Laminin | DKC |
| L1131 | L-aspartate dehydrogenase | SAS |
| L1132 | L-aspartate dehydrogenase | 1924 |
| L1133 | L-aspartate dehydrogenase | 1925 |
| L1134 | Leucine dehydrogenase | 1926 |
| L1135 | Leucine dehydrogenase | 1927 |
| L1136 | Light chain of HyHel10 antibody fragment (fab) | 1928 |
| L1137 | Lin2111 protein | 1929 |
| L1138 | Lin2111 protein | 1930 |
| L1139 | Lipopolysaccharide-responsive and beige-like anchor protein | 1931 |
| L1140 | Lipopolysaccharide-responsive and beige-like anchor protein | 1932 |
| L1141 | Lipovitellin (LV-1N, LV-1C) | 1933 |
| L1142 | Lipovitellin (LV-1N, LV-1C) | 1934 |
| L1143 | Lipovitellin (LV-1N, LV-1C) | 1935 |
| L1144 | Lipovitellin (LV-1N, LV-1C) | 1936 |
| L1145 | Lipovitellin (LV-1N, LV-1C) | 1937 |
| L1146 | Lipoxygenase-1 | 1938 |
| L1147 | Lipoxygenase-1 | 1939 |
| L1148 | Low affinity immunoglobulin gamma Fc region receptor II-A | 1940 |
| L1149 | Luciferase | 1941 |
| L1150 | LysR-type regulatory protein | 1942 |
| L1151 | Macrolide-specific efflux protein MacA | ATE |
| L1152 | Macrolide-specific efflux protein MacA | 1943 |
| L1153 | Macrolide-specific efflux protein MacA | 1944 |
| L1154 | Magnesium transporter, putative | 1945 |
| L1155 | Main hemagglutinin component | 1946 |
| L1156 | Major centromere autoantigen B | 1947 |
| L1157 | Major surface antigen p30 | 1948 |
| L1158 | Major surface antigen p30 | 1949 |
| L1159 | Major vault protein | 1950 |
| L1160 | Major vault protein | 1951 |
| L1161 | Maltose phosphorylase | 1952 |
| L1162 | Maltose phosphorylase | 1953 |
| L1163 | Maltose phosphorylase | 1954 |
| L1164 | Maltose phosphorylase | 1955 |
| L1165 | Maltose phosphorylase | 1956 |
| L1166 | Manganese-dependent inorganic pyrophosphatase | 1957 |
| L1167 | Manganese-dependent inorganic pyrophosphatase | 1958 |
| L1168 | Mannan-binding lectin | 1959 |
| L1169 | Mannan-binding lectin | 1960 |
| L1170 | Mannan-binding lectin | 1961 |
| L1171 | Mannitol dehydrogenase | HNA |
| L1172 | Mannitol dehydrogenase | 1962 |
| L1173 | Membrane cofactor protein | RET |
| L1174 | Membrane cofactor protein | 1963 |
| L1175 | Membrane-associated prostaglandin E synthase-2 | 1964 |
| L1176 | Membrane-associated prostaglandin E synthase-2 | 1965 |
| L1177 | Membrane-associated prostaglandin E synthase-2 | 1966 |
| L1178 | Membrane-associated prostaglandin E synthase-2 | 1967 |
| L1179 | Membrane-associated prostaglandin E synthase-2 | 1968 |
| L1180 | Membrane-bound lytic murein transglycosylase A | 1969 |
| L1181 | Methionyl-tRNA synthetase | 1970 |
| L1182 | Methyl-accepting chemotaxis protein | VRP |
| L1183 | Methyl-accepting chemotaxis protein | 1971 |
| L1184 | Methyl-accepting chemotaxis protein | 1972 |
| L1185 | Methyl-accepting chemotaxis protein | 1973 |
| L1186 | Methyl-coenzyme M reductase | 1974 |
| L1187 | Methyl-coenzyme M reductase | 1975 |
| L1188 | Methyl-coenzyme M reductase | 1976 |
| L1189 | Methyl-coenzyme M reductase | 1977 |
| L1190 | Methylene tetrahydromethanopterin dehydrogenase | 1978 |
| L1191 | Methylene tetrahydromethanopterin dehydrogenase | 1979 |
| L1192 | Mg2+ transporter MgtE | 1980 |
| L1193 | Mg2+ transporter MgtE | 1981 |
| L1194 | Mg2+ transporter MgtE | 1982 |
| L1195 | Mitochondrial aconitase | 1983 |
| L1196 | Mitochondrial aconitase | 1984 |
| L1197 | Modification methylase TaqI | EGK |
| L1198 | Modification methylase TaqI | PAT |
| L1199 | Modification methylase TaqI | 1985 |
| L1200 | Modification methylase TaqI | 1986 |
| L1201 | Modification methylase TaqI | 1987 |
| L1202 | Modification methylase TaqI | 1988 |
| L1203 | Modification methylase TaqI | 1989 |
| L1204 | Modification methylase TaqI | 1990 |
| L1205 | Modification methylase TaqI | 1991 |
| L1206 | Modification methylase TaqI | 1992 |
| L1207 | Multidrug-efflux transporter 1 regulator | 1993 |
| L1208 | Muramoyl-pentapeptide carboxypeptidase | 1994 |
| L1209 | MutL | 1995 |
| L1210 | MutL | 1996 |
| L1211 | MutL | 1997 |
| L1212 | MutL | 1998 |
| L1213 | MutL | 1999 |
| L1214 | MutL | 2000 |
| L1215 | MutL | 2001 |
| L1216 | MutL | 2002 |
| L1217 | MutL | 2003 |
| L1218 | MutM (Fpg) protein | 2004 |
| L1219 | MutM (Fpg) protein | 2005 |
| L1220 | MutM (Fpg) protein | 2006 |
| L1221 | MutM (Fpg) protein | 2007 |
| L1222 | Myotubularin-related protein 2 | THW |
| L1223 | Myotubularin-related protein 2 | 2008 |
| L1224 | Myotubularin-related protein 2 | 2009 |
| L1225 | Myotubularin-related protein 2 | 2010 |
| L1226 | Myotubularin-related protein 2 | 2011 |
| L1227 | Myotubularin-related protein 2 | 2012 |
| L1228 | N utilization substance protein A | EIP |
| L1229 | N utilization substance protein A | 2013 |
| L1230 | N utilization substance protein A | 2014 |
| L1231 | N utilization substance protein A | 2015 |
| L1232 | N-acetylglucosamine kinase | CAY |
| L1233 | N-acetylglucosamine kinase | ISP |
| L1234 | N-acetylglucosamine kinase | 2016 |
| L1235 | N-acyl-D-glutamate deacylase | 2017 |
| L1236 | N-acyl-D-glutamate deacylase | 2018 |
| L1237 | N-acyl-D-glutamate deacylase | 2019 |
| L1238 | N-acyl-D-glutamate deacylase | 2020 |
| L1239 | N-acyl-D-glutamate deacylase | 2021 |
| L1240 | N-acyl-D-glutamate deacylase | 2022 |
| L1241 | N-acyl-D-glutamate deacylase | 2023 |
| L1242 | NAD-dependent malic enzyme | 2024 |
| L1243 | NAD-dependent malic enzyme | 2025 |
| L1244 | NADH peroxidase | ADT |
| L1245 | NADH peroxidase | AVG |
| L1246 | NADH peroxidase | TLI |
| L1247 | NADH peroxidase | 2026 |
| L1248 | NADH peroxidase | 2027 |
| L1249 | NADH peroxidase | 2028 |
| L1250 | NADH peroxidase | 2029 |
| L1251 | NADH peroxidase | 2030 |
| L1252 | NADH peroxidase | 2031 |
| L1253 | NADH pyrophosphatase | 2032 |
| L1254 | Naphthalene 1,2-dioxygenase alpha subunit | 2033 |
| L1255 | Naphthalene 1,2-dioxygenase alpha subunit | 2034 |
| L1256 | NEDD8-activating enzyme E1 catalytic subunit | 2035 |
| L1257 | NEDD8-activating enzyme E1 regulatory subunit | 2036 |
| L1258 | NEDD8-activating enzyme E1 regulatory subunit | 2037 |
| L1259 | NEDD8-activating enzyme E1 regulatory subunit | 2038 |
| L1260 | Nei endonuclease VIII-Like 1 | 2039 |
| L1261 | Nei endonuclease VIII-Like 1 | 2040 |
| L1262 | Nei endonuclease VIII-Like 1 | 2041 |
| L1263 | Nei endonuclease VIII-Like 1 | 2042 |
| L1264 | Neural cell adhesion molecule 2 | 2043 |
| L1265 | Neural cell adhesion molecule 2 | 2044 |
| L1266 | Neural cell adhesion molecule 2 | 2045 |
| L1267 | Neural cell adhesion molecule 2 | 2046 |
| L1268 | Neural cell adhesion molecule 2 | 2047 |
| L1269 | Neuroplastin | 2048 |
| L1270 | Neuroplastin | 2049 |
| L1271 | Neuroplastin | 2050 |
| L1272 | Neutrophil cytosol factor 1 | 2051 |
| L1273 | Nickel responsive regulator | 2052 |
| L1274 | NifU-like protein 2, chloroplast | 2053 |
| L1275 | Nitric oxide reductase | ILM |
| L1276 | Nitric oxide reductase | 2054 |
| L1277 | Nitric oxide reductase | 2055 |
| L1278 | Nitric oxide reductase | 2056 |
| L1279 | Nitric oxide reductase | 2057 |
| L1280 | Nitric oxide reductase | 2058 |
| L1281 | NK receptor | 2059 |
| L1282 | Nuclear factor of activated t-cells, cytoplasmic2 | 2060 |
| L1283 | Nucleolin RBD12 | 2061 |
| L1284 | O-GlcNAcase NagJ | 2062 |
| L1285 | Orange carotenoid protein | EGV |
| L1286 | Orange carotenoid protein | 2063 |
| L1287 | Orange carotenoid protein | 2064 |
| L1288 | Orn/Lys/Arg decarboxylase family protein | LEL |
| L1289 | Orn/Lys/Arg decarboxylase family protein | 2065 |
| L1290 | Orn/Lys/Arg decarboxylase family protein | 2066 |
| L1291 | Orn/Lys/Arg decarboxylase family protein | 2067 |
| L1292 | Orn/Lys/Arg decarboxylase family protein | 2068 |
| L1293 | Orn/Lys/Arg decarboxylase family protein | 2069 |
| L1294 | Orn/Lys/Arg decarboxylase family protein | 2070 |
| L1295 | Orn/Lys/Arg decarboxylase family protein | 2071 |
| L1296 | Osteoclast-stimulating factor 1 | 2072 |
| L1297 | Oxygen-independent coproporphyrinogen III oxidase | 2073 |
| L1298 | Oxygen-independent coproporphyrinogen III oxidase | 2074 |
| L1299 | Oxygen-independent coproporphyrinogen III oxidase | 2075 |
| L1300 | Oxygen-independent coproporphyrinogen III oxidase | 2076 |
| L1301 | Oxygen-independent coproporphyrinogen III oxidase | 2077 |
| L1302 | Oxygen-independent coproporphyrinogen III oxidase | 2078 |
| L1303 | Oxygen-independent coproporphyrinogen III oxidase | 2079 |
| L1304 | Oxygen-independent coproporphyrinogen III oxidase | 2080 |
| L1305 | Oxygen-independent coproporphyrinogen III oxidase | 2081 |
| L1306 | Oxygen-independent coproporphyrinogen III oxidase | 2082 |
| L1307 | Paraneoplastic encephalomyelitis antigen HuD | 2083 |
| L1308 | Paraneoplastic encephalomyelitis antigen HuD | 2084 |
| L1309 | Penicillin binding protein 4 | 2085 |
| L1310 | Penicillin binding protein 4 | 2086 |
| L1311 | Penicillin binding protein 4 | 2087 |
| L1312 | Penicillin binding protein 4 | 2088 |
| L1313 | Penicillin binding protein 4 | 2089 |
| L1314 | Penicillin binding protein 4 | 2090 |
| L1315 | Penicillin binding protein 4 | 2091 |
| L1316 | Peptide-N(4)-(N-acetyl-beta-D-glucosaminyl)asparagine amidase F | DGV |
| L1317 | Peptide-N(4)-(N-acetyl-beta-D-glucosaminyl)asparagine amidase F | 2092 |
| L1318 | Peptide-N(4)-(N-acetyl-beta-D-glucosaminyl)asparagine amidase F | 2093 |
| L1319 | Peptide-N(4)-(N-acetyl-beta-D-glucosaminyl)asparagine amidase F | 2094 |
| L1320 | Peroxisomal primary amine oxidase | 2095 |
| L1321 | Peroxisomal primary amine oxidase | 2096 |
| L1322 | Peroxisome biogenesis factor 1 | 2097 |
| L1323 | Pesticidial crystal protein Cry2Aa | 2098 |
| L1324 | Pesticidial crystal protein Cry2Aa | 2099 |
| L1325 | Pesticidial crystal protein Cry2Aa | 2100 |
| L1326 | Phase 1 flagellin | DLT |
| L1327 | Phase 1 flagellin | 2101 |
| L1328 | Phase 1 flagellin | 2102 |
| L1329 | Phase 1 flagellin | 2103 |
| L1330 | Phase 1 flagellin | 2104 |
| L1331 | Phase 1 flagellin | 2105 |
| L1332 | Phase 1 flagellin | 2106 |
| L1333 | Phase 1 flagellin | 2107 |
| L1334 | Phase 1 flagellin | 2108 |
| L1335 | Phase 1 flagellin | 2109 |
| L1336 | Phase 1 flagellin | 2110 |
| L1337 | Phase 1 flagellin | 2111 |
| L1338 | Phase 1 flagellin | 2112 |
| L1339 | Phenylalanyl-tRNA synthetase beta chain | LGL |
| L1340 | Phenylalanyl-tRNA synthetase beta chain | 2113 |
| L1341 | Phenylalanyl-tRNA synthetase beta chain | 2114 |
| L1342 | Phenylalanyl-tRNA synthetase beta chain | 2115 |
| L1343 | Phenylalanyl-tRNA synthetase beta chain | 2116 |
| L1344 | Phenylalanyl-tRNA synthetase beta chain | 2117 |
| L1345 | Phenylalanyl-tRNA synthetase beta chain | 2118 |
| L1346 | Phenylalanyl-tRNA synthetase beta chain | 2119 |
| L1347 | Phenylalanyl-tRNA synthetase beta chain | 2120 |
| L1348 | Phenylalanyl-tRNA synthetase beta chain | 2121 |
| L1349 | Phenylalanyl-tRNA synthetase beta chain | 2122 |
| L1350 | Phenylalanyl-tRNA synthetase beta chain | 2123 |
| L1351 | Phenylalanyl-tRNA synthetase beta chain | 2124 |
| L1352 | Phenylalanyl-tRNA synthetase beta chain | 2125 |
| L1353 | Phosphatase | 2126 |
| L1354 | Phosphatase | 2127 |
| L1355 | Phosphatase | 2128 |
| L1356 | Phosphatidylinositol transfer protein Sec14p | YGT |
| L1357 | Phosphatidylinositol transfer protein Sec14p | 2129 |
| L1358 | Phosphatidylinositol transfer protein Sec14p | 2130 |
| L1359 | Phosphatidylserine synthase | 2131 |
| L1360 | Phosphatidylserine synthase | 2132 |
| L1361 | Phosphatidylserine synthase | 2133 |
| L1362 | Phosphoglycolate phosphatase | 2134 |
| L1363 | Phosphoglycolate phosphatase | 2135 |
| L1364 | Phosphoglycolate phosphatase | 2136 |
| L1365 | Phosphoglycolate phosphatase | 2137 |
| L1366 | Phospholipase D | 2138 |
| L1367 | Phospholipase D | 2139 |
| L1368 | Phospholipase D | 2140 |
| L1369 | Phosphoribosylamine--glycine ligase | 2141 |
| L1370 | Phosphoribosylamine--glycine ligase | 2142 |
| L1371 | Phosphotransferase system, enzyme I | 2143 |
| L1372 | Photosystem II d1 protease | 2144 |
| L1373 | Photosystem II d1 protease | 2145 |
| L1374 | Photosystem II d1 protease | 2146 |
| L1375 | Photosystem II d1 protease | 2147 |
| L1376 | Photosystem II d1 protease | 2148 |
| L1377 | Phthalate dioxygenase reductase | 2149 |
| L1378 | P-hydroxybenzoate hydroxylase | DGL |
| L1379 | P-hydroxybenzoate hydroxylase | IDL |
| L1380 | P-hydroxybenzoate hydroxylase | RLK |
| L1381 | P-hydroxybenzoate hydroxylase | 2150 |
| L1382 | P-hydroxybenzoate hydroxylase | 2151 |
| L1383 | P-hydroxybenzoate hydroxylase | 2152 |
| L1384 | P-hydroxybenzoate hydroxylase | 2153 |
| L1385 | P-hydroxybenzoate hydroxylase | 2154 |
| L1386 | P-hydroxybenzoate hydroxylase | 2155 |
| L1387 | P-hydroxybenzoate hydroxylase | 2156 |
| L1388 | P-hydroxybenzoate hydroxylase | 2157 |
| L1389 | P-hydroxybenzoate hydroxylase | 2158 |
| L1390 | P-hydroxybenzoate hydroxylase | 2159 |
| L1391 | P-hydroxybenzoate hydroxylase | 2160 |
| L1392 | P-hydroxybenzoate hydroxylase | 2161 |
| L1393 | P-hydroxybenzoate hydroxylase | 2162 |
| L1394 | P-hydroxybenzoate hydroxylase | 2163 |
| L1395 | P-hydroxybenzoate hydroxylase | 2164 |
| L1396 | P-hydroxybenzoate hydroxylase | 2165 |
| L1397 | P-hydroxybenzoate hydroxylase | 2166 |
| L1398 | Phytase | LNF |
| L1399 | Phytase | QSN |
| L1400 | Phytase | 2167 |
| L1401 | Phytase | 2168 |
| L1402 | Phytase | 2169 |
| L1403 | Phytase | 2170 |
| L1404 | Phytase | 2171 |
| L1405 | Phytase | 2172 |
| L1406 | Phytase | 2173 |
| L1407 | Phytase | 2174 |
| L1408 | Pirin | LKS |
| L1409 | Pirin | SGE |
| L1410 | Pirin | 2175 |
| L1411 | Pirin | 2176 |
| L1412 | Pirin | 2177 |
| L1413 | Pirin | 2178 |
| L1414 | Pirin | 2179 |
| L1415 | Pirin | 2180 |
| L1416 | Poly(A) polymerase | 2181 |
| L1417 | Poly(A) polymerase | 2182 |
| L1418 | Poly(A) polymerase | 2183 |
| L1419 | Poly(A) polymerase | 2184 |
| L1420 | Poly(A) polymerase | 2185 |
| L1421 | Poly(A) polymerase | 2186 |
| L1422 | Poly(A) polymerase | 2187 |
| L1423 | Poly(A) polymerase | 2188 |
| L1424 | Poly(A) polymerase | 2189 |
| L1425 | Poly(A) polymerase | 2190 |
| L1426 | Poly(A) polymerase | 2191 |
| L1427 | Poly(A) polymerase | 2192 |
| L1428 | Poly(rC)-binding protein 2 | 2193 |
| L1429 | Polymerase x | 2194 |
| L1430 | Polymerase x | 2195 |
| L1431 | Polypeptide N-acetylgalactosaminyltransferase 2 | 2196 |
| L1432 | Polypeptide N-acetylgalactosaminyltransferase 2 | 2197 |
| L1433 | Polyphosphate kinase | 2198 |
| L1434 | Polyphosphate kinase | 2199 |
| L1435 | Polyphosphate kinase | 2200 |
| L1436 | Polypyrimidine tract-binding protein | 2201 |
| L1437 | Porcine pancreatic spasmolytic polypeptide | 2202 |
| L1438 | Possible 3-mercaptopyruvate sulfurtransferase | LFR |
| L1439 | Possible 3-mercaptopyruvate sulfurtransferase | YGM |
| L1440 | Possible 3-mercaptopyruvate sulfurtransferase | 2203 |
| L1441 | Possible 3-mercaptopyruvate sulfurtransferase | 2204 |
| L1442 | Possible 3-mercaptopyruvate sulfurtransferase | 2205 |
| L1443 | Postsynaptic density protein 95 | 2206 |
| L1444 | Postsynaptic density protein 95 | 2207 |
| L1445 | Predicted sugar phosphatases of the HAD superfamily | IAI |
| L1446 | Predicted sugar phosphatases of the HAD superfamily | 2208 |
| L1447 | Predicted sugar phosphatases of the HAD superfamily | 2209 |
| L1448 | Predicted sugar phosphatases of the HAD superfamily | 2210 |
| L1449 | Predicted sugar phosphatases of the HAD superfamily | 2211 |
| L1450 | Predicted sugar phosphatases of the HAD superfamily | 2212 |
| L1451 | Predicted sugar phosphatases of the HAD superfamily | 2213 |
| L1452 | Predicted sugar phosphatases of the HAD superfamily | 2214 |
| L1453 | Predicted sugar phosphatases of the HAD superfamily | 2215 |
| L1454 | Preprotein translocase SecA | ITF |
| L1455 | Preprotein translocase SecA | LID |
| L1456 | Preprotein translocase SecA | 2216 |
| L1457 | Preprotein translocase SecA | 2217 |
| L1458 | Preprotein translocase SecA | 2218 |
| L1459 | Preprotein translocase SecA | 2219 |
| L1460 | Preprotein translocase SecA | 2220 |
| L1461 | Preprotein translocase SecA | 2221 |
| L1462 | Preprotein translocase SecA | 2222 |
| L1463 | Preprotein translocase SecA | 2223 |
| L1464 | Preprotein translocase SecA | 2224 |
| L1465 | Preprotein translocase SecA | 2225 |
| L1466 | Preprotein translocase SecA | 2226 |
| L1467 | Preprotein translocase SecA | 2227 |
| L1468 | Preprotein translocase SecA | 2228 |
| L1469 | Preprotein translocase SecA | 2229 |
| L1470 | Preprotein translocase SecA | 2230 |
| L1471 | Preprotein translocase SecA | 2231 |
| L1472 | Preprotein translocase SecA | 2232 |
| L1473 | PrfA | ING |
| L1474 | Probable 16s rRNA-processing protein RimM | 2233 |
| L1475 | Probable biphenyl-2,3-diol 1,2-dioxygenase BphC | 2234 |
| L1476 | Probable chorismate mutase | LLA |
| L1477 | Probable chorismate mutase | 2235 |
| L1478 | Probable chorismate mutase | 2236 |
| L1479 | Probable ferredoxin-dependent nitrite reductase NirA | VPL |
| L1480 | Probable ferredoxin-dependent nitrite reductase NirA | WGI |
| L1481 | Probable ferredoxin-dependent nitrite reductase NirA | 2237 |
| L1482 | Probable ferredoxin-dependent nitrite reductase NirA | 2238 |
| L1483 | Probable ferredoxin-dependent nitrite reductase NirA | 2239 |
| L1484 | Probable ferredoxin-dependent nitrite reductase NirA | 2240 |
| L1485 | Probable ferredoxin-dependent nitrite reductase NirA | 2241 |
| L1486 | Probable ferredoxin-dependent nitrite reductase NirA | 2242 |
| L1487 | Probable ferredoxin-dependent nitrite reductase NirA | 2243 |
| L1488 | Probable ferredoxin-dependent nitrite reductase NirA | 2244 |
| L1489 | Probable ferredoxin-dependent nitrite reductase NirA | 2245 |
| L1490 | Probable ferredoxin-dependent nitrite reductase NirA | 2246 |
| L1491 | Probable ferredoxin-dependent nitrite reductase NirA | 2247 |
| L1492 | Probable ferredoxin-dependent nitrite reductase NirA | 2248 |
| L1493 | Probable galactokinase | 2249 |
| L1494 | Probable galactokinase | 2250 |
| L1495 | Probable galactokinase | 2251 |
| L1496 | Probable galactokinase | 2252 |
| L1497 | Probable galactokinase | 2253 |
| L1498 | Probable galactokinase | 2254 |
| L1499 | Probable galactokinase | 2255 |
| L1500 | Probable galactokinase | 2256 |
| L1501 | Probable galactokinase | 2257 |
| L1502 | Probable galactokinase | 2258 |
| L1503 | Probable galactokinase | 2259 |
| L1504 | Probable galactokinase | 2260 |
| L1505 | Probable glutathione S-transferase | 2261 |
| L1506 | Probable GST-related protein | 2262 |
| L1507 | Probable HPr(Ser) kinase/phosphatase | 2263 |
| L1508 | Probable thiosulfate sulfur transferase | 2264 |
| L1509 | Probable thiosulfate sulfur transferase | 2265 |
| L1510 | Probable thiosulfate sulfur transferase | 2266 |
| L1511 | Probable thiosulfate sulfur transferase | 2267 |
| L1512 | Probable thiosulfate sulfur transferase | 2268 |
| L1513 | Probable thiosulfate sulfur transferase | 2269 |
| L1514 | Probable thiosulfate sulfur transferase | 2270 |
| L1515 | Probable thiosulfate sulfur transferase | 2271 |
| L1516 | Probable tRNA pseudouridine synthase D | 2272 |
| L1517 | Probable tRNA pseudouridine synthase D | 2273 |
| L1518 | Probable tRNA pseudouridine synthase D | 2274 |
| L1519 | Probable tRNA pseudouridine synthase D | 2275 |
| L1520 | Probable tRNA pseudoundine synthase D | 2276 |
| L1521 | Probable tRNA pseudouridine synthase D | 2277 |
| L1522 | Programed cell death protein 8 | SKE |
| L1523 | Programed cell death protein 8 | TLQ |
| L1524 | Programed cell death protein 8 | 2278 |
| L1525 | Programed cell death protein 8 | 2279 |
| L1526 | Programed cell death protein 8 | 2280 |
| L1527 | Programed cell death protein 8 | 2281 |
| L1528 | Programed cell death protein 8 | 2282 |
| L1529 | Programed cell death protein 8 | 2283 |
| L1530 | Programed cell death protein 8 | 2284 |
| L1531 | Programed cell death protein 8 | 2285 |
| L1532 | Programed cell death protein 8 | 2286 |
| L1533 | Programed cell death protein 8 | 2287 |
| L1534 | Programed cell death protein 8 | 2288 |
| L1535 | Programed cell death protein 8 | 2289 |
| L1536 | Programed cell death protein 8 | 2290 |
| L1537 | Programed cell death protein 8 | 2291 |
| L1538 | Programed cell death protein 8 | 2292 |
| L1539 | Programed cell death protein 8 | 2293 |
| L1540 | Programed cell death protein 8 | 2294 |
| L1541 | Programed cell death protein 8 | 2295 |
| L1542 | Proline oxidase | 2296 |
| L1543 | Prolyl-tRNA synthetase | 2297 |
| L1544 | Prostaglandin G/H synthase 1 | PEI |
| L1545 | Prostaglandin G/H synthase 1 | 2298 |
| L1546 | Protease | 2299 |
| L1547 | Protease | 2300 |
| L1548 | Protease | 2301 |
| L1549 | Protease DegS | 2302 |
| L1550 | Protease DegS | 2303 |
| L1551 | Protease DegS | 2304 |
| L1552 | Protease DegS | 2305 |
| L1553 | Protease III | NAR |
| L1554 | Protease III | RNP |
| L1555 | Protease III | 2306 |
| L1556 | Protease III | 2307 |
| L1557 | Protease III | 2308 |
| L1558 | Protease III | 2309 |
| L1559 | Protease III | 2310 |
| L1560 | Protease III | 2311 |
| L1561 | Protease III | 2312 |
| L1562 | Protease III | 2313 |
| L1563 | Protease III | 2314 |
| L1564 | Protease III | 2315 |
| L1565 | Protease III | 2316 |
| L1566 | Protease III | 2317 |
| L1567 | Protease III | 2318 |
| L1568 | Protease III | 2319 |
| L1569 | Protease III | 2320 |
| L1570 | Protease III | 2321 |
| L1571 | Protease III | 2322 |
| L1572 | Protease III | 2323 |
| L1573 | Protease III | 2324 |
| L1574 | Protease III | 2325 |
| L1575 | Protection of telomeres 1 | 2326 |
| L1576 | Protection of telomeres 1 | 2327 |
| L1577 | Protein (CD58) | 2328 |
| L1578 | Protein (CRP1) | 2329 |
| L1579 | Protein (DNA polymerase) | 2330 |
| L1580 | Protein (DNA polymerase) | 2331 |
| L1581 | Protein (DNA polymerase) | 2332 |
| L1582 | Protein (electron transfer flavoprotein) | 2333 |
| L1583 | Protein (electron transfer flavoprotein) | 2334 |
| L1584 | Protein (Ffh) | 2335 |
| L1585 | Protein (Ffh) | 2336 |
| L1586 | Protein (Ffh) | 2337 |
| L1587 | Protein (Ffh) | 2338 |
| L1588 | Protein (Ffh) | 2339 |
| L1589 | Protein (FokI restriction endonuclease) | 2340 |
| L1590 | Protein (FokI restriction endonuclease) | 2341 |
| L1591 | Protein (FokI restriction endonuclease) | 2342 |
| L1592 | Protein (FokI restriction endonuclease) | 2343 |
| L1593 | Protein (FokI restriction endonuclease) | 2344 |
| L1594 | Protein (FokI restriction endonuclease) | 2345 |
| L1595 | Protein (FokI restriction endonuclease) | 2346 |
| L1596 | Protein (FokI restriction endonuclease) | 2347 |
| L1597 | Protein (FokI restriction endonuclease) | 2348 |
| L1598 | Protein (neural cell adhesion molecule) | 2349 |
| L1599 | Protein (neural cell adhesion molecule) | 2350 |
| L1600 | Protein (neural cell adhesion molecule) | 2351 |
| L1601 | Protein (nine-haem cytochrome c) | FTH |
| L1602 | Protein (nine-haem cytochrome c) | 2352 |
| L1603 | Protein (nine-haem cytochrome c) | 2353 |
| L1604 | Protein (nine-haem cytochrome c) | 2354 |
| L1605 | Protein (nine-haem cytochrome c) | 2355 |
| L1606 | Protein (nine-haem cytochrome c) | 2356 |
| L1607 | Protein (nine-haem cytochrome c) | 2357 |
| L1608 | Protein (nine-haem cytochrome c) | 2358 |
| L1609 | Protein (nine-haem cytochrome c) | 2359 |
| L1610 | Protein (protease/helicase NS3) | 2360 |
| L1611 | Protein (protease/helicase NS3) | 2361 |
| L1612 | Protein (protease/helicase NS3) | 2362 |
| L1613 | Protein (protease/helicase NS3) | 2363 |
| L1614 | Protein disulfide oxidoreductase | 2364 |
| L1615 | Protein disulfide oxidoreductase | 2365 |
| L1616 | Protein disulfide-isomerase A4 | 2366 |
| L1617 | Protein kinase PKR | 2367 |
| L1618 | Protein kinase PKR | 2368 |
| L1619 | Protein TolB | VNK |
| L1620 | Protein TolB | 2369 |
| L1621 | Protein TolB | 2370 |
| L1622 | Protein TolB | 2371 |
| L1623 | Protein TolB | 2372 |
| L1624 | Protein TolB | 2373 |
| L1625 | Protein TolB | 2374 |
| L1626 | Protein translation elongation factor 1A | 2375 |
| L1627 | Protein transport protein Sec24 | DRN |
| L1628 | Protein transport protein Sec24 | 2376 |
| L1629 | Protein transport protein Sec24 | 2377 |
| L1630 | Protein transport protein Sec24 | 2378 |
| L1631 | Protein transport protein Sec24 | 2379 |
| L1632 | Protein transport protein Sec24 | 2380 |
| L1633 | Protein transport protein Sec24 | 2381 |
| L1634 | Protein transport protein Sec24 | 2382 |
| L1635 | Protein transport protein Sec24 | 2383 |
| L1636 | Pseudouridine synthase CBF5 | AIQ |
| L1637 | Pseudouridine synthase CBF5 | 2384 |
| L1638 | Pseudouridine synthase CBF5 | 2385 |
| L1639 | Putative acetylglutamate synthase | 2386 |
| L1640 | Putative acetylglutamate synthase | 2387 |
| L1641 | Putative acetylglutamate synthase | 2388 |
| L1642 | Putative family 31 glucosidase Yicl | 2389 |
| L1643 | Putative family 31 glucosidase Yicl | 2390 |
| L1644 | Putative family 31 glucosidase Yicl | 2391 |
| L1645 | Putative glutathione transferase | 2392 |
| L1646 | Putative glutathione transferase | 2393 |
| L1647 | Putative glutathione transferase | 2394 |
| L1648 | Putative GNTR-family transcriptional regulator | 2395 |
| L1649 | Putative GNTR-family transcriptional regulator | 2396 |
| L1650 | Putative GNTR-family transcriptional regulator | 2397 |
| L1651 | Putative HTH-type transcriptional regulator PH0061 | 2398 |
| L1652 | Putative HTH-type transcriptional regulator PH1519 | 2399 |
| L1653 | Putative HTH-type transcriptional regulator PH1519 | 2400 |
| L1654 | Putative metallopeptidase | 2401 |
| L1655 | Putative N-acetylmannosamine kinase | 2402 |
| L1656 | Putative N-acetylmannosamine kinase | 2403 |
| L1657 | Putative N-acetylmannosamine kinase | 2404 |
| L1658 | Putative NADP oxidoreductase BF3122 | 2405 |
| L1659 | Putative NADP oxidoreductase BF3122 | 2406 |
| L1660 | Putative NADP oxidoreductase BF3122 | 2407 |
| L1661 | Putative NADP oxidoreductase BF3122 | 2408 |
| L1662 | Putative oxidoreductase | 2409 |
| L1663 | Putative secreted alpha-galactosidase | PLP |
| L1664 | Putative secreted alpha-galactosidase | TNG |
| L1665 | Putative secreted alpha-galactosidase | 2410 |
| L1666 | Putative secreted alpha-galactosidase | 2411 |
| L1667 | Putative secreted alpha-galactosidase | 2412 |
| L1668 | Putative tagatose-6-phosphate ketose/aldose isomerase | DKA |
| L1669 | Putative tagatose-6-phosphate ketose/aldose isomerase | 2413 |
| L1670 | Putative tagatose-6-phosphate ketose/aldose isomerase | 2414 |
| L1671 | Putative tagatose-6-phosphate ketose/aldose isomerase | 2415 |
| L1672 | Putative transcriptional regulator GntR | 2416 |
| L1673 | Putative transcriptional repressor (TetR/AcrR family) | KFR |
| L1674 | Putative transcriptional repressor (TetR/AcrR family) | 2417 |
| L1675 | Putative uncharacterized protein | 2418 |
| L1676 | Putative uncharacterized protein | 2419 |
| L1677 | Putative uncharacterized protein | 2420 |
| L1678 | Putative uncharacterized protein | 2421 |
| L1679 | Putative uncharacterized protein | 2422 |
| L1680 | Putative uncharacterized protein | 2423 |
| L1681 | Putative uncharacterized protein | 2424 |
| L1682 | Putative uncharacterized protein | 2425 |
| L1683 | Putative uncharacterized protein | 2426 |
| L1684 | Pyruvate decarboxylase | CAA |
| L1685 | Pyruvate decarboxylase | 2427 |
| L1686 | Pyruvate decarboxylase | 2428 |
| L1687 | Pyruvate decarboxylase | 2429 |
| L1688 | Pyruvate decarboxylase | 2430 |
| L1689 | Pyruvate decarboxylase | 2431 |
| L1690 | Pyruvate dehydrogenase [lipoamide] kinase isozyme 2, mitochondrial | YVP |
| L1691 | Pyruvate dehydrogenase [lipoamide] kinase isozyme 2, mitochondrial | 2432 |
| L1692 | Pyruvate dehydrogenase [lipoamide] kinase isozyme 2, mitochondrial | 2433 |
| L1693 | Pyruvate dehydrogenase E1 component subunit beta, mitochondrial | 2434 |
| L1694 | Pyruvate dehydrogenase E1 component subunit beta, mitochondrial | 2435 |
| L1695 | Pyruvate dehydrogenase E1 component subunit beta, mitochondrial | 2436 |
| L1696 | Pyruvate phosphate dikinase | FNP |
| L1697 | Pyruvate phosphate dikinase | SAL |
| L1698 | Pyruvate phosphate dikinase | 2437 |
| L1699 | Pyruvate phosphate dikinase | 2438 |
| L1700 | Pyruvate phosphate dikinase | 2439 |
| L1701 | Pyruvate phosphate dikinase | 2440 |
| L1702 | Pyruvate phosphate dikinase | 2441 |
| L1703 | Pyruvate phosphate dikinase | 2442 |
| L1704 | Pyruvate phosphate dikinase | 2443 |
| L1705 | Pyruvate phosphate dikinase | 2444 |
| L1706 | Pyruvate phosphate dikinase | 2445 |
| L1707 | Pyruvate phosphate dikinase | 2446 |
| L1708 | Pyruvate-ferredoxin oxidoreductase | VRL |
| L1709 | Pyruvate-ferredoxin oxidoreductase | 2447 |
| L1710 | Pyruvate-ferredoxin oxidoreductase | 2448 |
| L1711 | Pyruvate-ferredoxin oxidoreductase | 2449 |
| L1712 | Pyruvate-ferredoxin oxidoreductase | 2450 |
| L1713 | Pyruvate-ferredoxin oxidoreductase | 2451 |
| L1714 | Pyruvate-ferredoxin oxidoreductase | 2452 |
| L1715 | Pyruvate-ferredoxin oxidoreductase | 2453 |
| L1716 | Pyruvate-ferredoxin oxidoreductase | 2454 |
| L1717 | Pyruvate-ferredoxin oxidoreductase | 2455 |
| L1718 | Pyruvate-ferredoxin oxidoreductase | 2456 |
| L1719 | Pyruvate-ferredoxin oxidoreductase | 2457 |
| L1720 | Pyruvate-ferredoxin oxidoreductase | 2458 |
| L1721 | Pyruvate-ferredoxin oxidoreductase | 2459 |
| L1722 | Pyruvate-ferredoxin oxidoreductase | 2460 |
| L1723 | Pyruvate-ferredoxin oxidoreductase | 2461 |
| L1724 | Pyruvate-ferredoxin oxidoreductase | 2462 |
| L1725 | Pyruvate-ferredoxin oxidoreductase | 2463 |
| L1726 | Pyruvate-ferredoxin oxidoreductase | 2464 |
| L1727 | Pyruvate-ferredoxin oxidoreductase | 2465 |
| L1728 | Quinohemoprotein amine dehydrogenase 60 kDa subunit | 2466 |
| L1729 | Quinohemoprotein amine dehydrogenase 60 kDa subunit | 2467 |
| L1730 | Quinohemoprotein amine dehydrogenase 60 kDa subunit | 2468 |
| L1731 | Quinohemoprotein amine dehydrogenase 60 kDa subunit | 2469 |
| L1732 | Quinohemoprotein amine dehydrogenase 60 kDa subunit | 2470 |
| L1733 | Quinohemoprotein amine dehydrogenase 60 kDa subunit | 2471 |
| L1734 | Quinohemoprotein amine dehydrogenase 60 kDa subunit | 2472 |
| L1735 | Quinohemoprotein amine dehydrogenase 60 kDa subunit | 2473 |
| L1736 | Quinohemoprotein amine dehydrogenase 60 kDa subunit | 2474 |
| L1737 | Quinohemoprotein amine dehydrogenase 60 kDa subunit | 2475 |
| L1738 | Rag1 | 2476 |
| L1739 | Rag1 | 2477 |
| L1740 | Receptor-type tyrosine-protein phosphatase Mu | 2478 |
| L1741 | Receptor-type tyrosine-protein phosphatase Mu | 2479 |
| L1742 | RecG | 2480 |
| L1743 | RecG | 2481 |
| L1744 | RecG | 2482 |
| L1745 | RecG | 2483 |
| L1746 | RecG | 2484 |
| L1747 | RecG | 2485 |
| L1748 | RecG | 2486 |
| L1749 | RecG | 2487 |
| L1750 | RecG | 2488 |
| L1751 | RecG | 2489 |
| L1752 | RecG | 2490 |
| L1753 | RecG | 2491 |
| L1754 | Recombination endonuclease VII | 2492 |
| L1755 | Recombining binding protein suppressor of hairless | 2493 |
| L1756 | Restriction endonuclease | ERV |
| L1757 | Restriction endonuclease | 2494 |
| L1758 | Restriction endonuclease | 2495 |
| L1759 | Restriction endonuclease | 2496 |
| L1760 | Retinaldehyde-binding protein 1 | QYP |
| L1761 | Retinaldehyde-binding protein 1 | 2497 |
| L1762 | Retinaldehyde-binding protein 1 | 2498 |
| L1763 | Retinoblastoma pocket | 2499 |
| L1764 | RfcS | ITD |
| L1765 | RfcS | LTE |
| L1766 | RfcS | 2500 |
| L1767 | RfcS | 2501 |
| L1768 | RfcS | 2502 |
| L1769 | RfcS | 2503 |
| L1770 | RfcS | 2504 |
| L1771 | Rhamnogalacturonase B | 2505 |
| L1772 | Rhamnogalacturonase B | 2506 |
| L1773 | Rhamnogalacturonase B | 2507 |
| L1774 | Rhamnogalacturonase B | 2508 |
| L1775 | Rhamnogalacturonase B | 2509 |
| L1776 | Rhodniin | 2510 |
| L1777 | Rhodniin | 2511 |
| L1778 | Riboflavin synthase | 2512 |
| L1779 | Ribonuclease D | 2513 |
| L1780 | Ribonuclease D | 2514 |
| L1781 | Ribonuclease D | 2515 |
| L1782 | Ribonuclease TTHA0252 | 2516 |
| L1783 | Ribonuclease TTHA0252 | 2517 |
| L1784 | Ribonuclease TTHA0252 | 2518 |
| L1785 | Ribonuclease TTHA0252 | 2519 |
| L1786 | Ribonuclease TTHA0252 | 2520 |
| L1787 | Ribonuclease TTHA0252 | 2521 |
| L1788 | Ribonucleotide reductase r1 protein | 2522 |
| L1789 | Ribonucleotide reductase r1 protein | 2523 |
| L1790 | Ribonucleotide reductase r1 protein | 2524 |
| L1791 | Ribonucleotide reductase r1 protein | 2525 |
| L1792 | Ribonucleotide reductase r1 protein | 2526 |
| L1793 | Ribonucleotide reductase r1 protein | 2527 |
| L1794 | Ribosome maturation factor RimM | 2528 |
| L1795 | Ribulose-1,5 bisphosphate carboxylase/oxygenase large subunit N-methyltransferase | RHA |
| L1796 | Ribulose-1,5 bisphosphate carboxylase/oxygenase large subunit N-methyltransferase | 2529 |
| L1797 | Rigid extended P-rich | 2530 |
| L1798 | Rigid extended P-rich | 2531 |
| L1799 | Rigid extended P-rich | 2532 |
| L1800 | Rigid extended P-rich | 2533 |
| L1801 | Rigid extended P-rich | 2534 |
| L1802 | Rigid extended P-rich | 2535 |
| L1803 | Rigid extended P-rich | 2536 |
| L1804 | Rigid extended P-rich | 2537 |
| L1805 | Rigid extended P-rich | 2538 |
| L1806 | Rigid extended P-rich | 2539 |
| L1807 | Rigid extended P-rich | 2540 |
| L1808 | Rigid extended P-rich | 2541 |
| L1809 | Rigid extended P-rich | 2542 |
| L1810 | Rigid extended P-rich | 2543 |
| L1811 | Rigid extended P-rich | 2544 |
| L1812 | Rigid helical | 2545 |
| L1813 | Rigid helical | 2546 |
| L1814 | Rigid helical | 2547 |
| L1815 | Rigid helical | 2548 |
| L1816 | Rigid helical | 2549 |
| L1817 | Rigid helical | 2550 |
| L1818 | Rigid helical | 2551 |
| L1819 | Rigid helical | 2552 |
| L1820 | RNA binding domain of rho transcription termination factor | 2553 |
| L1821 | RNA binding protein ZFa | 2554 |
| L1822 | Rob transcription factor | 2555 |
| L1823 | Rob transcription factor | 2556 |
| L1824 | RP2 lipase | 2557 |
| L1825 | Rubrerythrin | 2558 |
| L1826 | S-adenosylmethionine synthetase | 2559 |
| L1827 | Sarcoplasmic/endoplasmic reticulum calcium ATPase 1 | QFD |
| L1828 | Sarcoplasmic/endoplasmic reticulum calcium ATPase 1 | 2560 |
| L1829 | Sarcoplasmic/endoplasmic reticulum calcium ATPase 1 | 2561 |
| L1830 | Sarcoplasmic/endoplasmic reticulum calcium ATPase 1 | 2562 |
| L1831 | Sarcoplasmic/endoplasmic reticulum calcium ATPase 1 | 2563 |
| L1832 | Sarcoplasmic/endoplasmic reticulum calcium ATPase 1 | 2564 |
| L1833 | Sarcoplasmic/endoplasmic reticulum calcium ATPase 1 | 2565 |
| L1834 | Sarcoplasmic/endoplasmic reticulum calcium ATPase 1 | 2566 |
| L1835 | Sarcoplasmic/endoplasmic reticulum calcium ATPase 1 | 2567 |
| L1836 | Sarcoplasmic/endoplasmic reticulum calcium ATPase 1 | 2568 |
| L1837 | Sarcoplasmic/endoplasmic reticulum calcium ATPase 1 | 2569 |
| L1838 | Sarcoplasmic/endoplasmic reticulum calcium ATPase 1 | 2570 |
| L1839 | Sarcoplasmic/endoplasmic reticulum calcium ATPase 1 | 2571 |
| L1840 | Sarcoplasmic/endoplasmic reticulum calcium ATPase 1 | 2572 |
| L1841 | Sarcoplasmic/endoplasmic reticulum calcium ATPase 1 | 2573 |
| L1842 | Sarcoplasmic/endoplasmic reticulum calcium ATPase 1 | 2574 |
| L1843 | Sarcoplasmic/endoplasmic reticulum calcium ATPase 1 | 2575 |
| L1844 | Sarcoplasmic/endoplasmic reticulum calcium ATPase 1 | 2576 |
| L1845 | Sarcoplasmic/endoplasmic reticulum calcium ATPase 1 | 2577 |
| L1846 | Sarcoplasmic/endoplasmic reticulum calcium ATPase 1 | 2578 |
| L1847 | Sarcoplasmic/endoplasmic reticulum calcium ATPase 1 | 2579 |
| L1848 | Sarcoplasmic/endoplasmic reticulum calcium ATPase 1 | 2580 |
| L1849 | Sarcoplasmic/endoplasmic reticulum calcium ATPase 1 | 2581 |
| L1850 | Sarcoplasmic/endoplasmic reticulum calcium ATPase 1 | 2582 |
| L1851 | Sarcoplasmic/endoplasmic reticulum calcium ATPase 1 | 2583 |
| L1852 | Sarcoplasmic/endoplasmic reticulum calcium ATPase 1 | 2584 |
| L1853 | Scavenger mRNA-decapping enzyme DcpS | ETG |
| L1854 | Scavenger mRNA-decapping enzyme DcpS | NIT |
| L1855 | Scavenger mRNA-decapping enzyme DcpS | 2585 |
| L1856 | Scavenger mRNA-decapping enzyme DcpS | 2586 |
| L1857 | Sec18p (residues 22-210) | 2587 |
| L1858 | Sec18p (residues 22-210) | 2588 |
| L1859 | Sensor protein | 2589 |
| L1860 | Sensor protein | 2590 |
| L1861 | Septum site-determining protein MinC | 2591 |
| L1862 | Serine acetyltransferase | 2592 |
| L1863 | Serine protease/NTPase/helicase NS3 | 2593 |
| L1864 | Serine protease/NTPase/helicase NS3 | 2594 |
| L1865 | Serine protease/NTPase/helicase NS3 | 2595 |
| L1866 | Serine rich linker | 2596 |
| L1867 | Serine rich linker | 2597 |
| L1868 | Serine rich linker | 2598 |
| L1869 | Serine rich linker | 2599 |
| L1870 | Serine rich linker | 2600 |
| L1871 | Serine rich linker | 2601 |
| L1872 | Serine rich linker | 2602 |
| L1873 | Seryl-tRNA synthetase | 2603 |
| L1874 | Sialidase | 2604 |
| L1875 | Sialidase B | SLT |
| L1876 | Sialidase B | VRE |
| L1877 | Sialidase B | 2605 |
| L1878 | Sialidase B | 2606 |
| L1879 | Sialidase B | 2607 |
| L1880 | Sialidase B | 2608 |
| L1881 | Sialidase B | 2609 |
| L1882 | Sialidase B | 2610 |
| L1883 | SIgnal peptIdase I | SRR |
| L1884 | SIgnal peptIdase I | 2611 |
| L1885 | SIgnal peptIdase I | 2612 |
| L1886 | SIgnal peptIdase I | 2613 |
| L1887 | SIgnal peptIdase I | 2614 |
| L1888 | SIgnal peptIdase I | 2615 |
| L1889 | SIgnal peptIdase I | 2616 |
| L1890 | SIgnal peptIdase I | 2617 |
| L1891 | SIgnal peptIdase I | 2618 |
| L1892 | SIgnal peptIdase I | 2619 |
| L1893 | SIgnal peptIdase I | 2620 |
| L1894 | Signal recognition particle protein | 2621 |
| L1895 | Signal transducer and activator of transcription1-alpha/beta | NDE |
| L1896 | Signal transducer and activator of transcription1-alpha/beta | SSF |
| L1897 | Signal transducer and activator of transcription1-alpha/beta | 2622 |
| L1898 | Signal transducer and activator of transcription1-alpha/beta | 2623 |
| L1899 | Signal transducer and activator of transcription1-alpha/beta | 2624 |
| L1900 | Signal transducer and activator of transcription1-alpha/beta | 2625 |
| L1901 | Signal transduction protein CBL | 2626 |
| L1902 | Signal transduction protein CBL | 2627 |
| L1903 | Similar to RAD54-like | AKP |
| L1904 | Similar to RAD54-like | EYF |
| L1905 | Similar to RAD54-like | RFE |
| L1906 | Similar to RAD54-like | 2628 |
| L1907 | Similar to RAD54-like | 2629 |
| L1908 | Similar to RAD54-like | 2630 |
| L1909 | Similar to RAD54-like | 2631 |
| L1910 | Similar to RAD54-like | 2632 |
| L1911 | Similar to RAD54-like | 2633 |
| L1912 | Similar to RAD54-like | 2634 |
| L1913 | Similar to RAD54-like | 2635 |
| L1914 | Similar to RAD54-like | 2636 |
| L1915 | Similar to RAD54-like | 2637 |
| L1916 | SKD1 protein | LMQ |
| L1917 | SKD1 protein | 2638 |
| L1918 | SKD1 protein | 2639 |
| L1919 | SKD1 protein | 2640 |
| L1920 | SKD1 protein | 2641 |
| L1921 | SKD1 protein | 2642 |
| L1922 | Sll1358 protein | 2643 |
| L1923 | Sll1358 protein | 2644 |
| L1924 | Sll1358 protein | 2645 |
| L1925 | Sll1358 protein | 2646 |
| L1926 | Soluble IFN alpha/beta receptor | 2647 |
| L1927 | Soluble IFN alpha/beta receptor | 2648 |
| L1928 | Sporozoite-specific SAG protein | 2649 |
| L1929 | Staphylococcal accessory regulator a homologue | 2650 |
| L1930 | Staphylococcal nuclease domain-containing protein 1 | 2651 |
| L1931 | Staphylococcal nuclease domain-containing protein 1 | 2652 |
| L1932 | Staphylococcal nuclease domain-containing protein 1 | 2653 |
| L1933 | Staphylococcal nuclease domain-containing protein 1 | 2654 |
| L1934 | Staphylococcal nuclease domain-containing protein 1 | 2655 |
| L1935 | Staphylococcal nuclease domain-containing protein 1 | 2656 |
| L1936 | Stat protein | 2657 |
| L1937 | Stat protein | 2658 |
| L1938 | Stat protein | 2659 |
| L1939 | Stat protein | 2660 |
| L1940 | Stat protein | 2661 |
| L1941 | Stat protein | 2662 |
| L1942 | Stat protein | 2663 |
| L1943 | Stat protein | 2664 |
| L1944 | Stat protein | 2665 |
| L1945 | Stat protein | 2666 |
| L1946 | Stat protein | 2667 |
| L1947 | Stat protein | 2668 |
| L1948 | Stat protein | 2669 |
| L1949 | Stat protein | 2670 |
| L1950 | Stat protein | 2671 |
| L1951 | Subtilisin-like protease | 2672 |
| L1952 | Succinyl-CoA ligase [GDP-forming] alpha-chain, mitochondrial | 2673 |
| L1953 | Succinyl-CoA ligase [GDP-forming] alpha-chain, mitochondrial | 2674 |
| L1954 | Succinyl-CoA ligase [GDP-forming] alpha-chain, mitochondrial | 2675 |
| L1955 | Succinyl-CoA ligase [GDP-forming] alpha-chain, mitochondrial | 2676 |
| L1956 | Succinyl-CoA ligase [GDP-forming] alpha-chain, mitochondrial | 2677 |
| L1957 | Succinyl-CoA ligase [GDP-forming] alpha-chain, mitochondrial | 2678 |
| L1958 | Succinyl-CoA synthetase beta chain | ADG |
| L1959 | Succinyl-CoA synthetase beta chain | RQP |
| L1960 | Succinyl-CoA synthetase beta chain | 2679 |
| L1961 | Succinyl-CoA synthetase beta chain | 2680 |
| L1962 | Succinyl-CoA synthetase beta chain | 2681 |
| L1963 | Succinyl-CoA synthetase beta chain | 2682 |
| L1964 | Succinyl-CoA synthetase beta chain | 2683 |
| L1965 | Succinyl-CoA synthetase beta chain | 2684 |
| L1966 | Succinyl-CoA:3-ketoacid-coenzyme A transferase | 2685 |
| L1967 | Sulfurtransferase | 2686 |
| L1968 | Superantigen SMEZ-2 | 2687 |
| L1969 | Superoxide dismutase 1 copper chaperone | 2688 |
| L1970 | Surface layer protein | 2689 |
| L1971 | Surface layer protein | 2690 |
| L1972 | Surface layer protein | 2691 |
| L1973 | Surface layer protein | 2692 |
| L1974 | Surface layer protein | 2693 |
| L1975 | Surface layer protein | 2694 |
| L1976 | Surface layer protein | 2695 |
| L1977 | Surface layer protein | 2696 |
| L1978 | T lymphocyte activation antigen | 2697 |
| L1979 | T lymphocyte activation antigen | 2698 |
| L1980 | T-cell receptor alpha chain C region | 2699 |
| L1981 | Terminal oxygenase component of carbazole | 2700 |
| L1982 | Tetanus neurotoxin | 2701 |
| L1983 | Tetracycline repressor protein class D | 2702 |
| L1984 | The GTP-binding protein Obg | 2703 |
| L1985 | The GTP-binding protein Obg | 2704 |
| L1986 | The GTP-binding protein Obg | 2705 |
| L1987 | The GTP-binding protein Obg | 2706 |
| L1988 | Thioredoxin domain-containing protein 4 | 2707 |
| L1989 | Thioredoxin domain-containing protein 4 | 2708 |
| L1990 | Thiosulfate sulfurtransferase | IDP |
| L1991 | Thiosulfate sulfurtransferase | 2709 |
| L1992 | Thiosulfate sulfurtransferase | 2710 |
| L1993 | Thiosulfate sulfurtransferase | 2711 |
| L1994 | Thiosulfate sulfurtransferase | 2712 |
| L1995 | Threonyl-tRNA synthetase | 2713 |
| L1996 | Threonyl-tRNA synthetase | 2714 |
| L1997 | Threonyl-tRNA synthetase | 2715 |
| L1998 | Threonyl-tRNA synthetase | 2716 |
| L1999 | Threonyl-tRNA synthetase | 2717 |
| L2000 | Threonyl-tRNA synthetase | 2718 |
| L2001 | Threonyl-tRNA synthetase | 2719 |
| L2002 | Threonyl-tRNA synthetase | 2720 |
| L2003 | Threonyl-tRNA synthetase | 2721 |
| L2004 | Threonyl-tRNA synthetase 1 | 2722 |
| L2005 | Threonyl-tRNA synthetase 1 | 2723 |
| L2006 | Threonyl-tRNA synthetase 1 | 2724 |
| L2007 | Threonyl-tRNA synthetase 1 | 2725 |
| L2008 | Threonyl-tRNA synthetase 1 | 2726 |
| L2009 | Threonyl-tRNA synthetase 1 | 2727 |
| L2010 | Threonyl-tRNA synthetase 1 | 2728 |
| L2011 | Threonyl-tRNA synthetase 1 | 2729 |
| L2012 | Thrombospondin 1 | 2730 |
| L2013 | Tick-borne encephalitis virus glycoprotein | 2731 |
| L2014 | Titin | 2732 |
| L2015 | Titin | 2733 |
| L2016 | TLR1789 protein | 2734 |
| L2017 | TLR1789 protein | 2735 |
| L2018 | Topoisomerase I | 2736 |
| L2019 | Topoisomerase I | 2737 |
| L2020 | Toxic shock syndrome toxin-1 | 2738 |
| L2021 | Toxic shock syndrome toxin-1 | 2739 |
| L2022 | Toxic shock syndrome toxin-1 | 2740 |
| L2023 | Toxic shock syndrome toxin-1 | 2741 |
| L2024 | T-plasminogen activator F1-G | VPV |
| L2025 | T-plasminogen activator F1-G | 2742 |
| L2026 | TpsB transporter FhaC | 2743 |
| L2027 | TpsB transporter FhaC | 2744 |
| L2028 | TpsB transporter FhaC | 2745 |
| L2029 | Transcarbamylase | 2746 |
| L2030 | Transcarbamylase | 2747 |
| L2031 | Transcription antiterminator LicT | 2748 |
| L2032 | Transcription elongation factor GreB | 2749 |
| L2033 | Transcription initiation factor IIa gamma chain | 2750 |
| L2034 | Transcription initiation factor IIb | 2751 |
| L2035 | Transcription initiation factor IIb | 2752 |
| L2036 | Transcriptional regulator (NtrC family) | 2753 |
| L2037 | Transcriptional regulator AefR | 2754 |
| L2038 | Transcriptional regulator AefR | 2755 |
| L2039 | Transcriptional regulator AefR | 2756 |
| L2040 | Transcriptional regulator AefR | 2757 |
| L2041 | Transcriptional regulator AefR | 2758 |
| L2042 | Transcriptional regulator, AsnC family | 2759 |
| L2043 | Transcriptional regulator, AsnC family | 2760 |
| L2044 | Transcriptional regulator, AsnC family | 2761 |
| L2045 | Transcriptional regulator, biotin repressor family | 2762 |
| L2046 | Transcriptional regulator, Crp/Fnr family | 2763 |
| L2047 | Transcriptional regulator, GntR family | 2764 |
| L2048 | Transcriptional regulator, HTH_3 family | 2765 |
| L2049 | Transcriptional regulator, HTH_3 family | 2766 |
| L2050 | Transcriptional regulator, HTH_3 family | 2767 |
| L2051 | Transcriptional regulator, HTH_3 family | 2768 |
| L2052 | Transcriptional regulator, HTH_3 family | 2769 |
| L2053 | Transcriptional regulator, laci family | 2770 |
| L2054 | Transcriptional regulatory protein ZraR | 2771 |
| L2055 | Transcriptional regulatory protein ZraR | 2772 |
| L2056 | Transcriptional regulatory protein ZraR | 2773 |
| L2057 | Transcriptional regulatory protein ZraR | 2774 |
| L2058 | Transcriptional regulatory protein ZraR | 2775 |
| L2059 | Transcriptional regulatory protein ZraR | 2776 |
| L2060 | Transcriptional regulatory protein ZraR | 2777 |
| L2061 | Transferrin receptor protein | VSN |
| L2062 | Transferrin receptor protein | 2778 |
| L2063 | Transferrin receptor protein | 2779 |
| L2064 | Transferrin receptor protein | 2780 |
| L2065 | Transferrin receptor protein | 2781 |
| L2066 | Translation initiation factor 5A | 2782 |
| L2067 | Translation initiation factor 5A | 2783 |
| L2068 | Translation initiation factor 5A | 2784 |
| L2069 | Translation initiation factor IF2/eIF5b | 2785 |
| L2070 | Translation initiation factor IF2/eIF5b | 2786 |
| L2071 | Transposable element mariner, complete CDS | 2787 |
| L2072 | Tricorn protease | 2788 |
| L2073 | Tricorn protease | 2789 |
| L2074 | Tricorn protease | 2790 |
| L2075 | Trigger factor | 2791 |
| L2076 | Trigger factor | 2792 |
| L2077 | Trigger factor | 2793 |
| L2078 | TRNA CCA-adding enzyme | RRI |
| L2079 | TRNA CCA-adding enzyme | 2794 |
| L2080 | TRNA CCA-adding enzyme | 2795 |
| L2081 | TRNA CCA-adding enzyme | 2796 |
| L2082 | TRNA CCA-adding enzyme | 2797 |
| L2083 | TRNA nucleotidyltransferase | 2798 |
| L2084 | TRNA-splicing endonuclease | 2799 |
| L2085 | Tt1467 protein | LEA |
| L2086 | Tt1467 protein | 2800 |
| L2087 | Tumor suppressor p53-binding protein 1 | 2801 |
| L2088 | Tumor suppressor p53-binding protein 1 | 2802 |
| L2089 | Tumor suppressor p53-binding protein 1 | 2803 |
| L2090 | Tumor suppressor p53-binding protein 1 | 2804 |
| L2091 | Type A flavoprotein FprA | 2805 |
| L2092 | Type A flavoprotein FprA | 2806 |
| L2093 | Type A flavoprotein FprA | 2807 |
| L2094 | Type A flavoprotein FprA | 2808 |
| L2095 | Type A flavoprotein FprA | 2809 |
| L2096 | Type I restriction enzyme specificity protein MG438 | QMH |
| L2097 | Type I restriction enzyme specificity protein MG438 | 2810 |
| L2098 | Type I restriction enzyme specificity protein MG438 | 2811 |
| L2099 | Type I restriction-modification enzyme, S subunit | 2812 |
| L2100 | Type I restriction-modification enzyme, S subunit | 2813 |
| L2101 | Type I site-specific restriction-modification system, R (restriction) subunit | 2814 |
| L2102 | Type I site-specific restriction-modification system, R (restriction) subunit | 2815 |
| L2103 | Type I site-specific restriction-modification system, R (restriction) subunit | 2816 |
| L2104 | Type II DNA topoisomerase VI subunit B | 2817 |
| L2105 | Type II DNA topoisomerase VI subunit B | 2818 |
| L2106 | Type II DNA topoisomerase VI subunit B | 2819 |
| L2107 | Type II DNA topoisomerase VI subunit B | 2820 |
| L2108 | Type II DNA topoisomerase VI subunit B | 2821 |
| L2109 | Type II DNA topoisomerase VI subunit B | 2822 |
| L2110 | Type II DNA topoisomerase VI subunit B | 2823 |
| L2111 | Type II DNA topoisomerase VI subunit B | 2824 |
| L2112 | Type II DNA topoisomerase VI subunit B | 2825 |
| L2113 | Type II DNA topoisomerase VI subunit B | 2826 |
| L2114 | Type II DNA topoisomerase VI subunit B | 2827 |
| L2115 | Type VI secretion system component | 2828 |
| L2116 | Type VI secretion system component | 2829 |
| L2117 | Type VI secretion system component | 2830 |
| L2118 | Tyrosine-protein kinase receptor UFO | 2831 |
| L2119 | Tyrosine-protein kinase receptor UFO | 2832 |
| L2120 | Tyrosine-protein kinase ZAP-70 | 2833 |
| L2121 | Tyrosine-protein kinase ZAP-70 | 2834 |
| L2122 | Tyrosyl-DNA phosphodiesterase | 2835 |
| L2123 | Tyrosyl-DNA phosphodiesterase | 2836 |
| L2124 | Ubiquitin carboxyl-terminal hydrolase 7 | 2837 |
| L2125 | UDP-galactopyranose mutase | 2838 |
| L2126 | UDP-galactopyranose mutase | 2839 |
| L2127 | UDP-galactopyranose mutase | 2840 |
| L2128 | UDP-galactopyranose mutase | 2841 |
| L2129 | UDP-galactopyranose mutase | 2842 |
| L2130 | UDP-glucose dehydrogenase | 2843 |
| L2131 | UDP-N-acetylmuramate-L-alanine ligase | 2844 |
| L2132 | UDP-N-acetylmuramate-L-alanine ligase | 2845 |
| L2133 | UDP-N-acetylmuramoylalanine--D-glutamate ligase | 2846 |
| L2134 | UDP-N-acetylmuramoylalanine--D-glutamate ligase | 2847 |
| L2135 | UDP-N-acetylmuramoylalanine-D-glutamyl-lysine-D-alanyl-D-alanine ligase, MurF | 2848 |
| | protein | |
| L2136 | UDP-N-acetylmuramoylalanyl-D-glutamate--2,6-diaminopimelate ligase | 2849 |
| L2137 | UDP-N-acetylmuramoylalanyl-D-glutamate--2,6-diaminopimelate ligase | 2850 |
| L2138 | UDP-N-acetylmuramoylalanyl-D-glutamate--2,6-diaminopimelate ligase | 2851 |
| L2139 | UDP-N-acetylmuramoylalanyl-D-glutamate--2,6-diaminopimelate ligase | 2852 |
| L2140 | UDP-N-acetylmuramoylalanyl-D-glutamate--2,6-diaminopimelate ligase | 2853 |
| L2141 | UDP-N-acetylmuramoylalanyl-D-glutamate--2,6-diaminopimelate ligase | 2854 |
| L2142 | UDP-N-acetylmuramoylalanyl-D-glutamate--2,6-diaminopimelate ligase | 2855 |
| L2143 | Uncharacterized conserved protein | 2856 |
| L2144 | Uncharacterized conserved protein | 2857 |
| L2145 | Uncharacterized GST-like protein yfcF | 2858 |
| L2146 | Uncharacterized GST-like proteinprotein | 2859 |
| L2147 | Uncharacterized GST-like proteinprotein | 2860 |
| L2148 | Uncharacterized GST-like proteinprotein | 2861 |
| L2149 | Uncharacterized protein | 2862 |
| L2150 | Uncharacterized protein | 2863 |
| L2151 | Uncharacterized protein BT_1490 | 2864 |
| L2152 | Uncharacterized protein ypfl | TLR |
| L2153 | Uncharacterized protein ypfl | VHP |
| L2154 | Uncharacterized protein ypfl | 2865 |
| L2155 | Uncharacterized protein ypfl | 2866 |
| L2156 | Uncharacterized protein ypfl | 2867 |
| L2157 | Uncharacterized protein ypfl | 2868 |
| L2158 | Uncharacterized protein ypfl | 2869 |
| L2159 | Uncharacterized protein ypfl | 2870 |
| L2160 | Uncharacterized protein ypfl | 2871 |
| L2161 | Uncharacterized protein ypfl | 2872 |
| L2162 | Uncharacterized protein ypfl | 2873 |
| L2163 | Uncharacterized protein ypfl | 2874 |
| L2164 | Uncharacterized protein ypfl | 2875 |
| L2165 | Uncharacterized protein ypfl | 2876 |
| L2166 | Uncharacterized protein ypfl | 2877 |
| L2167 | Uncharacterized protein ypfl | 2878 |
| L2168 | Uncharacterized protein ypfl | 2879 |
| L2169 | Unknown protein | 2880 |
| L2170 | Unknown protein | 2881 |
| L2171 | UPF0131 protein ykqA | 2882 |
| L2172 | UPF0131 protein ykqA | 2883 |
| L2173 | UPF0131 protein ykqA | 2884 |
| L2174 | UPF0348 protein MJ0951 | 2885 |
| L2175 | UPF0348 protein MJ0951 | 2886 |
| L2176 | UPF0348 protein MJ0951 | 2887 |
| L2177 | UPF0348 protein MJ0951 | 2888 |
| L2178 | UPF0348 protein MJ0951 | 2889 |
| L2179 | UPF0348 protein MJ0951 | 2890 |
| L2180 | UPF0348 protein MJ0951 | 2891 |
| L2181 | UPF0348 protein MJ0951 | 2892 |
| L2182 | URE2 protein | 2893 |
| L2183 | Uridine diphospho-N-acetylenolpyruvylglucosaminereductase | TAK |
| L2184 | Uridine diphospho-N-acetylenolpyruvylglucosaminereductase | 2894 |
| L2185 | Uridine diphospho-N-acetylenolpyruvylglucosaminereductase | 2895 |
| L2186 | Uridine diphospho-N-acetylenolpyruvylglucosaminereductase | 2896 |
| L2187 | Uridine diphospho-N-acetylenolpyruvylglucosaminereductase | 2897 |
| L2188 | Urokinase plasminogen activator surface receptor | 2898 |
| L2189 | Urokinase plasminogen activator surface receptor | 2899 |
| L2190 | Vascular cell adhesion molecule-1 | 2900 |
| L2191 | VCP-like ATPase | 2901 |
| L2192 | VCP-like ATPase | 2902 |
| L2193 | Viral CASP8 and FADD-like apoptosis regulator | 2903 |
| L2194 | Vitamin K-dependent protein Z | 2904 |
| L2195 | VP1 protein | 2905 |
| L2196 | V-type ATP synthase alpha chain | 2906 |
| L2197 | Xaa-Pro aminopeptidase | 2907 |
| L2198 | Xaa-Pro aminopeptidase | 2908 |
| L2199 | Xaa-Pro aminopeptidase | 2909 |
| L2200 | Xaa-Pro aminopeptidase | 2910 |
| L2201 | Xanthine dehydrogenase | 2911 |
| L2202 | Xanthine dehydrogenase | 2912 |
| L2203 | Xanthine dehydrogenase | 2913 |
| L2204 | Xanthine dehydrogenase | 2914 |
| L2205 | X-prolyl dipeptidyl aminopeptidase | KSY |
| L2206 | X-prolyl dipeptidyl aminopeptidase | LDG |
| L2207 | X-prolyl dipeptidyl aminopeptidase | LLE |
| L2208 | X-prolyl dipeptidyl aminopeptidase | TYS |
| L2209 | X-prolyl dipeptidyl aminopeptidase | 2915 |
| L2210 | X-prolyl dipeptidyl aminopeptidase | 2916 |
| L2211 | X-prolyl dipeptidyl aminopeptidase | 2917 |
| L2212 | X-prolyl dipeptidyl aminopeptidase | 2918 |
| L2213 | X-prolyl dipeptidyl aminopeptidase | 2919 |
| L2214 | X-prolyl dipeptidyl aminopeptidase | 2920 |
| L2215 | X-prolyl dipeptidyl aminopeptidase | 2921 |
| L2216 | X-prolyl dipeptidyl aminopeptidase | 2922 |
| L2217 | X-prolyl dipeptidyl aminopeptidase | 2923 |
| L2218 | X-prolyl dipeptidyl aminopeptidase | 2924 |
| L2219 | X-prolyl dipeptidyl aminopeptidase | 2925 |
| L2220 | X-prolyl dipeptidyl aminopeptidase | 2926 |
| L2221 | X-prolyl dipeptidyl aminopeptidase | 2927 |
| L2222 | X-prolyl dipeptidyl aminopeptidase | 2928 |
| L2223 | X-prolyl dipeptidyl aminopeptidase | 2929 |
| L2224 | X-prolyl dipeptidyl aminopeptidase | 2930 |
| L2225 | X-prolyl dipeptidyl aminopeptidase | 2931 |
| L2226 | X-prolyl dipeptidyl aminopeptidase | 2932 |
| L2227 | X-prolyl dipeptidyl aminopeptidase | 2933 |
| L2228 | X-prolyl dipeptidyl aminopeptidase | 2934 |
| L2229 | X-prolyl dipeptidyl aminopeptidase | 2935 |
| L2230 | X-prolyl dipeptidyl aminopeptidase | 2936 |
| L2231 | X-prolyl dipeptidyl aminopeptidase | 2937 |
| L2232 | X-prolyl dipeptidyl aminopeptidase | 2938 |
| 12233 | Xylosidase/arabinosidase | 2939 |
| L2234 | Xylosidase/arabinosidase | 2940 |
| L2235 | Xylosidase/arabinosidase | 2941 |
| L2236 | Xylosidase/arabinosidase | 2942 |
| L2237 | Xylosidase/arabinosidase | 2943 |
| L2238 | Xylosidase/arabinosidase | 2944 |
| L2239 | Xylosidase/arabinosidase | 2945 |
| L2240 | YkoF | 2946 |
| L2241 | YkuI protein | 2947 |

[0162] Internal ribosomal entry site (IRES) is a nucleotide sequence (>500 nucleotides) that allows for initiation of translation in the middle of an mRNA sequence (Kim, J. H. et al., 2011. PLoS One 6(4): e18556; the contents of which are herein incorporated by reference in its entirely). Use of an IRES sequence ensures co-expression of genes before and after the IRES, though the sequence following the IRES may be transcribed and translated at lower levels than the sequence preceding the IRES sequence.

[0163] 2A peptides are small “self-cleaving” peptides (18-22 amino acids) derived from viruses such as foot-and-mouth disease virus (F2A), porcine teschovirus-1 (P2A), Thoseaasigna virus (T2A), or equine rhinitis A virus (E2A). The 2A designation refers specifically to a region of picornavirus polvproteins that lead to a ribosomal skip at the glycyl-prolyl bond in the C-terminus of the 2A peptide (Kim, J. H. et al., 2011. PLoS One 6(4): e18556; the contents of which are herein incorporated by reference in its entirety). This skip results in a cleavage between the 2A peptide and its immediate downstream peptide. As opposed to IRES linkers, 2A peptides generate stoichiometric expression of proteins flanking the 2A peptide and their shorter length can be advantageous in generating viral expression vectors.

[0164] Some payload regions encode linkers comprising furin cleavage sites. Furin is a calcium dependent serine endoprotease that cleaves proteins just downstream of a, basic amino acid target sequence (Axg˜X-(Arg/Lys)˜Arg) (Thomas. G., 2002. Nature Reviews Molecular Ceil Biology 3(10): 753-66; the contents of which are herein incorporated by reference in its entirety). Furin is enriched in the trans-golgi network where it is involved in processing cellular precursor proteins. Furin also plays a role in activating a number of pathogens. Tins activity can be taken advantage of for expression of polypeptides of the invention.

[0165] In some embodiments, the payload region may encode one or more linkers comprising cathepsin, matrix metalloproteinases or legumain cleavage sites. Such linkers are described e.g. by Cizeau and Macdonald in International Publication No. WO2008052322, the contents of which are herein incorporated in their entirety. Cathepsins are a family of proteases with unique mechanisms to cleave specific proteins. Cathepsin B is a cysteine protease and cathepsin D is an aspartyl protease. Matrix metalloproteinases are a family of calcium-dependent and zinc-containing endopeptidases. Legumain is an enzyme catalyzing the hydrolysis of (-Asn-Xaa-) bonds of proteins and small molecule substrates.

[0166] In some embodiments, payload regions may encode linkers that are not cleaved. Such linkers may include a simple amino acid sequence, such as a glycine rich sequence. In some cases, linkers may comprise flexible peptide linkers comprising glycine and serine residues. The linker may comprise flexible peptide linkers of different lengths, e.g. nxG4S, where n=1-10 (SEQ ID NO: 4322) and the length of the encoded linker varies between 5 and 50 amino acids. In a non-limiting example, the linker may be 5×G4S (SEQ ID NO: 4321) encoded by SEQ ID NO: 903. These flexible linkers are small and without side chains so they tend not to influence secondary protein structure while providing a flexible linker between antibody segments (George, R.A., et al., 2002. Protein Engineering 15(11): 871-9; Huston, J. S. et al., 1988. PNAS 85:5879-83; and Shan, D. et al. 1999, Journal of Immunology. 162(11):6589-95; the contents of each of which are herein incorporated by reference in their entirety). Furthermore, the polarity of the serine residues improves solubility and prevents aggregation problems.

[0167] In some embodiments, payload regions of the invention may encode small and unbranched serine-rich peptide linkers, such as those described by Huston et al. in U.S. Pat. No. 5,525,491, the contents of which are herein incorporated in their entirety. Polypeptides encoded by the payload region of the invention, linked by serine-rich linkers, have increased solubility,

[0168] In some embodiments, payload regions of the invention may encode artificial linkers, such as those described by Whitlow and Filpula in U.S. Pat. No. 5,856,456 and Ladner et al. in U.S. Pat. No. 4,946,778, the contents of each of which are herein incorporated by their entirety.

### Viral Genome Component: Introns

[0169] In one embodiment, the payload region comprises at least one element to enhance the expression such as one or more introns or portions thereof. Non-limiting examples of introns include, MVM (67-97 bps), F.IX truncated intron 1 (300 bps), β-globin SD/immunoglobulin heavy chain splice acceptor (250 bps), adenovirus splice donor/immunoglobin splice acceptor (500 bps), SV40 late splice donor/splice acceptor (19S/16S) (180 bps) and hybrid adenovirus splice donor/IgG splice acceptor (230 bps).

[0170] In one embodiment, the intron or intron portion may be 100-500 nucleotides in length. The intron may have a length of 80, 90, 100, 110, 120, 130, 140, 150, 160, 170, 171, 172, 173, 174, 175, 176, 177, 178, 179, 180, 190, 200, 210, 220, 230, 240, 250, 260, 270, 280, 290, 300, 310, 320, 330, 340, 350, 360, 370, 380, 390, 400, 410, 420, 430, 440, 450, 460, 470, 480, 490 or 500. The intron may have a length between 80-100, 80-120, 80-140, 80-160, 80-180, 80-200, 80-250, 80-300, 80-350, 80-400, 80-450, 80-500, 200-300, 200-400, 200-500, 300-400, 300-500, or 400-500.

### Payloads of the Invention

[0171] The AAV particles of the present disclosure comprise at least one payload region. As used herein, “payload” or “payload region” refers to one or more polynucleotides or polynucleotide regions encoded by or within a viral genome or an expression product of such polynucleotide or polynucleotide region, e.g., a transgene, a polynucleotide encoding a polypeptide or multi-polypeptide or a modulatory nucleic acid or regulatory nucleic acid. Payloads of the present invention typically encode polypeptides (e.g., antibodies or antibody-based compositions) or fragments or variants thereof.

[0172] The payload region may be constructed in such a way as to reflect a region similar to or mirroring the natural organization of an mRNA.

[0173] The payload region may comprise a combination of coding and non-coding nucleic acid sequences.

[0174] In some embodiments, the AAV payload region may encode a coding or non-coding RNA.

[0175] In one embodiment, the AAV particle comprises a viral genome with a payload region comprising nucleic acid sequences encoding more than one polypeptide of interest (e.g., an antibody). In such an embodiment, a viral genome encoding more than one polypeptide may be replicated and packaged into a viral particle. A target cell transduced with a viral particle comprising more than one polypeptide may express each of the polypeptides in a single cell.

[0176] In one embodiment, as shown in FIG. 1, an AAV particle comprises a viral genome with a payload region comprising a nucleic acid sequence encoding a heavy chain and a light chain of an antibody. The heavy chain and light chain are expressed and assembled to form the antibody which is secreted.

[0177] In one embodiment, the payload region may comprise the components as shown in FIG. 2. The payload region 110 is located within the viral genome 100. At the 5′ and/or the 3′ end of the payload region 110 there may be at least one inverted terminal repeat (ITR) 120. Within the payload region, there is a promoter region 130, an intron region 140 and a coding region 150. When the coding region 150 comprises a heavy chain region 151 and light cham region 152 of an antibody, the two chains may be separated by a linker region 155.

[0178] In one embodiment, the coding region may comprise a heavy and light chain sequence and a linker. As shown in FIG. 3, the payload region may comprise a heavy chain and light chain sequence separated by a linker and/or a cleavage site. In one embodiment, the heavy and light chain sequence is separated by an IRES sequence (1 and 2). In one embodiment, the heavy and light chain sequence is separated by a foot and mouth virus sequence (3 and 4). In one embodiment the heavy and light chain sequence is separated by a foot and mouth virus sequence and a furin cleavage site (5 and 6). In one embodiment, the heavy and light chain sequence is separated by a porcine teschovirus-1 virus sequence (7 and 8). In one embodiment, the heavy and light chain sequence is separated by a porcine teschovirus-1 virus and a furin cleavage site (9 and 10), In one embodiment, the heavy and light chain sequence is separated by a 5×G4S sequence (SEQ ID NO; 4321) (II).

[0179] Where the AAV particle payload region encodes a polypeptide, the polypeptide may be a peptide or protein. A protein encoded by the AAV particle payload region may comprise an antibody, an antibody related composition, a secreted protein, an intracellular protein, an extracellular protein, and/or a membrane protein. The encoded proteins may be structural or functional. In addition to the antibodies or antibody-based composition, proteins encoded by the payload region may include, in combination, certain mammalian proteins involved in immune system regulation. The AAV viral genomes encoding polypeptides described herein may be useful in the fields of human disease, viruses, infections veterinary applications and a variety of in vivo and in vitro settings.

[0180] In some embodiments, the AAV particles are useful in tire field of medicine for the treatment, prophylaxis, palliation, or amelioration of neurological diseases and/or disorders.

### Antibodies and Antibody-Based Compositions

[0181] Payioad regions of the AAV particles of the invention may encode polypeptides that form one or more functional antibodies or antibody-based compositions. As used herein, the term “antibody” is referred to in the broadest sense and specifically covers various embodiments including, but not limited to monoclonal antibodies, polyclonal antibodies, multispeciric antibodies (e.g. bispecific antibodies formed from at least two intact antibodies), and antibody fragments (e.g., diabodies) so long as they exhibit a desired biological activity (e.g., “functional”). Antibodies are primarily amino-acid based molecules but may also comprise one or more modifications (including, but not limited to the addition of sugar moieties, fluorescent moieties, chemical tags, etc.).

[0182] As used herein, “antibody-based” or “antibody-derived” compositions are monomeric or multi-meric polypeptides which comprise at least one amino-acid region derived from a known or parental antibody sequence and at least one amino acid region derived from a non-antibody sequence, e.g., mammalian protein.

[0183] Payload regions may encode polypeptides that form or function as any antibody, including antibodies that are known in the art and/or antibodies that are commercially available. The encoded antibodies may be therapeutic, diagnostic, or for research purposes. Further, polypeptides of the invention may include fragments of such antibodies or antibodies that have been developed to comprise one or more of such fragments (e.g., variable domains or complementarity determining regions (CDRs)).

[0184] In one embodiment, the viral genome of the AAV particles may comprise nucleic acids which have been engineered to enable expression of antibodies, antibody fragments, or components of any of those described, in U.S. Pat. No. 7,041,807 related, to YYX epitope; US20090175884, US20110305630, US20130330275 related to misfolded proteins in cancer; US20040175775related to PrP in eye fluid; US20030114360 related to copolymers and methods of treating prion-related diseases; WO2009121176 related to insulin-induced gene peptide compositions; US20030022243, WO2003000853 related to protein aggregation assays; WO200078344 related to prion protein peptides and uses thereof. Each of these publications are incorporated by reference in their entireties.

### Antibody Generation

[0185] In some embodiments, viral genomes of the AAV particles of the invention may encode antibodies or antibody-based compositions produced using methods known in the art. Such methods may include, but are not limited to immunization and display technologies (e.g., phage display, yeast display, and ribosomal display). Antibodies may be developed, for example, using any naturally occurring or synthetic antigen. As used herein, an “antigen” is an entity which induces or evokes an immune response in an organism. An immune response is characterized by the reaction of the cells, tissues and/or organs of an organism to the presence of a foreign entity. Such an immune response typically leads to the production by the organism of one or more antibodies against the foreign entity, e.g., antigen or a portion of the antigen. As used herein, “antigens” also refer to binding partners for specific antibodies or binding agents in a display library.

[0186] In one embodiment, the sequences of the polypeptides to be encoded in the viral genomes of the invention may be derived from antibodies produced using hybridoma technology. Host animals (e.g. mice, rabbits, goats, and llamas) may be immunized by an injection with an antigenic protein to elicit lymphocytes that specifically bind to the antigen. Lymphocytes may be collected and fused with immortalized cell lines to generate hybridomas which can be cultured in a suitable culture medium to promote growth. The antibodies produced by the cultured hybridomas may be subjected to analysis to determine binding specificity of the antibodies for the target antigen. Once antibodies with desirable characteristics are identified, corresponding hybridomas may be subcloned through limiting dilution procedures and grown by standard methods. The antibodies produced by these cells may be isolated and purified using standard immunoglobulin purification procedures.

[0187] In one embodiment, the sequences of the polypeptides to be encoded in the viral genomes of the invention may be produced using heavy and light chain variable region cDNA sequences selected from hybridomas or from other sources. Sequences encoding antibody variable domains expressed by hybridomas may be determined by extracting RNA molecules from antibody-producing hybridoma cells and producing cDNA by reverse transcriptase polymerase chain reaction (PCR). PGR may be used to amplify cDNA using primers specific for heavy and light chain sequences. PCR products may then be subcloned into plasmids for sequence analysis. Antibodies may be produced by insertion of resulting variable domain sequences into expression vectors.

[0188] In one embodiment, the sequences of the polypeptides to be encoded in the viral genomes of the invention may be generated using display technologies. Display technologies used to generate polypeptides of the invention may include any of the display techniques (e.g. display library screening techniques) disclosed in International Patent Application No. WO2014074532, the contents of which are herein incorporated by reference in their entirety. In some embodiments, synthetic antibodies may be designed, selected, or optimized by screening target antigens using display technologies (e.g. phage display technologies). Phage display libraries may comprise millions to billions of phage particles, each expressing unique antibody fragments on their viral coats. Such libraries may provide richly diverse resources that may be used to select potentially hundreds of antibody fragments with diverse levels of affinity for one or more antigens of interest (McCafferty, et al., 1990. Nature. 348:552-4, Edwards, B. M. et al., 2003. JMB. 334:103-18, Schofield, D. et al., 2007. Genome Biol. 8, R254 and Persbad, K. et al., 2010. Protein Engineering Design and Selection. 23:279-88; the contents of each of which are herein incorporated by reference in their entirety). Often, the antibody fragments present in such libraries comprise scFv antibody fragments, comprising a fusion protein of V_{K} and V_{L} antibody domains joined by a flexible linker. In some cases, scFvs may contain the same sequence with the exception of unique sequences encoding variable loops of the CDRs. In some cases, scFvs are expressed as fusion proteins, linked to viral coat proteins (e.g. the N-terminus of the viral pIII coat protein). V_{L} chains may be expressed separately for assembly with V_{H} chains in the periplasm prior to complex incorporation into viral coats. Precipitated library members may be sequenced from the bound phage to obtain cDNA encoding desired scFvs. Antibody variable domains or CDRs from such sequences may be directly incorporated into antibody sequences for recombinant antibody production, or mutated and utilized for further optimization through m vitro affinity maturation.

[0189] In one embodiment, the sequences of the polypeptides to be encoded in the viral genomes of the invention may be produced using yeast surface display technology, wherein antibody variable domain sequences may be expressed on the cell surface of Saccharomyces cerevisiae. Recombinant antibodies may be developed by displaying the antibody fragment of interest as a fusion to e.g. Aga2p protein on the surface of the yeast, where the protein interacts with proteins and small molecules in a solution. scFvs with affinity toward desired receptors may-be isolated from the yeast surface using magnetic separation and flow cytometry. Several cycles of yeast surface display and isolation may be done to attain scFvs with desired properties through directed evolution.

[0190] In one embodiment, the sequence of the polypeptides to be encoded in the viral genomes of the invention (e.g., antibodies) may be designed by VERSITOPE™ Antibody Generation and other methods used by BIOATLA® and described in United States Patent Publication No. US20130281303, the contents of which are herein incorporated by reference in their entirety. In brief, recombinant monoclonal antibodies are derived from B-cells of a host immuno-challenged with one or more target antigens. These methods of antibody generation do not rely on immortalized cell lines, such as hybridorma, thereby avoiding some of the associated challenges i.e., genetic instability and low production capacity, producing high affinity and high diversity recombinant monoclonal antibodies. In one embodiment, the method is a natural diversity approach. In another embodiment, the method is a high diversity approach.

[0191] In one embodiment, the sequences of the polypeptides to be encoded in the viral genomes of the invention may be generated using the BIOATLA® natural diversity approach. In the natural diversity approach of generating recombinant monoclonal antibodies described in United States Patent Publication No. US20130281303, the original pairings of variable heavy (V_{H}) and variable light (V_{L}) domains are retained from the host, yielding recombinant monoclonal antibodies that are naturally paired. These may be advantageous due to a higher likelihood of functionality as compared to non-natural pairings of V_{H} and V_{L}. To produce the recombinant monoclonal antibodies, first a non-human host (i.e., rabbit, mouse, hamster, guinea pig, camel or goat) is immuno-challenged with an antigen of interest. In some embodiments, the host may be a previously challenged human patient. In other embodiments, the host may not have been immuno-challenged. B-cells are harvested from the host and screened by fluorescence activated cell sorting (FACS), or other method, to create a library of B-cells enriched in B-cells capable of binding the target antigen. The cDNA obtained, from the mRNA of a single B-cell is then amplified to generate an immunoglobulin library of V_{H} and V_{L} domains. This library of immunoglobulins is then cloned into expression vectors capable of expressing the V_{H} and V_{L} domains, wherein the V_{H} and V_{L} domains remain naturally paired. The library of expression vectors is then used in an expression system to express the V_{H} and V_{L} domains in order to create an antibody library. Screening of the antibody library yields antibodies able to bind the target antigen, and these antibodies can be further characterized. Characterization may include one or more of the following: isoelectric point, thermal stability, sedimentation rate, folding rate, neutralization or antigen activity, antagonist or agonistic activity, expression level, specific and non-specific binding, inhibition of enzymatic activity, rigidity/flexibility, shape, charge, stability across pH, in solvents, under UV radiation, in mechanical stress conditions, or in sonic conditions, half-life, and giycosylation.

[0192] In one embodiment, the sequences of the polypeptides to be encoded in the viral genomes of the invention may be generated using the BIOATLA® high diversity approach. In the high diversity approach of generating recombinant monoclonal antibodies described in United States Patent Publication No. US20130281303, additional pairings of variable heavy (V_{H}) and variable light (V_{L}) domains are attained. To produce the recombinant monoclonal antibodies, B-cells harvested from the host are screened by fluorescence activated cell sorting (FACS), panning, or other method, to create a library of B-cells enriched in B-cells capable of binding the target antigen. The cDNA obtained from the mRNA of the pooled B-cells is then amplified to generate an immunoglobulin library of V_{H} and V_{L} domains. This library of immunoglobulins is then used in a biological display system (mammalian, yeast or bacterial cell surface display systems) to generate a population of cells displaying antibodies, fragments or derivatives comprising the V_{H} and V_{L} domains wherein, the antibodies, fragments or derivatives comprise V_{H} and V_{L} domain combinations that were not present in the B-cells in vivo. Screening of the cell population by FACS, with the target antigen, yields a subset of cells capable of binding the target antigen and the antibodies displayed on these cells can be further characterized. In an alternate embodiment of the high diversity approach, the immunoglobulin library comprises only V_{H} domains obtained from the B-cells of the immuno-challenged host, while the V_{L} domain(s) are obtained from another source.

[0193] In one embodiment, the sequences of the polypeptides to be encoded in the viral genomes of the invention may be evolved using BIOATLA® comprehensive approaches. The methods of generating recombinant monoclonal antibodies as described in United States Patent Publication No. US20130281303, further comprises evolving the recombinant antibody by comprehensive positional evolution (CPE™). CPE™ followed by comprehensive protein synthesis (CPS™), PGR shuffling, or other method.

[0194] In one embodiment, the sequence of the polypeptides to be encoded in the viral genomes of the invention (e.g., antibodies) may be derived from any of the BIOATLA® protein evolution methods described in International Publication WO2012009026, the contents of which are herein incorporated by reference in their entirety. In this method, mutations are systematically performed throughout the polypeptide or molecule of interest, a map is created providing useful informatics to guide the subsequent evolutionary steps. Not wishing to be bound by theory, these evolutionary methods typically start with a template polypeptide and a mutant is derived therefrom, which has desirable properties or characteristics. Non-limiting examples of evolutionary techniques include polymerase chain reaction (PCR), error prone PCR, oligonucleotide-directed mutagenesis, cassette mutagenesis, shuffling, assembly PCR, sexual PCR mutagenesis, in vivo mutagenesis, site-specific mutagenesis, gene reassembly, gene site saturated mutagenesis, in vitro mutagenesis, ligase chain reaction, oligonucleotide synthesis or any combination thereof.

[0195] In one embodiment, the BIOATLA® evolution method is Comprehensive Positional Evolution (CPE™). In CPE, naturally occurring amino acid variants are generated for each of the codons of the template polypeptide, wherein 63 different codon options exist for each amino acid variant. A set of polypeptides with single amino acid mutations are generated and the mutations are then confirmed by sequencing or other method known in the art and each amino acid change screened for improved function, neutral mutations, inhibitory mutations, expression, and compatibility with the host system. An EvoMap™ is created that describes in detail the effects of each amino acid mutation on the properties and characteristics of that polypeptide. The data from the EvoMap™ may be utilized to produce polypeptides with more than one amino acid mutation, wherein the resultant multi-site mutant polypeptides can be screened for desirable characteristics.

[0196] In one embodiment, the BIOATLA® evolution method is Synergy Evolution, wherein an EvoMap™ is used to identify amino acid positions to introduce 2-20 mutations simultaneously to produce a combinatorial effect. The resulting multi-site mutant polypeptides may be screened on one or more pre-determined characteristics to identify “uprautants” wherein the function of the mutant is improved as compared to the parent polypeptide. In one embodiment, Synergy Evolution is used to enhance binding affinity of an antibody.

[0197] In one embodiment, the BIOATLA® evolution method is Flex Evolution, wherein an EvoMap™ is used to identify fully mutable sites within a polypeptide that may then be targeted, for alteration, such as introduction of glycosylation sites or chemical conjugation.

[0198] In one embodiment, the BIOATLA®) evolution method is Comprehensive Positional Insertion Evolution (CPI™), wherein an amino acid is inserted after each amino acid of a template polypeptide to generate a set of lengthened polypeptides. CPI may be used to insert 1, 2, 3, 4, or 5 amino acids at each new position. The resultant lengthened polypeptides are sequenced and assayed for one or more pre-determined properties find evaluated in comparison to its template or parent molecule. In one embodiment, the binding affinity and immunogenicity of the resultant polypeptides are assayed. In one embodiment, the lengthened polypeptides are further mutated and mapped to identity polypeptides with desirable characteristics.

[0199] In one embodiment, the BIOATLA® evolution approach is Comprehensive Positional Deletion Evolution (CPD™), wherein each amino acid of the template polypeptide is individually and systematically deleted one at a time. The resultant shortened polypeptides are then sequenced and evaluated by assay for at least one pre-determined feature. In one embodiment, the shortened polypeptides are further mutated and mapped, to identify polypeptides with desirable characteristics.

[0200] In one embodiment, the BIOATLA® evolution approach is Combinatorial Protein Synthesis (CPS™), wherein mutants identified in CPE, CPI, CPD, or other evolutionary techniques are combined for polypeptide synthesis. These combined mutant polypeptides are then screened for enhanced properties and characteristics. In one embodiment CPS is combined with any of the aforementioned evolutionary or polypeptide synthesis methods.

[0201] In one embodiment, the sequence of the polypeptides to be encoded in the viral genomes of the invention (e.g., antibodies) may be derived from the BIOATLA® Comprehensive Integrated Antibody Optimization (CIAO!™) described in U.S. Pat. No. 8,859,467, the contents of which are herein incorporated by reference in their entirety. The CIAO!™ method allows for simultaneous evolution of polypeptide performance and expression optimization, within a eukaryotic cell host (i.e., mammalian or yeast cell host). First, an antibody library is generated in a mammalian cell production host by antibody cell surface display, wherein the generated antibody library targets a particular antigen of interest. The antibody library is then screened by any method known in the art, for one or more properties or characteristics. One or more antibodies of the library, with desirable properties or characteristics are chosen for further polypeptide evolution by any of the methods known in the art, to produce a library of mutant antibodies by antibody cell surface display in a mammalian cell production host. The generated mutant antibodies are screened for one or more predetermined properties or characteristics, whereby an upmutant is selected, wherein the upmutant has enhanced or improved characteristics as compared to the parent template polypeptide.

[0202] In one embodiment, the sequences of the polypeptides to be encoded in the viral genomes of the invention may be humanized by the methods of BIOATLA® as described in United States Patent Publication US20130303 399, the contents of which are herein incorporated by reference in their entirety. In this method, for generating enhanced full length humanized antibodies in mammalian cells, no back-mutations are required to retain affinity to the antigen and no CDR grafting or phage-display is necessary. The generated humanized antibody has reduced immunogencity and equal or greater affinity for the target antigen as compared to the parent antibody. The variable regions or CDRs of the generated humanized antibody are derived from the parent or template, whereas the framework and constant regions are derived from one or more human antibodies. To start, the parent, or template antibody is selected, cloned and each CDR sequence identified and synthesized into a CDR fragment library. Double stranded DNA fragment libraries for V_{H} and V_{L} are synthesized from the CDR fragment encoding libraries, wherein at least one CDR fragment library is derived from the template antibody and framework (FW) fragment encoding libraries, wherein the FW fragment library is derived from a pool of human frameworks obtained from natively expressed and functional human antibodies. Stepwise liquid phase ligation of FW and CDR encoding fragments is then used to generate both V_{H} and V_{L} fragment libraries. The V_{H} and V_{L} fragment libraries are then cloned into expression vectors to create a humanization library, which is further transfected into cells for expression of full length humanized antibodies, and used to create a humanized antibody library. The humanized antibody library is then screened to determine expression level of the humanized antibodies, affinity or binding ability for the antigen, and additional improved or enhanced characteristics, as compared to the template or parent antibody. Non-limiting examples of characteristics that may be screened include equilibrium dissociation constant (K_{D}), stability, melting temperature (Tₘ), pI, solubility, expression level, reduced immunogemcity, and improved effector function.

[0203] In one embodiment, the sequences of the polypeptides to be encoded in the viral genomes of the invention may be generated by the BIOATLA® method for preparing conditionally active antibodies as described in International Publications WO2016033331 and WO2016036916, the contents of which are herein incorporated by reference in their entirety. As used herein, the term “conditionally active” refers to a molecule that is active at an aberrant condition. Further, the conditionally active molecule may be virtually inactive at normal physiological conditions. Aberrant conditions may result from changes in pH, temperature, osmotic pressure, osmolality, oxidative stress, electrolyte concentration, and/or chemical or proteolytic resistance, as non-limiting examples.

[0204] The method of preparing a conditionally active antibody is described in International Publications WO2016033331 and WO2016036916 and summarized herein. Briefly, a wild-type polypeptide is selected and the DNA is evolved to create mutant DNAs. Non-limiting examples of evolutionary techniques that may be used to evolve the DNA include polymerase chain reaction (PCR), error prone PCR, shuffling, oligonucleotide-directed mutagenesis, assembly PGR, sexual PCR mutagenesis, in vivo mutagenesis, site-specific mutagenesis, gene reassembly, gene site saturated mutagenesis, in vitro mutagenesis, ligase chain reaction, oligonucleotide synthesis or any combination thereof. Once mutant DNAs are created, they are expressed in a eukaryotic cell production host (i.e., fungal, insect, mammalian, adenoviral, plant), wherein a mutant polypeptide is produced. The mutant polypeptide and the corresponding wild-type polypeptide are then subjected to assays under both normal physiological conditions and aberrant conditions in order to identify mutants that exhibit a decrease in activity in the assay at normal physiological conditions as compared to the wild-type polypeptide and/or an increase in activity in the assay under aberrant conditions, as compared to the corresponding wild-type polypeptide. The desired conditionally active mutant may then be produced in the aforementioned eukaryotic cell production host.

[0205] In one embodiment, the conditionally active antibody is a “mirac protein” as described by BIOATLA® in U.S. Pat. No. 8,709,755, the contents of which are herein incorporated by reference in their entirety. As used herein “mirac protein” refers to a conditionally active antibody that is virtually inactive at body temperature but active at lower temperatures.

[0206] In one embodiment, the sequence of the polypeptides to be encoded in the viral genomes of the invention (e.g., antibodies) may be derived based on any of the BIOATLA™ methods including, but not limited to, VERSITOPE™ Antibody Generation, natural diversity approaches, and high diversity approaches for generating monoclonal antibodies, methods for generation of conditionally active polypeptides, humanized antibodies, mirac proteins, multi-specific antibodies or cross-species active mutant polypeptides, Comprehensive Integrated Antibody Optimization (CIAO!™), Comprehensive Positional Evolution (CPE™), Synergy Evolution, Flex Evolution, Comprehensive Positional Insertion Evolution (CPI™). Comprehensive Positional Deletion Evolution (CPD™), Combinatorial Protein Synthesis (CPS™), or any combination thereof. These methods are described in U.S. Pat. Nos. 8,859,467 and 8,709,755 and United States Publication Nos. US20130281303, US20130303399, US20150065690, US20150252119, US20150086562 and US20100138945, and International Publication Nos. WO2015105888, WO2012009026, WO2011109726, WO2016036916, and WO2016033331, the contents of each of which are herein incorporated by reference in their entirety.

[0207] In one embodiment, antibodies of the present invention are generated by any of the aforementioned means to target one or more of the following epitopes of the tau protein; phosphorylated tau peptides, pS396, pS396-pS404, pS404, pS396-pS404-pS422, pS422, pS199, pS 199-pS202, pS202, pT181, pT231, cis-pT231, any of the following acetylated sites acK174, acK274, acK280, acK281 and/or any combination thereof.

### Antibody Fragments and Variants

[0208] In some embodiments, antibody fragments encoded by payloads of the invention comprise antigen binding regions from, intact antibodies. Examples of antibody fragments may include, but are not limited to Fab, Fab′, F(ab′)₂, and Fv fragments; diabodies, linear antibodies; single-chain antibody molecules; and multispecific antibodies formed from antibody fragments. Papain digestion of antibodies produces two identical antigen-binding fragments, called “Fab” fragments, each with a single antigen-binding site. Also produced is a residual “Fc” fragment, whose name reflects its ability to crystallize readily. Pepsin treatment yields an F(ab′)₂ fragment that has two antigen-binding sites and is still capable of cross-linking antigen. Compounds and/or compositions of the present invention may comprise one or more of these fragments. For the purposes herein, an “antibody” may comprise a heavy and light variable domain as well as an Fc region.

[0209] In one embodiment, the Fc region may be a modified Fc region, as described in US Patent Publication US20150065690, wherein the Fc region may have a single amino acid substitution as compared to the corresponding sequence for the wild-type Fc region, wherein the single amino acid substitution yields an Fc region with preferred properties to those of the wild-type Fc region, Non-limiting examples of Fc properties that may be altered by the single amino acid substitution include bind properties or response to pH conditions.

[0210] As used herein, the term “native antibody” refers to an usually heterotetrameric glycoprotein of about 150,000 Daitons, composed of two identical light (L) chains and two identical heavy (H) chains. Genes encoding antibody heavy and light chains are known and segments making up each have been well characterized and described (Matsuda, F. et al., 1998. The Journal of Experimental Medicine. 188(11); 2151-62 and Li, A. et al, 2004. Blood. 103(12:4602-9, the content of each of which are herein incorporated by reference in their entirety). Each light chain is linked to a heavy chain by one covalent disulfide bond, while the number of disulfide linkages varies among the heavy chains of different immunoglobulin isotypes. Each heavy and light chain also has regularly spaced intrachain disulfide bridges. Each heavy chain has at one end a variable domain (V_{H}) followed by a number of constant domains. Each light chain has a variable domain at one end (V_{L}) and a constant domain at its other end; the constant domain of the light chain is aligned with the first constant domain of the heavy chain, and the light chain variable domain is aligned with the variable domain of the heavy chain.

[0211] As used herein, the term “variable domain” refers to specific antibody domains found on both the antibody heavy and light chains that differ extensively in sequence among antibodies and are used in the binding and specificity of each particular antibody for its particular antigen. Variable domains comprise hypervariable regions. As used herein, the term “hypervariable region” refers to a region within a variable domain comprising amino acid residues responsible for antigen binding. The amino acids present within the hypervariable regions determine the structure of the complementarity determining regions (CDRs) that become part of the antigen-binding site of the antibody. As used herein, the term “CDR” refers to a region of an antibody comprising a structure that is complimentary to its target antigen or epitope. Other portions of the variable domain, not interacting with the antigen, are referred to as framework (FW) regions. The antigen-binding site (also known as the antigen combining site or paratope) comprises the amino acid residues necessary to interact with a particular antigen. The exact residues making up the antigen-binding site are typically elucidated by co-crystallography with bound antigen, however computational assessments can also be used based on comparisons with other antibodies (Strohl, W. R. Therapeutic Antibody Engineering, Woodhead Publishing. Philadelphia, Pa. 2012. Ch. 3. p47-54, the contents of which are herein incorporated by reference in their entirety). Determining residues making up CDRs may include the use of numbering schemes including, but not limited to, those taught by Kabat [Wu, T. T. et al., 1970, JEM, 132(2):211-50 and Johnson, G. et al., 2000, Nucleic Acids Res. 28(1): 214-8, the contents of each of which are herein incorporated by reference in their entirety], Chothia [Chothia and Lesk, J. Mol. Biol. 196, 901 (1987). Chothia et al., Nature 342, 877 (1989) and Al-Lazikam, B. et al., 1997, J. Mol. Biol. 273(4):927-48, the contents of each of which are herein incorporated by reference in their entirety], Lefranc (Lefranc. M. P. et al., 2005, Imniunome Res. 1:3) and Honegger (Honegger, A. and Pluckthun, A. 2001, J. Mol. Biol. 309(3):657-70, the contents of which are herein incorporated by reference in their entirety).

[0212] V_{H} and V_{L} domains have three CDRs each. V_{L} CDRs are referred to herein as CDR-L1, CDR-L2 and CDR-L3, in order of occurrence when moving from N- to C-terminus along the variable domain polypeptide. V_{H} CDRs are referred to herein as CDR-H1, CDR-H2, and CDR-H3, in order of occurrence when moving from N- to C-terminus along the variable domain polypeptide. Each of CDRs have favored canonical structures with the exception of the CDR-H3, which comprises amino acid sequences that may be highly variable in sequence and length between antibodies resulting in a variety of three-dimensional structures in antigen-binding domains (Nikoloudis, D. et al., 2014. Peer J. 2:e456; the contents of which are herein incorporated by reference in their entirety). In some cases, CDR-H3s may be analyzed among a panel of related antibodies to assess antibody diversity. Various methods of determining CDR sequences are known in the art and may be applied to known antibody sequences (Strohl, W. R. Therapeutic Antibody Engineering, Woodhead Publishing, Philadelphia, Pa. 2012. Ch. 3, p47-54, the contents of which are herein incorporated by reference in their entirety).

[0213] As used herein, the term “Fv” refers to an antibody fragment comprising the minimum fragment on an antibody needed to form a complete antigen-binding site. These regions consist of a dimer of one heavy chain and one light chain variable domain in tight, non-covalent association. Fv fragments can be generated by proteolytic cleavage, but are largely unstable. Recombinant methods are known in the art for generating stable Fv fragments, typically through insertion of a flexible linker between the light chain variable domain and the heavy chain variable domain [to form a single chain Fv (scFv)] or through the introduction of a disulfide bridge between heavy and light drain variable domains (Strohl, W. R. Therapeutic Antibody Engineering, Woodhead Publishing, Philadelphia, Pa. 2012. Ch. 3, p46-47, the contents of which, are herein incorporated by reference in their entirety).

[0214] As used herein, the term “light chain” refers to a component of an antibody from any vertebrate species assigned to one of two clearly distinct types, called kappa and lambda based on amino acid sequences of constant domains. Depending on the amino acid sequence of the constant domain of their heavy chains, antibodies can be assigned to different classes. There are five major classes of intact antibodies: IgA, IgD, IgE, IgG, and IgM, and several of these may be further divided into subclasses (isotypes), e.g., IgG1, IgG2, IgG3, IgG4, IgA, and IgA2.

[0215] As used herein, the term “single chain Fv” or “scFv” refers to a fusion protein of V_{H} and V_{L} antibody domains, wherein these domains are linked together into a single polypeptide chain by a flexible peptide linker. In some embodiments, the Fv polypeptide linker enables the scFv to form the desired structure for antigen binding. In some embodiments, scFvs are utilized in conjunction with phage display, yeast display or other display methods where they may be expressed in association with a surface member (e.g. phage coat protein) and used in the identification of high affinity peptides for a given antigen.

[0216] As used herein, the term “bispeciflc antibody” refers to an antibody capable of binding two different antigens. Such antibodies typically comprise regions from at least two different antibodies. Bispeciflc antibodies may include any of those described in Riethmuller, G. 2012, Cancer Immunity. 12:12-18, Marvin, J. S. et al., 2005. Acta Pharmacologica Sinica. 26(6):649-58 and Schaefer, W. et al., 2011. PNAS. 108(27):11187-92, the contents of each of which are herein incorporated by reference in their entirety.

[0217] As used herein, the term “diabody” refers to a small antibody fragment with two antigen-binding sites. Diabodies comprise a heavy chain variable domain V_{H} connected to a light chain variable domain V_{L} in the same polypeptide chain. By using a linker that is too short to allow pairing between the two domains on the same chain, the domains are forced to pair with the complementary domains of another chain and create two antigen-binding sites. Diabodies are described more fully in, for example, EP 404097; WO 9311161; and Hollinger et al. (Hoilinger, P. et al., “Diabodies”: Small bivalent and bispeciflc antibody fragments. PNAS. 1993. 90:6444-8) the contents of each of which are incorporated herein by reference in their entirety.

[0218] The term “intrabody” refers to a form of antibody that is not secreted from, a cell in which it is produced, but instead targets one or more intracellular proteins. Intrabodies may be used to affect a multitude of cellular processes including, but not limited to intracellular trafficking, transcription, translation, metabolic processes, proliferative signaling, and cell division. In some embodiments, methods of the present invention may include intrabody-based therapies. In some such embodiments, variable domain sequences and/or CDR sequences disclosed herein may be incorporated into one or more constructs for intrabody-based therapy.

[0219] As used herein, the term “monoclonal antibody” refers to an antibody obtained from a population of substantially homogeneous cells (or clones), i.e., the individual antibodies comprising the population are identical and/or bind the same epitope, except for possible variants that may arise during production of the monoclonal antibodies, such variants generally being present in minor amounts. In contrast to polyclonal antibody preparations that typically include different antibodies directed against different determinants (epitopes), each monoclonal antibody is directed against a single determinant on the antigen.

[0220] The modifier “monoclonal” indicates the character of the antibody as being obtained from a substantially homogeneous population of antibodies, and is not to be construed as requiring production of the antibody by any particular method. The monoclonal antibodies herein include “chimeric” antibodies (immunoglobulins) in which a portion of the heavy and/or light chain is identical with or homologous to corresponding sequences in antibodies derived from a particular species or belonging to a particular antibody class or subclass, while the remainder of the chain(s) is identical with or homologous to corresponding sequences in antibodies derived from another species or belonging to another antibody class or subclass, as well as fragments of such antibodies.

[0221] As used herein, the term “humanized antibody” refers to a chimeric antibody comprising a minimal portion from one or more non-human (e.g., murine) antibody source(s) with the remainder derived from one or more human immunoglobulin sources. For the most part, humanized antibodies are human immunoglobulins (recipient antibody) in which residues from the hypervariable region from an antibody of the recipient are replaced by residues from the hypervariable region from an antibody of a non-human species (donor antibody) such as mouse, rat, rabbit or nonhuman primate having the desired specificity, affinity, and/or capacity.

[0222] In some embodiments, viral genomes of the present invention may encode antibody mimetics. As used herein, the term “antibody mimetic” refers to any molecule which mimics the function or effect of an antibody and which binds specifically and with high affinity to their molecular targets. In some embodiments, antibody mimetics may be monobodies, designed to incorporate the fibronectin type III domain (Fn3) as a protein scaffold (U.S. Pat. No. 6,673,901; U.S. Pat. No. 6,348,584). In some embodiments, antibody mimetics may be those known in the art including, but are not limited to affibody molecules, affilins, affitins, anticalms, avimers, Centyrins, DARPINS™, fynomers, Kunitz domains, and domain peptides. In other embodiments, antibody mimetics may include one or more non-peptide regions.

[0223] As used herein, the term “antibody variant” refers to a modified antibody (in relation to a native or starting antibody) or a biomolecule resembling a native or starting antibody in structure and/or function (e.g., an antibody mimetic). Antibody variants may be altered in their amino acid sequence, composition, or structure as compared to a native antibody. Antibody variants may include, but are not limited to, antibodies with altered isotypes (e.g., IgA, IgD, IgE, IgG1, IgG2, IgG3, IgG4, or IgM), humanized variants, optimized variants, muitispecific antibody variants (e.g., bispecific variants), and antibody fragments.

[0224] The preparation of antibodies, whether monoclonal or polyclonal, is known in the art. Techniques for the production of antibodies are well known in the art and described, e.g. in Harlow and Lane “Antibodies, A Laboratory Manual”, Cold Spring Harbor Laboratory Press, 1988; Harlow and Lane “Using Antibodies: A Laboratory Manual” Cold Spring Harbor Laboratory Press, 1999 and “Therapeutic Antibody Engineering: Current and Future Advances Driving the Strongest Growth Area in the Pharmaceutical Industry” Woodhead Publishing, 2012.

### Multispecific Antibodies

[0225] In some embodiments, payloads of the invention may encode antibodies that bind more than one epitope. As used herein, the terms “multibody” or “muitispecific antibody” refer to an antibody wherein two or more variable regions bind to different epitopes. The epitopes may be on the same or different targets. In certain embodiments, a multi-specific antibody is a “bispecific antibody,” which recognizes two different epitopes on the same or different antigens.

[0226] In one embodiment, multi-specific antibodies may be prepared by the methods used by BIOATLA® and described in International Patent publication WO201109726, the contents of which are herein incorporated by reference in their entirety. First a library of homologous, naturally occurring antibodies is generated by any method known in the art (i.e., mammalian cell surface display), then screened by FACS Aria or another screening method, for multi-specific antibodies that specifically bind to two or more target antigens. In one embodiment, the identified multi-specific antibodies are further evolved by any method known in the art, to produce a set of modified multi-specific antibodies. These modified multi-specific antibodies are screened for binding to the target antigens. In one embodiment, the multi-specific antibody may be further optimized by screening the evolved modified multi-specific antibodies for optimized or desired characteristics.

[0227] In one embodiment, multi-specific antibodies may be prepared by the methods used by BIOATLA® and described in United States Publication No. US20150252119, the contents of which are herein incorporated by reference in their entirely. In one approach, the variable domains of two parent antibodies, wherein the parent antibodies are monoclonal antibodies are evolved using any method known in the art in a manner that allows a single light chain to functionally complement heavy chains of two different parent antibodies. Another approach requires evolving the heavy chain of a single parent antibody to recognize a second target antigen. A third approach involves evolving the light chain of a parent antibody so as to recognize a second target antigen. Methods for polypeptide evolution are described in International Publication WO2012009026, the contents of which are herein incorporated by reference in their entirety, and include as non-limiting examples, Comprehensive Positional Evolution (CPE), Combinatorial Protein Synthesis (CPS), Comprehensive Positional Insertion (CPI), Comprehensive Positional Deletion (CPD), or any combination thereof. The Fc region of the multi-specific antibodies described in United States Publication No. US20150252119 may be created using a knob-in-hole approach, or any other method that allows the Fc domain to form heterodimers. The resultant multi-specific antibodies may be further evolved for improved characteristics or properties such as binding affinity for the target antigen.

### Bispeciflc Antibodies

[0228] In some embodiments, payloads of the invention may encode bispecific antibodies. Bispeciflc antibodies are capable of binding two different antigens. Such antibodies typically comprise antigen-binding regions from at least two different antibodies. For example, a bispecific monoclonal antibody (BsMAb, BsAb) is an artificial protein composed of fragments of two different monoclonal antibodies, thus allowing the BsAb to bind to two different types of antigen.

[0229] In some cases, payloads encode bispecific antibodies comprising antigen-binding regions from two different anti-tau antibodies. For example, such bispecific antibodies may comprise binding regions from two different antibodies selected from Table 3.

[0230] Bispecific antibody frameworks may include any of those described in Riethmuller, G., 2012. Cancer Immunity. 12:12-18; Marvin, J. S. et al., 2005. Acta Pharmacologica Sinica. 26(6):649-58; and Schaefer, W. et al., 2011. PNAS. 108(27);11187-92, the contents of each of which are herein incorporated by reference in their entirety.

[0231] New generations of BsMAb, called “trifunctional bispecific” antibodies, have been developed. These consis t of two heavy and two light chains, one each from two different antibodies, where the two Fab regions (the arms) are directed against two antigens, and the Fc region (the foot) comprises the two heavy chains and forms the third binding site.

[0232] Of the two paratopes that form the tops of the variable domains of a bispecific antibody, one can be directed against a target antigen and the other against a T-lymphocyie antigen like CD3. In the case of trifunctional antibodies, the Fc region may additionally bind to a cell that expresses Fc receptors, like a macrophage, a natural killer (NK) cell or a dendritic cell. In sum, the targeted cell is connected to one or two cells of the immune system, which subsequently destroy it.

[0233] Other types of bispecific antibodies have been designed to overcome certain problems, such as short half-life, immunogenicity and side-effects caused by cytokine liberation. They include chemically linked Fabs, consisting only of the Fab regions, and vanous types of bivalent and trivalent single-chain variable fragments (scFvs), fusion proteins mimicking the variable domains of two antibodies. The furthest developed of these newer formats are the bi-specific T-cell engagers (BiTEs) and mAb2's, antibodies engineered to contain an Fcab antigen-binding fragment instead of the Fc constant region.

[0234] Using molecular genetics, two scFvs can be engineered in tandem into a single polypeptide, separated by a linker domain, called a “tandem scFv” (tascFv). TascFvs have been found to be poorly soluble and require refolding when produced in bacteria, or they may be manufactured in mammalian cell culture systems, which avoids refolding requirements but may result in poor yields. Construction of a tascFv with genes for two different scFvs yields a “bispecific single-chain variable fragments” (bis-scFvs). Only two tascFvs have been developed clinically by commercial firms; both are bispecific agents in active early phase development by Micromet for oncologic indications, and are described as “Bispecific T-cell Engagers (BiTE).” Blinatumoniab is an anti-CD 19/anti-CD3 bispecific tascFv that potentiates T-cell responses to B-cell non-Hodgkin lymphoma in Phase 2. MT110 is an anti-EP-CAM/anti-CD3 bispecific tascFv that potentiates T-cell responses to solid tumors in Phase 1, Bispecific, tetravalent “TandAbs” are also being researched by Affimed (Nelson, A. L., MAbs.2010. Jan-Feb: 2(1);77-83).

[0235] In some embodiments, pay loads may encode antibodies comprising a single antigen-binding domain. These molecules are extremely small, with molecular weights approximately one-tenth of those observed for full-sized mAbs. Further antibodies may include “nanobodies” derived from the antigen-binding variable heavy chain regions (V_{HHS}) of heavy chain antibodies found in camels and llamas, which lack light chains (Nelson, A. L, MAbs.2010. Jan-Feb; 2(1):77-83).

[0236] Disclosed and claimed in PCT Publication WO2014144573 to Memorial Sioan-Kettering Cancer Center are multimerization technologies for making dimeric multispecific binding agents (e.g., fusion proteins comprising antibody components) with improved properties over multispecific binding agents without the capability of dimerization.

[0237] In some cases, payloads of the invention may encode tetravalent bispecific antibodies (TetBiAbs as disclosed and claimed in PCT Publication WO2014144357). TetBiAbs feature a second pair of Fab fragments with a. second antigen specificity attached to the C-terminus of an antibody, thus providing a molecule that is bivalent for each of the two antigen specificities. The tetravalent antibody is produced by genetic engineering methods, by linking an antibody heavy chain covalentiy to a Fab light chain, which associates with its cognate, co-expressed Fab heavy chain.

[0238] In some aspects, pay loads of the invention may encode biosynthetic antibodies as described in U.S. Pat. No. 5,091,513, the contents of which are herein incorporated by reference in their entirety. Such antibody may include one or more sequences of amino acids constituting a region which behaves as a biosynthetic antibody binding site (BABS). The sites comprise 1) non-covalently associated or disulfide bonded synthetic V_{H} and V_{L} dimers, 2) V_{H}-V_{L} or V_{L}-V_{H} single chains wherein the V_{H} and V_{L} are attached by a polypeptide linker, or 3) individuals V_{H} or V_{L} domains. The binding domains comprise linked CDR and FR regions, which may be derived from separate immunoglobulins. The biosynthetic antibodies may also include other polypeptide sequences which function, e.g., as an enzyme, toxin, binding site, or site of attachment to an immobilization media or radioactive atom. Methods are disclosed, for producing the biosynthetic antibodies, for designing BABS having any specificity that can be elicited by in vivo generation of antibody, and for producing analogs thereof.

[0239] In some embodiments, pay loads may encode antibodies with antibody acceptor frameworks taught in U.S. Pat. No. 8,399,625. Such antibody acceptor frameworks may be particularly well suited accepting CDRs from an antibody of interest. In some cases, CDRs from anti-tau antibodies known in the art or developed according to the methods presented herein may be used.

### Miniaturized Antibody

[0240] In one embodiment, the antibody encoded by the payloads of the invention may be a “miniaturized” antibody. Among the best examples of mAb miniaturization are the small modular immunopharmaceuticals (SMIPs) from Trubion Pharmaceuticals. These molecules, which can be monovalent or bivalent, are recombinant single-chain molecules containing one V_{L}, one V_{H} antigen-binding domain, and one or two constant “effector” domains, all connected by linker domains. Presumably, such a molecule might offer the advantages of increased tissue or tumor penetration claimed by fragments while retaining the immune effector functions conferred by constant domains. At least three “miniaturized” SMIPs have entered clinical development. TRU-015, an anti-CD20 SMIP developed in collaboration with Wyeth, is the most advanced project, having progressed to Phase 2 for rheumatoid arthritis (RA). Earlier attempts in systemic lupus erythrematosus (SLE) and B cell lymphomas were ultimately discontinued. Trubion and Facet Biotechnology are collaborating in the development of TRU-016, an anti-CD37 SMTP, for the treatment of CLL and other lymphoid neoplasias, a project that has reached Phase 2. Wyeth has licensed the anti-CD20 SMIP SBI-087 for the treatment of autoimmune diseases, including RA, SLE, and possibly multiple sclerosis, although these projects remain in the earliest stages of clinical testing. (Nelson. A. L., MAbs.2010, Jan-Feb; 2(1 ):77-83).

### Diabodies

[0241] In some embodiments, payloads of the invention may encode diabodies, Diabodies are functional bispecific single-chain antibodies (bscAb). These bivalent antigen-binding molecules are composed of non-covalent dimers of scFvs, and can be produced in mammalian cells using recombinant methods. (See, e.g., Mack et al, Proc. Natl. Acad. Sci., 92:7021-7025, 1995). Few diabodies have entered clinical development. An iodine-123-labeled. diabody version of the anti-CEA chimeric antibody cT84.66 has been evaluated for pre-surgical imniunosintigraphi.c detection of colorectal cancer in a study sponsored by the Beckman Research Institute of the City of Hope (Clinicaltnals.gov NCT00647153) (Nelson, A. L., MAbs., 2010. Jan-Feb; 2(1):77-83).

### Unibody

[0242] In some embodiments, payloads may encode a “unibody,” in which the hinge region has been removed from IgG4 molecules. While IgG4 molecules are unstable and can exchange light-heavy chain heterodimers with one another, deletion of the hinge region prevents heavy chain-heavy chain pairing entirely, leaving highly specific monovalent light/heavy heterodimers, while retaining the Fc region to ensure stability and half-life in vivo. This configuration may minimize the risk of immune activation or oncogenic growth, as IgG4 interacts poorly with FcRs and monovalent unibodies fail to promote intracellular signaling complex formation. These contentions are, however, largely supported by laboratory, rather than clinical, evidence. Other antibodies may be “miniaturized” antibodies, which are compacted 100 kDa antibodies (see, e.g., Nelson, A. L., MAbs., 2010. Jan-Feb; 2(1):77-83).

### Intrabodies

[0243] In some embodiments, payloads of the invention may encode intrabodies. Intrabodies are a form of antibody that is not secreted from a cell in which it is produced, but instead targets one or more intracellular proteins, Intrabodies are expressed and function intracellularly. and may be used to affect a multitude of cellular processes including, but not limited to intracellular trafficking, transcription, translation, metabolic processes, proliferative signaling and cell division. In some embodiments, methods described herein include intrabody-based therapies. In some such embodiments, variable domain sequences and/or CDR sequences disclosed herein are incorporated into one or more constructs for intrabody-based therapy. For example, intrabodies may target one or more glycated intracellular proteins or may modulate the interaction between one or more glycated intracellular proteins and. an alternative protein.

[0244] More than two decades ago, intracellular antibodies against intracellular targets were first described (Biocca, Neuberger and Cattaneo EMBO J. 9: 101-108, 1990). The intracellular expression of intrabodies in different compartments of mammalian cells allows blocking or modulation of the function of endogenous molecules (Biocca, et al., EMBO J. 9: 101-108. 1990, Colby et al., Proc. Natl. Acad. Sci. U.S.A. 1.01: 17616-21, 2004). Intrabodies can alter protein folding, protein-protein, protem-DNA, protein-RNA interactions and protein modification. They can induce a phenotypic knockout and work as neutralizing agents by direct binding to the target antigen, by diverting its intracellular trafficking or by inhibiting its association with binding partners. They have been largely employed as research tools and are emerging as therapeutic molecules for the treatment of human diseases such as viral pathologies, cancer and misfolding diseases. The fast-growing bio-market of recombinant antibodies provides intrabodies with enhanced binding specificity, stability, and solubility, together with lower immunogenicity, for their use in therapy (Biocca. abstract in Antibody Expression and Production Cell Engineering Volume 7, 2011, pp. 179-195).

[0245] In some embodiments, intrabodies have advantages over interfering RNA (iRNA); for example, iRNA has been shown to exert multiple non-specific effects, whereas intrabodies have been shown to have high specificity and affinity to target antigens. Furthermore, as proteins, intrabodies possess a much longer active half-life than iRNA. Thus, when the active half-life of the intracellular target molecule is long, gene silencing through iRNA may be slow to yield an effect, whereas the effects of intrabody expression can be almost instantaneous. Lastly, it is possible to design intrabodies to block certain binding interactions of a particular target molecule, while sparing others.

[0246] Intrabodies are often single chain variable fragments (scFvs) expressed from a recombinant nucleic acid molecule and engineered to be retained intracellularly (e.g., retained in the cytoplasm, endoplasmic reticulum, or periplasm). Intrabodies may be used, for example, to ablate the function of a protein to which the intrabody binds. The expression of intrabodies may also be regulated through the use of inducible promoters in the nucleic acid expression vector comprising the intrabody. Intrabodies may be produced for use in the viral genomes of the invention using methods known in the art, such as those disclosed and reviewed in: (Marasco et al., 1993 Proc. Natl. Acad. Sci. USA, 90: 7889-7893; Chen et al., 1994, Hum. Gem Ther. 5:595-601; Chen et al., 1994, Proc. Natl. Acad, Sci. USA, 91: 5932-5936; Maciejewski et al., 1995, Nature Med., 1: 667-673; Marasco, 1995, Immunotech, 1: 1-19; Mhashilkar, et al., 1995, EMBO J. 14: 1542-51, Chen et al., 1996, Hum. Gene Therap., 7: 1515-1525; Marasco. Gene Ther, 4: 11-15, 1997; Rondon and Marasco, 1997, Annu. Rev. Microbiol 51: 257-283; Cohen, et al., 1998, Oncogene 17:2445-56; Proba et al, 1998, J. Mol Biol 275:245-253; Cohen etal, 1998, Oncogene 17:2445-2456; Hassanzadeh, et al., 1998, FEBS Lett. 437:81-6; Richardson et al., 1998, Gene Ther. 5:635-44; Ohage and Steipe, 1999, J. Mol Biol 291:1119-1128; Ohage et al., 1999, J. Mol. Biol. 291:1129-1134; Wirtz and Steipe, 1999, Protein Sci. 8:2245-2250; Zhu et al., 1999, J. Immunol. Methods 231:207-222; Arafat et al., 2000, Cancer Gene Ther. 7:1250-6; der Maur et al., 2002, J. Biol. Chem. 277:45075-85; Mhashilkar et al., 2002, Gene Ther. 9:307-19; and Wheeler et al., 2003, FASEB J. 17: 1733-5; and references cited therein). In particular, a CCR5 intrabody has been produced by Steinberger el al., 2000, Proc. Natl Acad. Sci. USA 97:80-810). See generally Marasco, Wash., 1998, “Intrabodies: Basic Research and Clinical Gene Therapy Applications” Springer: New York; and for a review of scFvs, see Pluckthun in “The Pharmacology of Monoclonal Antibodies,” 1994, vol. 113, Rosenburg and Moore eds. Springer-Verlag, N.Y., pp. 269-315.

[0247] Sequences from donor antibodies may be used to develop intrabodies, Intrabodies are often recombinantly expressed as single domain fragments such as isolated V_{H} and V_{L} domains or as a single chain variable fragment (scFv) antibody within the cell. For example, intrabodies are often expressed as a single polypeptide to form a single chain antibody comprising the variable domains of the heavy and light chains joined by a flexible linker polypeptide. Intrabodies typically lack disulfide bonds and are capable of modulating the expression or activity of target genes through their specific binding activity. Single chain antibodies can also be expressed as a single chain variable region fragment joined to the light chain constant region.

[0248] As is known in the art, an intrabody can be engineered into recombinant polynucleotide vectors to encode sub-cellular trafficking signals at its N or C terminus to allow expression at high concentrations in the sub-cellular compartments where a target protein is located. For example, intrabodies targeted to the endoplasmic reticulum (ER) are engineered to incorporate a leader peptide and, optionally, a C-terminal ER retention signal, such as the KDEL amino acid motif (SEQ ID NO: 4323). Intrabodies intended to exert activity in the nucleus are engineered to include a nuclear localization signal. Lipid moieties are joined to intrabodies in order to tether the intrabody to the cytosolic side of the plasma membrane. Intrabodies can also be targeted to exert function in the cytosol. For example, cytosolic intrabodies are used to sequester factors within the cytosol, thereby preventing them from being transported to their natural cellular destination.

[0249] There are certain technical challenges with intrabody expression. In particular, protein conformational folding and structural stability of the newly-synthesized intrabody within the cell is affected by reducing conditions of the intracellular environment.

[0250] Intrabodies of the invention may be promising therapeutic agents for the treatment of misfoldmg diseases, including Tauopathies, prion diseases, Alzheimer's, Parkinson's, and Huntington's, because of their virtually infinite ability to specifically recognize the different conformations of a protein, including pathological isoforms, and because they can be targeted to the potential sites of aggregation (both intra- and extracellular sites). These molecules can work as neutralizing agents against amyloidogenic proteins by preventing their aggregation, and/or as molecular shunters of intracellular traffic by rerouting the protein from its potential aggregation site (Cardmale, and Biocca. Curr. Mol. Med. 2008, 8:2-11).

### Maxihodies

[0251] In one embodiment, the payloads of the invention encode a maxibody (bivalent scFV fused to the amino terminus of the Fc (CH2-CH3 domains) of IgG.

### Chimeric Antigen Receptors

[0252] In some embodiments, the polypeptides encoded by the viral genomes of the invention (e.g., antibodies) may be used to generate chimeric antigen receptors (CARs) as described by BIOATLA® in International Publications WO2016033331 and WO2016036916, the contents of which are herein incorporated by reference in their entirety. As used herein, a “chimeric antigen receptor (CAR)” refers to an artificial chimeric protein comprising at least one antigen specific targeting region (ASTR), wherein the antigen specific targeting region comprises a full-length antibody or a fragment thereof that specifically binds to a target antigen. The ASTR may comprise any of the following: a full length heavy or light chain, an Fab fragment, a single chain Fv fragment, a divalent single chain antibody, or a diabody. As a non-limiting example the ASTR of a CAR may be any of the antibodies listed in Table 3, antibody-based compositions or fragments thereof. Any molecule that is capable of binding a target antigen with high affinity can be used in the ASTR of a CAR. In one embodiment, the CAR may have more than one ASTR. These ASTRs may target two or more antigens or two or more epitopes of the same antigen. In one embodiment, the CAR is conditionally active. In one embodiment, the CAR is used to produce a genetically engineered cytotoxic cell earning the CAR and capable of targeting the antigen bound by the ASTR.

[0253] Chimeric antigen receptors (CARs) are particularly useful in the treatment of cancers, though also therapeutically effective in treatment of a wide variety of other diseases and disorders. Non-limiting examples of disease categories that may be treated with CARs or CAR-based therapeutics include autoimmune disorders, B-cell mediated diseases, inflammatory diseases, neuronal disorders, cardiovascular disease and circulatory disorders, or infectious diseases. Not wishing to be bound by theory, CARs traditionally work by targeting antigens presented on the surface of or on the inside of cells to be destroyed e.g., cancer tumor cells, by the cytotoxic cell of the CAR.

### Senescent Cell Surface Protein Antibodies

[0254] In some embodiments, the AAV particles may comprise nucleic acids which have been engineered to express of antibodies that selectively bind to surface marker proteins of senescent cells. For example, the antibodies may selectively bind to proteins that are in misfolded conformation. The binding antibodies may reduce the number of senescent cells and be used to treat age-related conditions, such as, but not limited to, Alzheimer's disease, cardiovascular disease, emphysema, sarcopenia, and tumorigenesis as well as conditions more cosmetic in nature such as signs of skin aging including wrinkling, sagging, discoloration, age-related tissue dysfunction, tumor formation, and other age-related conditions.

[0255] In one embodiment, the expressed antibodies binding to epitopes of senescent cell surface proteins may be, but are not limited to, such as prion epitopes presented by SEQ ID NO: 1-14 of International Publication No. WO2014186878; CD44 epitopes presented by SEQ ID NO: 47-51 of International Publication No. WO2014186878, TNFR epitopes presented by SEQ ID NO: 52-56 of International Publication No. WO2014186878; NOTCH1 epitope presented by SEQ ID NO: 57-61 of International Publication No. WO2014186878; FasR epitopes presented by SEQ ID NO: 62-66 of International Publication No. WO2014186878; epidermal growth factor epitopes presented by SEQ ID NO: 67-81 of International Publication No, WO2014186878; CD38 epitopes presented by SEQ ID NO: 82-86 of International Publication No. WO2014186878, the contents of each of which are herein incorporated by reference in their entirety.

[0256] In one embodiment, the expressed antibodies may comprise peptides binding to senescent cell surface prion proteins, such as, but not limited to, those presented by SEQ ID NO: 15-36 of International Publication No. WO2014186878, the contents of which are herein incorporated by reference in their entirety.

[0257] In one embodiment, the expressed antibody may be AMF-3a-118 or AMF 3d-19 (SEQ ID NO: 89-92 and 103-106 of International publication WO2014186878, respectively, the contents of which are herein incorporated by reference in their entirety) targeting senescent cell surface protein FasR. In one embodiment, the expressed antibody may be Ab c-120 (SEQ ID NO: 37-40 of International publication WO2014186878, the contents of which are herein incorporated by reference in their entirety) targeting senescent cell surface protein PrP.

### Payload Antibodies of the Invention

[0258] In one embodiment, the payload region of the AAV particle comprises one or more nucleic acid sequences encoding one or more of the payload antibody polypeptides listed in Table 3.

[0259] In one embodiment, the payload region of the AAV particle comprises one or more nucleic acid sequences listed in Table 3 or Table 4.

[0260] In some embodiments, the payload region of the AAV particle comprises a nucleic acid sequence encoding a payload antibody with at least 50% identity to one or more payload antibody polypeptides listed in Tables 3 or 4. The encoded antibody polypeptide may have 50%, 51%, 52%, 53%, 54%, 55%, 56%. 57%, 58%, 59%, 60%, 61%, 62%, 63%. 64%, 65%, 66%, 67%, 68%, 69%, 70%, 71%, 72%, 73%, 74%, 75%, 76%, 77%, 78%, 79%, 80%, 81%, 82%, 83%, 84%, 85%, 86%, 87%, 88%, 89%, 90%, 91%, 92%, 93%, 94%, 95%, 96%, 97%, 98%, 99%, or 100% identity to one or more of the pavload antibody polypeptides listed in Tables 3 or 4.

[0261] In one embodiment, the full sequence of the encoded antibody polypeptide may have 50%, 51%, 52%, 53%, 54%, 55%, 56%, 57%, 58%, 59%, 60%, 61%, 62%, 63%, 64%, 65%, 66%, 67%, 68%, 69%, 70%, 71%, 72%, 73%, 74%, 75%, 76%, 77%, 78%, 79%, 80%, 81%, 82%, 83%, 84%, 85%, 86%, 87%, 88%, 89%, 90%, 91%, 92%, 93%, 94%, 95%, 96%, 97%, 98%), 99%, or 100% identity to one or more of the payload antibody polypeptides listed in Tables 3 or 4.

[0262] In one embodiment, the variable region sequence(s) of the encoded antibody polypeptide may have 50%, 51%, 52%, 53%, 54%, 55%, 56%, 57%, 58%, 59%, 60%, 61%, 62%, 63%, 64%, 65%, 66%, 67%, 68%, 69%, 70%, 71%, 72%, 73%, 74%, 75%, 76%, 77%, 78%, 79%, 80%, 81%, 82%, 83%, 84%, 85%, 86%, 87%, 88%, 89%, 90%, 91%, 92%, 93%, 94%, 95%, 96%, 97%, 98%, 99%, or 100% identity to one or more of the payload antibody polypeptides listed in Tables 3 or 4.

[0263] In one embodiment, the heavy chain of the encoded antibody polypeptide may have 50%, 51%, 52%, 53%, 54%, 55%, 56%, 57%, 58%, 59%, 60%. 61%, 62%, 63%, 64%, 65%, 66%, 67%, 68%, 69%, 70%, 71%, 72%, 73%, 74%, 75%, 76%, 77%, 78%, 79%, 80%, 81%, 82%, 83%, 84%, 85%, 86%, 87%, 88%, 89%, 90%, 91%, 92%, 93%, 94%, 95%, 96%, 97%, 98%, 99%, or 100% identity to one or more of the payload heavy chain antibody polypeptides listed in Tables 3 or 4.

[0264] In one embodiment, the light chain of the encoded antibody polypeptide may have 50%, 51%, 52%, 53%, 54%, 55%, 56%, 57%, 58%, 59%, 60%. 61%, 62%, 63%, 64%, 65%, 66%, 67%, 68%, 69%, 70%, 71%, 72%, 73%, 74%, 75%, 76%. 77%, 78%, 79%, 80%, 81%, 82%, 83%, 84%, 85%, 86%, 87%, 88%, 89%, 90%, 91%, 92%, 93%, 94%, 95%, 96%, 97%, 98%, 99%, or 100% identity to one or more of the payload light chain antibody polypeptides listed in Tables 3 or 4.

[0265] In one embodiment, the CDR region of the encoded antibody polypeptide may have 50%, 51%, 52%, 53%, 54%, 55%, 56%, 57%, 58%, 59%, 60%, 61%, 62%, 63%, 64%, 65%, 66%, 67%, 68%, 69%, 70%, 71%, 72%, 73%, 74%, 75%, 76%, 77%, 78%, 79%, 80%, 81%, 82%, 83%, 84%, 85%, 86%, 87%, 88%, 89%, 90%, 91%, 92%, 93%, 94%, 95%, 96%, 97%, 98%, 99%, or 100% identity to the CDRs of one or more of the payload antibody polypeptides listed in Tables 3 or 4.

[0266] In one embodiment, the payload antibody has 90% identity to one or more of the antibody polypeptides listed in Tables 3 or 4.

[0267] In one embodiment, the payload antibody has 91 % identity to one or more of the antibody polypeptides listed in Tables 3 or 4.

[0268] In one embodiment, the payload antibody has 92% identity to one or more of the antibody polypeptides listed in Tables 3 or 4.

[0269] In one embodiment, the payload antibody has 93% identity to one or more of the antibody polypeptides listed in Tables 3 or 4.

[0270] In one embodiment, the payload antibody has 94% identity to one or more of the antibody polypeptides listed in Tables 3 or 4.

[0271] In one embodiment, the payload antibody has 95% identity to one or more of the antibody polypeptides listed in Tables 3 or 4.

[0272] In one embodiment, the payload antibody has 96% identity to one or more of the antibody polypeptides listed in Tables 3 or 4.

[0273] In one embodiment, the payload antibody has 97% identity to one or more of the antibody polypeptides listed in Tables 3 or 4.

[0274] In one embodiment, the payload antibody has 98% identity to one or more of the antibody polypeptides listed in Tables 3 or 4.

[0275] In one embodiment, the payload antibody has 99% identity to one or more of the antibody polypeptides listed in Tables 3 or 4.

[0276] In one embodiment, the payload antibody has 100% identity to one or more of the antibody polypeptides listed in Tables 3 or 4.

[0277] In some embodiments, the payload region of the AAV particle comprises a nucleic acid sequence with at least 50% identity to one or more nucleic acid sequences listed in Tables 3 or 4. The payload nucleic acid sequence may have 50%, 51%, 52%, 53%, 54%, 55%, 56%, 57%, 58%, 59%, 60%, 61%, 62%, 63%, 64%, 65%, 66%, 67%, 68%, 69%, 70%, 71%, 72%, 73%, 74%, 75%, 76%, 77%, 78%, 79%, 80%, 81%, 82%, 83%, 84%, 85%, 86%, 87%, 88%, 89%, 90%, 91%, 92%, 93%, 94%, 95%, 96%, 97%, 98%, 99%, or 100% identity to one or more nucleic acid sequences listed in Tables 3 or 4.

[0278] In one embodiment, the payload nucleic acid sequence has 90% identity to one or more of the nucleic acid sequences listed in Tables 3 or 4.

[0279] In one embodiment, the payload nucleic acid sequence has 91% identity to one or more of the nucleic acid sequences listed in Tables 3 or 4.

[0280] In one embodiment, the payload nucleic acid sequence has 92% identity to one or more of the nucleic acid sequences listed in Tables 3 or 4.

[0281] In one embodiment, the payload nucleic acid sequence has 93% identity to one or more of the nucleic acid sequences listed in Tables 3 or 4.

[0282] In one embodiment, the payload nucleic acid sequence has 94% identity to one or more of the nucleic acid sequences listed in Tables 3 or 4.

[0283] In one embodiment, the payload nucleic acid sequence has 95% identity to one or more of the nucleic acid sequences listed in Tables 3 or 4.

[0284] In one embodiment, the payload nucleic acid sequence has 96% identity to one or more of the nucleic acid sequences listed in Tables 3 or 4.

[0285] In one embodiment, the payload nucleic acid sequence has 97% identity to one or more of the nucleic acid sequences listed in Tables 3 or 4.

[0286] In one embodiment, the payload nucleic acid sequence has 98% identity to one or more of the nucleic acid sequences listed in Tables 3 or 4.

[0287] In one embodiment, the payload nucleic acid sequence has 99% identity to one or more of the nucleic acid sequences listed in Tables 3 or 4.

[0288] In one embodiment, the payload nucleic acid sequence has 100% identity to one or more of the nucleic acid sequences listed in Tables 3 or 4,

TABLE 3
Tau Associated Disease Antibodies

| Antibody | | | | | |
|---|---|---|---|---|---|
| No. | Target | Description | Antibody Name | Reference | SEQ ID NO |
| TAU1 | tau | Heavy chain | MC-1 | | 2948 |
| TAU2 | tau | Heavy chain | PHF-1 | | 2949 |
| TAU3 | tau | Heavy chain | IPN002 | | 2950 |
| TAU4 | amyloids | Heavy chain | #118 | WO2010012004 SEQ ID NO: 11 | 2951 |
| TAU5 | amyloids | Heavy chain | #121 | WO2010012004 SEQ ID NO: 13 | 2952 |
| TAU6 | amyloids | Heavy chain | #204 | WO2010012004 SEQ ID NO: 17 | 2953 |
| TAU7 | amyloids | Heavy chain | #205 | WO2010012004 SEQ ID NO: 19 | 2954 |
| TAU8 | NOGO | Heavy chain | H6L13 FL | US20140147435 SEQ ID NO: 27 | 2955 |
| TAU9 | NOGO | Heavy chain | H16L16 FL, | US20140147435 SEQ ID NO: 31 | 2956 |
| | | | H16L18 FL | | |
| TAU10 | NOGO | Heavy chain | H18L16 FL | US20140147435 SEQ ID NO: 33 | 2957 |
| TAU11 | NOGO | Heavy chain | H19L13 FL, | US20140147435 SEQ ID NO: 92 | 2958 |
| | | | H19L16 FL, | | |
| | | | H19L18 FL | | |
| TAU12 | NOGO | Heavy chain | H20L13 FL, | US20140147435 SEQ ID NO: 93 | 2959 |
| | | | H20L16 FL, | | |
| | | | H20L18 FL | | |
| TAU13 | NOGO | Heavy chain | H21L13 FL, | US20140147435 SEQ ID NO: 94 | 2960 |
| | | | H21L16 FL, | | |
| | | | H21L18 FL | | |
| TAU14 | NOGO | Heavy chain | H25L13 FL, | US20140147435 SEQ ID NO: 98 | 2961 |
| | | | H25L16 FL, | | |
| | | | H25L18 FL | | |
| TAU15 | Nogo receptor-1 | Heavy chain | 5B10 | US20090215691 SEQ ID NO: 16 | 2962 |
| TAU16 | Nogo receptor-1 | Heavy chain | 5B10 | US20090215691 SEQ ID NO: 18 | 2963 |
| TAU17 | PrP | Heavy chain | Ab c-120 | WO2014186878 SEQ ID NO: 38 | 2964 |
| TAU18 | PrPC and/or | Heavy chain | | US20150166668 SEQ ID NO: 10 | 2965 |
| | PrPSc | | | | |
| TAU19 | PrPC and/or | Heavy chain | | U.S. Pat. No. 8,852,587 SEQ ID NO: 4 | 2966 |
| | PrPSc | | | | |
| TAU20 | tau | Heavy chain | VH antibody | US20150252102 SEQ ID NO: 93 | 2967 |
| TAU21 | tau | Heavy chain | hACl-36-3A8 | WO2013151762 SEQ ID NO: 24 | 2968 |
| | | | Ab1 | | |
| TAU22 | tau | Heavy chain | hACl-36-3B8 | WO2013151762 SEQ ID NO: 25 | 2969 |
| | | | Ab1 | | |
| TAU23 | tau | Heavy chain | hACl-36-3A8 | WO2013151762 SEQ ID NO: 26 | 2970 |
| | | | Ab1.v2 | | |
| TAU24 | tau | Heavy chain | hACl-36-3A8 | WO2013151762 SEQ ID NO: 27 | 2971 |
| | | | Ab1.v3 | | |
| TAU25 | tau | Heavy chain | hACl-36-3A8 | WO2013151762 SEQ ID NO: 28 | 2972 |
| | | | Ab1.v4 | | |
| TAU26 | tau | Heavy chain | hACl-36-3B8 | WO2013151762 SEQ ID NO: 29 | 2973 |
| | | | Ab1.v2 | | |
| TAU27 | tau | Heavy chain | hACl-36-3B8 | WO2013151762 SEQ ID NO: 30 | 2974 |
| | | | Ab1.v3 | | |
| TAU28 | tau | Heavy chain | hACl-36-3B8 | WO2013151762 SEQ ID NO: 31 | 2975 |
| | | | Ab1.v4 | | |
| TAU29 | tau | Heavy chain | IPN001 | U.S. Pat. No. 8,980,271 SEQ ID NO: 14 | 2976 |
| TAU30 | tau | Heavy chain | IPN002 | U.S. Pat. No. 8,980,271 SEQ ID NO: 16 | 2977 |
| TAU31 | tau | Heavy chain | ACl-36-3A8- | US20150175682 SEQ ID NO: 16 | 2978 |
| | | | Ab1 and hACl- | | |
| | | | 36-2B6-Ab1 | | |
| TAU32 | tau | Heavy chain | hACl-36-3A8- | US20150175682 SEQ ID NO: 17 | 2979 |
| | | | Ab1 and hACl- | | |
| | | | 36-2B6-Ab1 | | |
| TAU33 | tau | Heavy chain | hACl-36-2B6- | US20150175682 SEQ ID NO: 25 | 2980 |
| | | | Ab1 (IgG4) | | |
| TAU34 | tau | Heavy chain | hACl-36-3A8- | US20150175682 SEQ ID NO: 26 | 2981 |
| | | | Ab1.v2 (IgG4) | | |
| TAU35 | tau | Heavy chain | hACl-36-3A8- | US20150175682 SEQ ID NO: 27 | 2982 |
| | | | Ab1.v3 (IgG1) | | |
| TAU36 | tau | Heavy chain | hACl-36-3A8- | US20150175682 SEQ ID NO: 28 | 2983 |
| | | | Ab1.v4 (IgG1 | | |
| | | | N297G) | | |
| TAU37 | tau | Heavy chain | hACl-36-2B6- | US20150175682 SEQ ID NO: 29 | 2984 |
| | | | Ab1.v2 (IgG4) | | |
| TAU38 | tau | Heavy chain | hACl-36-2B6- | US20150175682 SEQ ID NO: 30 | 2985 |
| | | | Ab1.v3 (IgG1) | | |
| TAU39 | tau | Heavy chain | hACl-36-2B6- | US20150175682 SEQ ID NO: 31 | 2986 |
| | | | Ab1.v4 (IgG1 | | |
| | | | N297G) | | |
| TAU40 | trk-C | Heavy chain | 2250 | U.S. Pat. No. 7,615,383 SEQ ID NO: 42 | 2987 |
| TAU41 | trk-C | Heavy chain | 2253 | U.S. Pat. No. 7,615,383 SEQ ID NO: 43 | 2988 |
| TAU42 | trk-C | Heavy chain | 2256 | U.S. Pat. No. 7,615,383 SEQ ID NO: 44 | 2989 |
| TAU43 | trk-C | Heavy chain | 6.1.2 | U.S. Pat. No. 7,615,383 SEQ ID NO: 45 | 2990 |
| TAU44 | trk-C | Heavy chain | 6.4.1 | U.S. Pat. No. 7,615,383 SEQ ID NO: 46 | 2991 |
| TAU45 | trk-C | Heavy chain | 2345 | U.S. Pat. No. 7,615,383 SEQ ID NO: 47 | 2992 |
| TAU46 | trk-C | Heavy chain | 2349 | U.S. Pat. No. 7,615,383 SEQ ID NO: 48 | 2993 |
| TAU47 | tau | Heavy chain | hACl-36-3A8- | US20150175682 SEQ ID NO: 14 | 2994 |
| | | constant | Ab1 and hACl- | | |
| | | region | 36-2B6-Ab1 | | |
| TAU48 | many | Heavy chain | | U.S. Pat. No. 8,053,569 SEQ ID NO: 25 | 2995 |
| | | fusion protein | | | |
| TAU49 | many | Heavy chain | | U.S. Pat. No. 8,053,569 SEQ ID NO: 28 | 2996 |
| | | fusion protein | | | |
| TAU50 | many | Heavy chain | | U.S. Pat. No. 8,053,569 SEQ ID NO: 34 | 2997 |
| | | fusion protein | | | |
| TAU51 | many - growth | Heavy chain | | U.S. Pat. No. 8,053,569 SEQ ID NO: 24 | 2998 |
| | factors (to | fusion protein | | | |
| | increase | | | | |
| | transport | | | | |
| | across BBB) | | | | |
| TAU52 | NOGO | Heavy chain | 2A10 construct | WO2007003421 SEQ ID NO: 79 | 2999 |
| | | humanized | | | |
| | | construct H1 | | | |
| TAU53 | NOGO | Heavy chain | 2A10 construct | WO2007003421 SEQ ID NO: 29 | 3000 |
| | | humanized | | | |
| | | construct H14 | | | |
| TAU54 | NOGO | Heavy chain | 2A10 construct | WO2007003421 SEQ ID NO: 30 | 3001 |
| | | humanized | | | |
| | | construct H15 | | | |
| TAU55 | NOGO | Heavy chain | 2A10 construct | WO2007003421 SEQ ID NO: 31 | 3002 |
| | | humanized | | | |
| | | construct H16 | | | |
| TAU56 | NOGO | Heavy chain | 2A10 construct | WO2007003421 SEQ ID NO: 32 | 3003 |
| | | humanized | | | |
| | | construct H17 | | | |
| TAU57 | NOGO | Heavy chain | 2A10 construct | WO2007003421 SEQ ID NO: 33 | 3004 |
| | | humanized | | | |
| | | construct H18 | | | |
| TAU58 | NOGO | Heavy chain | 2A10 construct | WO2007003421 SEQ ID NO: 92 | 3005 |
| | | humanized | | | |
| | | construct H19 | | | |
| TAU59 | NOGO | Heavy chain | 2A10 construct | WO2007003421 SEQ ID NO: 93 | 3006 |
| | | humanized | | | |
| | | construct H20 | | | |
| TAU60 | NOGO | Heavy chain | 2A10 construct | WO2007003421 SEQ ID NO: 94 | 3007 |
| | | humanized | | | |
| | | construct H21 | | | |
| TAU61 | NOGO | Heavy chain | 2A10 construct | WO2007003421 SEQ ID NO: 95 | 3008 |
| | | humanized | | | |
| | | construct H22 | | | |
| TAU62 | NOGO | Heavy chain | 2A10 construct | WO2007003421 SEQ ID NO: 96 | 3009 |
| | | humanized | | | |
| | | construct H23 | | | |
| TAU63 | NOGO | Heavy chain | 2A10 construct | WO2007003421 SEQ ID NO: 97 | 3010 |
| | | humanized | | | |
| | | construct H24 | | | |
| TAU64 | NOGO | Heavy chain | 2A10 construct | WO2007003421 SEQ ID NO: 98 | 3011 |
| | | humanized | | | |
| | | construct H25 | | | |
| TAU65 | NOGO | Heavy chain | 2A10 construct | WO2007003421 SEQ ID NO: 26 | 3012 |
| | | humanized | | | |
| | | construct H5 | | | |
| TAU66 | NOGO | Heavy chain | 2A10 construct | WO2007003421 SEQ ID NO: 27 | 3013 |
| | | humanized | | | |
| | | construct H6 | | | |
| TAU67 | NOGO | Heavy chain | 2A10 construct | WO2007003421 SEQ ID NO: 28 | 3014 |
| | | humanized | | | |
| | | construct | | | |
| | | H700 | | | |
| TAU68 | RTN4 | Heavy chain | Atinumab | U.S. Pat. No. 8,163,285 SEQ ID NO: 24 | 3015 |
| | (NOGO) | IgG4, | | | |
| | | immunomodulator | | | |
| TAU69 | tau | Heavy chain | ch4E4 | US20150252102 SEQ ID NO: 20 | 3016 |
| | | mature | | | |
| TAU70 | tau | Heavy chain | ch4E4(N30Q) | US20150252102 SEQ ID NO: 22 | 3017 |
| | | mature | | | |
| TAU71 | NOGO | Heavy chain | 2A10 construct | WO2007003421 SEQ ID NO: 77 | 3018 |
| | | variable | | | |
| | | humanized | | | |
| | | construct H1 | | | |
| TAU72 | NOGO | Heavy chain | 2A10 construct | WO2007003421 SEQ ID NO: 14 | 3019 |
| | | variable | | | |
| | | humanized | | | |
| | | construct H14 | | | |
| TAU73 | NOGO | Heavy chain | 2A10 construct | WO2007003421 SEQ ID NO: 15 | 3020 |
| | | variable | | | |
| | | humanized | | | |
| | | construct H15 | | | |
| TAU74 | NOGO | Heavy chain | 2A10 construct | WO2007003421 SEQ ID NO: 16 | 3021 |
| | | variable | | | |
| | | humanized | | | |
| | | construct H16 | | | |
| TAU75 | NOGO | Heavy chain | 2A10 construct | WO2007003421 SEQ ID NO: 17 | 3022 |
| | | variable | | | |
| | | humanized | | | |
| | | construct H17 | | | |
| TAU76 | NOGO | Heavy chain | 2A10 construct | WO2007003421 SEQ ID NO: 18 | 3023 |
| | | variable | | | |
| | | humanized | | | |
| | | construct H18 | | | |
| TAU77 | NOGO | Heavy chain | 2A10 construct | WO2007003421 SEQ ID NO: 85 | 3024 |
| | | variable | | | |
| | | humanized | | | |
| | | construct H19 | | | |
| TAU78 | NOGO | Heavy chain | 2A10 construct | WO2007003421 SEQ ID NO: 86 | 3025 |
| | | variable | | | |
| | | humanized | | | |
| | | construct H20 | | | |
| TAU79 | NOGO | Heavy chain | 2A10 construct | WO2007003421 SEQ ID NO: 87 | 3026 |
| | | variable | | | |
| | | humanized | | | |
| | | construct H21 | | | |
| TAU80 | NOGO | Heavy chain | 2A10 construct | WO2007003421 SEQ ID NO: 88 | 3027 |
| | | variable | | | |
| | | humanized | | | |
| | | construct H22 | | | |
| TAU81 | NOGO | Heavy chain | 2A10 construct | WO2007003421 SEQ ID NO: 89 | 3028 |
| | | variable | | | |
| | | humanized | | | |
| | | construct H23 | | | |
| TAU82 | NOGO | Heavy chain | 2A10 construct | WO2007003421 SEQ ID NO: 90 | 3029 |
| | | variable | | | |
| | | humanized | | | |
| | | construct H24 | | | |
| TAU83 | NOGO | Heavy chain | 2A10 construct | WO2007003421 SEQ ID NO: 91 | 3030 |
| | | variable | | | |
| | | humanized | | | |
| | | construct H25 | | | |
| TAU84 | NOGO | Heavy chain | 2A10 construct | WO2007003421 SEQ ID NO: 11 | 3031 |
| | | variable | | | |
| | | humanized | | | |
| | | construct H5 | | | |
| TAU85 | NOGO | Heavy chain | 2A10 construct | WO2007003421 SEQ ID NO: 12 | 3032 |
| | | variable | | | |
| | | humanized | | | |
| | | construct H6 | | | |
| TAU86 | NOGO | Heavy chain | 2A10 construct | WO2007003421 SEQ ID NO: 13 | 3033 |
| | | variable | | | |
| | | humanized | | | |
| | | construct | | | |
| | | H700 | | | |
| TAU87 | amyloid | Heavy chain | F11G3 | U.S. Pat. No. 9,125,846 SEQ ID NO: 11 | 3034 |
| | oligomers | variable | | | |
| | | region | | | |
| TAU88 | LPG(lysophosphatidylglucoside) | Heavy chain | #7 | U.S. Pat. No. 8,591,902 SEQ ID NO: 18 | 3035 |
| | | variable | | | |
| | | region | | | |
| TAU89 | LPG(lysophosphatidylglucoside) | Heavy chain | #15 | U.S. Pat. No. 8,591,902 SEQ ID NO: 8 | 3036 |
| | | variable | | | |
| | | region | | | |
| TAU90 | MAG | Heavy chain | | U.S. Pat. No. 8,071,731 SEQ ID NO: 13 | 3037 |
| | | variable | | | |
| | | region | | | |
| TAU91 | MAG | Heavy chain | | U.S. Pat. No. 8,071,731 SEQ ID NO: 14 | 3038 |
| | | variable | | | |
| | | region | | | |
| TAU92 | MAG | Heavy chain | | U.S. Pat. No. 8,071,731 SEQ ID NO: 15 | 3039 |
| | | variable | | | |
| | | region | | | |
| TAU93 | MAI (myelin | Heavy chain | | WO2013158748 SEQ ID NO: 1 | 3040 |
| | associated | variable | | | |
| | inhibitor) | region | | | |
| TAU94 | MAI (myelin | Heavy chain | | WO2013158748 SEQ ID NO: 17 | 3041 |
| | associated | variable | | | |
| | inhibitor) | region | | | |
| TAU95 | NMDA | Heavy chain | | EP2805972 SEQ ID NO: 43 | 3042 |
| | | variable | | | |
| | | region | | | |
| TAU96 | NOGO | Heavy chain | H5L13, H5L16, | US20140147435 SEQ ID NO: 11 | 3043 |
| | | variable | H5L18, H5L14, | | |
| | | region | H5L15, H5L17, | | |
| | | | H5L6, H5L11 | | |
| TAU97 | NOGO | Heavy chain | H6L13, H6L16, | US20140147435 SEQ ID NO: 12 | 3044 |
| | | variable | H6L18, H6L14, | | |
| | | region | H6L15, H6L17, | | |
| | | | H6L6 | | |
| TAU98 | NOGO | Heavy chain | H700L13, | US20140147435 SEQ ID NO: 13 | 3045 |
| | | variable | H700L16, | | |
| | | region | H700L18, | | |
| | | | H700L14, | | |
| | | | H700L15, | | |
| | | | H700L17, | | |
| | | | H700L6, | | |
| | | | H700L11 | | |
| TAU99 | NOGO | Heavy chain | H14L13, | US20140147435 SEQ ID NO: 14 | 3046 |
| | | variable | H14L16, | | |
| | | region | H14L18, | | |
| | | | H14L14, | | |
| | | | H14L15, | | |
| | | | H14L17, H14L6, | | |
| | | | H14L11 | | |
| TAU100 | NOGO | Heavy chain | H15L13, | US20140147435 SEQ ID NO: 15 | 3047 |
| | | variable | H15L16, | | |
| | | region | H15L18, | | |
| | | | H15L14, | | |
| | | | H15L15, | | |
| | | | H15L17, H15L6, | | |
| | | | H15L11 | | |
| TAU101 | NOGO | Heavy chain | H16L13, | US20140147435 SEQ ID NO: 16 | 3048 |
| | | variable | H16L16, | | |
| | | region | H16L18, | | |
| | | | H16L14, | | |
| | | | H16L15, | | |
| | | | H16L17, H16L6, | | |
| | | | H16L11 | | |
| TAU102 | NOGO | Heavy chain | H17L13, | US20140147435 SEQ ID NO: 17 | 3049 |
| | | variable | H17L16, | | |
| | | region | H17L18, | | |
| | | | H17L14, | | |
| | | | H17L15, | | |
| | | | H17L17, H17L6, | | |
| | | | H17L11 | | |
| TAU103 | NOGO | Heavy chain | H18L13, | US20140147435 SEQ ID NO: 18 | 3050 |
| | | variable | H18L16, | | |
| | | region | H18L18, | | |
| | | | H18L14, | | |
| | | | H18L15, | | |
| | | | H18L17, H18L6, | | |
| | | | H18L11 | | |
| TAU104 | NOGO | Heavy chain | H1L13, H1L16, | US20140147435 SEQ ID NO: 77 | 3051 |
| | | variable | H1L18, H1L14, | | |
| | | region | H1L15, H1L17, | | |
| | | | H1L6 | | |
| TAU105 | NOGO | Heavy chain | H19L13, | US20140147435 SEQ ID NO: 85 | 3052 |
| | | variable | H19L16, | | |
| | | region | H19L18, | | |
| | | | H19L14, | | |
| | | | H19L15, | | |
| | | | H19L17, H19L6, | | |
| | | | H19L11 | | |
| TAU106 | NOGO | Heavy chain | H20L13, | US20140147435 SEQ ID NO: 86 | 3053 |
| | | variable | H20L16, | | |
| | | region | H20L18, | | |
| | | | H20L14, | | |
| | | | H20L15, | | |
| | | | H20L17, H20L6, | | |
| | | | H20L11 | | |
| TAU107 | NOGO | Heavy chain | H21L13, | US20140147435 SEQ ID NO: 87 | 3054 |
| | | variable | H21L16, | | |
| | | region | H21L18, | | |
| | | | H21L14, | | |
| | | | H21L15, | | |
| | | | H21L17, H21L6, | | |
| | | | H21L11 | | |
| TAU108 | NOGO | Heavy chain | H22L13, | US20140147435 SEQ ID NO: 88 | 3055 |
| | | variable | H22L16, | | |
| | | region | H22L18, | | |
| | | | H22L14, | | |
| | | | H22L15, | | |
| | | | H22L17, H22L6, | | |
| | | | H22L11 | | |
| TAU109 | NOGO | Heavy chain | H23L13, | US20140147435 SEQ ID NO: 89 | 3056 |
| | | variable | H23L16, | | |
| | | region | H23L18, | | |
| | | | H23L14, | | |
| | | | H23L15, | | |
| | | | H23L17, H23L6, | | |
| | | | H23L11 | | |
| TAU110 | NOGO | Heavy chain | H24L13, | US20140147435 SEQ ID NO: 90 | 3057 |
| | | variable | H24L16, | | |
| | | region | H24L18, | | |
| | | | H24L14, | | |
| | | | H24L15, | | |
| | | | H24L17, H24L6, | | |
| | | | H24L11 | | |
| TAU111 | NOGO | Heavy chain | H25L13, | US20140147435 SEQ ID NO: 91 | 3058 |
| | | variable | H25L16, | | |
| | | region | H25L18, | | |
| | | | H25L14, | | |
| | | | H25L15, | | |
| | | | H25L17, H25L6, | | |
| | | | H25L11 | | |
| TAU112 | NOGO | Heavy chain | 2A10 | U.S. Pat. No. 7,988,964 SEQ ID NO: 37 | 3059 |
| | | variable | | | |
| | | region | | | |
| TAU113 | NOGO | Heavy chain | 2C4 | U.S. Pat. No. 7,988,964 SEQ ID NO: 38 | 3060 |
| | | variable | | | |
| | | region | | | |
| TAU114 | NOGO | Heavy chain | 15C3 | U.S. Pat. No. 7,988,964 SEQ ID NO: 39 | 3061 |
| | | variable | | | |
| | | region | | | |
| TAU115 | Nogo-66 | Heavy chain | Antibody clone | US20140065155 SEQ ID NO: 3 | 3062 |
| | | variable | 50 | | |
| | | region | | | |
| TAU116 | Nogo-66 | Heavy chain | Antibody clone | US20140065155 SEQ ID NO: 5 | 3063 |
| | | variable | 51 | | |
| | | region | | | |
| TAU117 | NogoA/NiG | Heavy chain | 6A3-Ig4 | WO2009056509 SEQ ID NO: 24 | 3064 |
| | | variable | | | |
| | | region | | | |
| TAU118 | NogoA/NiG | Heavy chain | 6A3-IgG1 | WO2009056509 SEQ ID NO: 4 | 3065 |
| | | variable | | | |
| | | region | | | |
| TAU119 | PrP | Heavy chain | ICSM18VH | US20140294844 SEQ ID NO: 4 | 3066 |
| | | variable | | | |
| | | region | | | |
| TAU120 | PrP | Heavy chain | Ab c-120 | WO2014186878 SEQ ID NO: 40 | 3067 |
| | | variable | | | |
| | | region | | | |
| TAU121 | PEPC and/or | Heavy chain | | US20150166668 SEQ ID NO: 8 | 3068 |
| | PrPSc | variable | | | |
| | | region | | | |
| TAU122 | RGM A | Heavy chain | 5F9.1-GL | US20150183871 SEQ ID NO: 35 | 3069 |
| | | variable | | | |
| | | region | | | |
| TAU123 | RGM A | Heavy chain | 5F9.2-GL | US20150183871 SEQ ID NO: 36 | 3070 |
| | | variable | | | |
| | | region | | | |
| TAU124 | RGM A | Heavy chain | 5F9.3-GL | US20150183871 SEQ ID NO: 37 | 3071 |
| | | variable | | | |
| | | region | | | |
| TAU125 | RGM A | Heavy chain | 5F9.4-GL | US20150183871 SEQ ID NO: 38 | 3072 |
| | | variable | | | |
| | | region | | | |
| TAU126 | RGM A | Heavy chain | 5F9.5-GL | US20150183871 SEQ ID NO: 39 | 3073 |
| | | variable | | | |
| | | region | | | |
| TAU127 | RGM A | Heavy chain | 5F9.6-GL | US20150183871 SEQ ID NO: 40 | 3074 |
| | | variable | | | |
| | | region | | | |
| TAU128 | RGM A | Heavy chain | 5F9.7-GL | US20150183871 SEQ ID NO: 41 | 3075 |
| | | variable | | | |
| | | region | | | |
| TAU129 | RGM A | Heavy chain | 5F9.8-GL | US20150183871 SEQ ID NO: 42 | 3076 |
| | | variable | | | |
| | | region | | | |
| TAU130 | RGM A | Heavy chain | 5F9.9-GL | US20150183871 SEQ ID NO: 43 | 3077 |
| | | variable | | | |
| | | region | | | |
| TAU131 | RGM A | Heavy chain | h5F9.1, h5F9.1, | US20150183871 SEQ ID NO: 47 | 3078 |
| | | variable | h5F9.1, h5F9.1, | | |
| | | region | h5F9.1, h5F9.2, | | |
| | | | h5F9.3 | | |
| TAU132 | RGM A | Heavy chain | h5F9.3, h5F9.9, | US20150183871 SEQ ID NO: 53 | 3079 |
| | | variable | h5F9.25 | | |
| | | region | | | |
| TAU133 | RGM A | Heavy chain | h5F9.4, h5F9.10, | US20150183871 SEQ ID NO: 54 | 3080 |
| | | variable | h5F9.26 | | |
| | | region | | | |
| TAU134 | RGMa | Heavy chain | AE12-1 | US20140023659 SEQ ID NO: 1 | 3081 |
| | | variable | | | |
| | | region | | | |
| TAU135 | RGMa | Heavy chain | AE12-20 | US20140023659 SEQ ID NO: 107 | 3082 |
| | | variable | | | |
| | | region | | | |
| TAU136 | RGMa | Heavy chain | AE12-21 | US20140023659 SEQ ID NO: 115 | 3083 |
| | | variable | | | |
| | | region | | | |
| TAU137 | RGMa | Heavy chain | AE12-23 | US20140023659 SEQ ID NO: 123 | 3084 |
| | | variable | | | |
| | | region | | | |
| TAU138 | RGMa | Heavy chain | AE12-24 | US20140023659 SEQ ID NO: 131 | 3085 |
| | | variable | | | |
| | | region | | | |
| TAU139 | RGMa | Heavy chain | AE12-3 | US20140023659 SEQ ID NO: 17 | 3086 |
| | | variable | | | |
| | | region | | | |
| TAU140 | RGMa | Heavy chain | AE12-4 | US20140023659 SEQ ID NO: 25 | 3087 |
| | | variable | | | |
| | | region | | | |
| TAU141 | RGMa | Heavy chain | AE12-5 | US20140023659 SEQ ID NO: 33 | 3088 |
| | | variable | | | |
| | | rrgion | | | |
| TAU142 | RGMa | Heavy chain | AE12-6 | US20140023659 SEQ ID NO: 41 | 3089 |
| | | variable | | | |
| | | region | | | |
| TAU143 | RGMa | Heavy chain | AE12-7 | US20140023659 SEQ ID NO: 49 | 3090 |
| | | variable | | | |
| | | region | | | |
| TAU144 | RGMa | Heavy chain | AE12-8 | US20140023659 SEQ ID NO: 57 | 3091 |
| | | variable | | | |
| | | region | | | |
| TAU145 | RGMa | Heavy chain | AE12-2 | US20140023659 SEQ ID NO: 9 | 3092 |
| | | variable | | | |
| | | region | | | |
| TAU146 | RGMa | Heavy chain | AE12-13 | US20140023659 SEQ ID NO: 91 | 3093 |
| | | variable | | | |
| | | region | | | |
| TAU147 | RGMa | Heavy chain | AE12-15 | US20140023659 SEQ ID NO: 99 | 3094 |
| | | variable | | | |
| | | region | | | |
| TAU148 | tau | Heavy chain | | WO2014100600 SEQ ID NO: 45 | 3095 |
| | | variable | | | |
| | | region | | | |
| TAU149 | tau | Heavy chain | NI-105.24B2 | US20150252102 SEQ ID NO: 13 | 3096 |
| | | variable | | | |
| | | region | | | |
| TAU150 | tau | Heavy chain | NI-105.4A3 | US20150252102 SEQ ID NO: 17 | 3097 |
| | | variable | | | |
| | | region | | | |
| TAU151 | tau | Heavy chain | NI-105.4E4 | US20150252102 SEQ ID NO: 9 | 3098 |
| | | variable | | | |
| | | region | | | |
| TAU152 | tau | Heavy chain | | WO2013041962 SEQ ID NO: 138 | 3099 |
| | | variable | | | |
| | | region | | | |
| TAU153 | tau | Heavy chain | | WO2013041962 SEQ ID NO: 139 | 3100 |
| | | variable | | | |
| | | region | | | |
| TAU154 | tau | Heavy chain | | WO2013041962 SEQ ID NO: 140 | 3101 |
| | | variable | | | |
| | | region | | | |
| TAU155 | tau | Heavy chain | | WO2013041962 SEQ ID NO: 145 | 3102 |
| | | variable | | | |
| | | region | | | |
| TAU156 | tau | Heavy chain | | WO2013041962 SEQ ID NO: 147 | 3103 |
| | | variable | | | |
| | | region | | | |
| TAU157 | tau | Heavy chain | | WO2013041962 SEQ ID NO: 148 | 3104 |
| | | variable | | | |
| | | region | | | |
| TAU158 | tau | Heavy chain | | WO2014100600 SEQ ID NO: 220 | 3105 |
| | | variable | | | |
| | | region | | | |
| TAU159 | tau | Heavy chain | NI-105.17C1 | WO2014100600 SEQ ID NO: 44 | 3106 |
| | | variable | | | |
| | | region | | | |
| TAU160 | tau | Heavy chain | | WO2014100600 SEQ ID NO: 47 | 3107 |
| | | variable | | | |
| | | region | | | |
| TAU161 | tau | Heavy chain | NI-105.6C5 | WO2014100600 SEQ ID NO: 48 | 3108 |
| | | variable | | | |
| | | region | | | |
| TAU162 | tau | Heavy chain | NI-105.29G10 | WO2014100600 SEQ ID NO: 50 | 3109 |
| | | variable | | | |
| | | region | | | |
| TAU163 | tau | Heavy chain | NI-105.6L9 | WO2014100600 SEQ ID NO: 52 | 3110 |
| | | variable | | | |
| | | region | | | |
| TAU164 | tau | Heavy chain | NI-105.40E8 | WO2014100600 SEQ ID NO: 54 | 3111 |
| | | variable | | | |
| | | region | | | |
| TAU165 | tau | Heavy chain | NI-105.48E5 | WO2014100600 SEQ ID NO: 56 | 3112 |
| | | variable | | | |
| | | region | | | |
| TAU166 | tau | Heavy chain | NI-105.6E3 | WO2014100600 SEQ ID NO: 58 | 3113 |
| | | variable | | | |
| | | region | | | |
| TAU167 | tau | Heavy chain | NI-105.22E1 | WO2014100600 SEQ ID NO: 60 | 3114 |
| | | variable | | | |
| | | region | | | |
| TAU168 | tau | Heavy chain | NI-105.26B12 | WO2014100600 SEQ ID NO: 62 | 3115 |
| | | variable | | | |
| | | region | | | |
| TAU169 | tau | Heavy chain | NI-105.12E12 | WO2014100600 SEQ ID NO: 65 | 3116 |
| | | variable | | | |
| | | region | | | |
| TAU170 | tau | Heavy chain | NI-105.60E7 | WO2014100600 SEQ ID NO: 67 | 3117 |
| | | variable | | | |
| | | region | | | |
| TAU171 | tau | Heavy chain | NI-105.14E2 | WO2014100600 SEQ ID NO: 69 | 3118 |
| | | variable | | | |
| | | region | | | |
| TAU172 | tau | Heavy chain | NI-105.39E2 | WO2014100600 SEQ ID NO: 71 | 3119 |
| | | variable | | | |
| | | region | | | |
| TAU173 | tau | Heavy chain | NI-105.19C6 | WO2014100600 SEQ ID NO: 73 | 3120 |
| | | variable | | | |
| | | region | | | |
| TAU174 | tau | Heavy chain | | WO2014100600 SEQ ID NO: 75 | 3121 |
| | | variable | | | |
| | | region | | | |
| TAU175 | tau | Heavy chain | NI-105.9C4 | WO2014100600 SEQ ID NO: 76 | 3122 |
| | | variable | | | |
| | | region | | | |
| TAU176 | tau | Heavy chain | | U.S. Pat. No. 9,304,138 SEQ ID NO: 1 | 3123 |
| | | variable | | | |
| | | region | | | |
| TAU177 | tau | Heavy chain | | U.S. Pat. No. 9,304,138 SEQ ID NO: 2 | 3124 |
| | | variable | | | |
| | | region | | | |
| TAU178 | tau | Heavy chain | | U.S. Pat. No. 9,304,138 SEQ ID NO: 3 | 3125 |
| | | variable | | | |
| | | region | | | |
| TAU179 | tau | Heavy chain | | U.S. Pat. No. 9,304,138 SEQ ID NO: 4 | 3126 |
| | | variable | | | |
| | | region | | | |
| TAU180 | tau | Heavy chain | | U.S. Pat. No. 9,304,138 SEQ ID NO: 5 | 3127 |
| | | variable | | | |
| | | region | | | |
| TAU181 | tau | Heavy chain | | U.S. Pat. No. 9,304,138 SEQ ID NO: 68 | 3128 |
| | | variable | | | |
| | | region | | | |
| TAU182 | tau | Heavy chain | | U.S. Pat. No. 9,304,138 SEQ ID NO: 76 | 3129 |
| | | variable | | | |
| | | region | | | |
| TAU183 | tau | Heavy chain | | U.S. Pat. No. 9,304,138 SEQ ID NO: 88 | 3130 |
| | | variable | | | |
| | | region | | | |
| TAU184 | tau | Heavy chain | | U.S. Pat. No. 9,304,138 SEQ ID NO: 96 | 3131 |
| | | variable | | | |
| | | region | | | |
| TAU185 | tau | Heavy chain | | U.S. Pat. No. 9,304,138 SEQ ID NO: 104 | 3132 |
| | | variable | | | |
| | | region | | | |
| TAU186 | tau | Heavy chain | hACl-36-3A8- | US20150175682 SEQ ID NO: 7 | 3133 |
| | | variable | Ab1 and hACl- | | |
| | | reegion | 36-2B6-Ab1 | | |
| TAU187 | tau | Heavy chain | hACl-36-3A8- | US20150175682 SEQ ID NO: 20 | 3134 |
| | | variable | Ab1.v2 | | |
| | | region | | | |
| TAU188 | tau | Heavy chain | hACl-36-2B6- | US20150175682 SEQ ID NO: 21 | 3135 |
| | | variable | Ab1.v2 | | |
| | | region | | | |
| TAU189 | tau | Heavy chain | ADx210 | US20140161875 SEQ ID NO: 15 | 3136 |
| | | variable | | | |
| | | region | | | |
| TAU190 | tau | Heavy chain | ADx210 subpart | US20140161875 SEQ ID NO: 17 | 3137 |
| | | variable | | | |
| | | region | | | |
| TAU191 | tau | Heavy chain | ADx215 | US20140161875 SEQ ID NO: 25 | 3138 |
| | | variable | | | |
| | | region | | | |
| TAU192 | tau | Heavy chain | IPN002 variant 1 | U.S. Pat. No. 8,926,974 SEQ ID NO: 36 | 3139 |
| | | variable | | | |
| | | region | | | |
| TAU193 | tau | Heavy chain | IPN002 variant 2 | U.S. Pat. No. 8,926,974 SEQ ID NO: 37 | 3140 |
| | | variable | | | |
| | | region | | | |
| TAU194 | tau | Heavy chain | IPN002 variant 3 | U.S. Pat. No. 8,926,974 SEQ ID NO: 38 | 3141 |
| | | variable | | | |
| | | region | | | |
| TAU195 | tau | Heavy chain | IPN002 variant 4 | U.S. Pat. No. 8,926,974 SEQ ID NO: 39 | 3142 |
| | | variable | | | |
| | | region | | | |
| TAU196 | tau | Heavy chain | PT1 | US20150307600 SEQ ID NO: 35 | 3143 |
| | | variable | | | |
| | | region | | | |
| TAU197 | tau | Heavy chain | PT3 | US20150307600 SEQ ID NO: 37 | 3144 |
| | | variable | | | |
| | | region | | | |
| TAU198 | tau antigen | Heavy chain | ADx202 | WO2015004163 SEQ ID NO: 14 | 3145 |
| | | variable | | | |
| | | region | | | |
| TAU199 | tau pS422 | Heavy chain | antibody | US20110059093 SEQ ID NO: 2 | 3146 |
| | | variable | Mab2.10.3 | | |
| | | region | | | |
| TAU200 | tau pS422 | Heavy chain | Mab 005 | US20110059093 SEQ ID NO: 22 | 3147 |
| | | variable | | | |
| | | region | | | |
| TAU201 | tau pS422 | Heavy chain | Mab 019 | US20110059093 SEQ ID NO: 30 | 3148 |
| | | variable | | | |
| | | region | | | |
| TAU202 | tau pS422 | Heavy chain | Mab 020 | US20110059093 SEQ ID NO: 38 | 3149 |
| | | variable | | | |
| | | region | | | |
| TAU203 | tau pS422 | Heavy chain | Mab 085 | US20110059093 SEQ ID NO: 46 | 3150 |
| | | variable | | | |
| | | region | | | |
| TAU204 | tau pS422 | Heavy chain | Mab 086 | US20110059093 SEQ ID NO: 54 | 3151 |
| | | variable | | | |
| | | region | | | |
| TAU205 | tau pS422 | Heavy chain | Mab 097 | US20110059093 SEQ ID NO: 62 | 3152 |
| | | variable | | | |
| | | region | | | |
| TAU206 | tau | Light chain | MC-1 | | 3153 |
| TAU207 | tau | Light chain | PHF-1 | | 3154 |
| TAU208 | tau | Light chain | IPN002 | | 3155 |
| TAU209 | amyloids | Light chain | #118 | WO2010012004 SEQ ID NO: 12 | 3156 |
| TAU210 | amyloids | Light chain | #121 | WO2010012004 SEQ ID NO: 14 | 3157 |
| TAU211 | amyloids | Light chain | #201 | WO2010012004 SEQ ID NO: 15 | 3158 |
| TAU212 | amyloids | Light chain | #204 | WO2010012004 SEQ ID NO: 16 | 3159 |
| TAU213 | amyloids | Light chain | #205 | WO2010012004 SEQ ID NO: 18 | 3160 |
| TAU214 | NOGO | Light chain | H6L13 FL, | US20140147435 SEQ ID NO: 35 | 3161 |
| | | | H19L13 FL, | | |
| | | | H20L13 FL, | | |
| | | | H21L13 FL, | | |
| | | | H25L13 FL | | |
| TAU215 | NOGO | Light chain | H16L16 FL, | US20140147435 SEQ ID NO: 38 | 3162 |
| | | | H19L16 FL, | | |
| | | | H20L16 FL, | | |
| | | | H21L16 FL, | | |
| | | | H25L16 FL, | | |
| | | | H18L16 FL | | |
| TAU216 | NOGO | Light chain | H16L18 FL, | US20140147435 SEQ ID NO: 40 | 3163 |
| | | | H19L18 FL, | | |
| | | | H20L18 FL, | | |
| | | | H21L18 FL, | | |
| | | | H25L18 FL | | |
| TAU217 | Nogo receptor-1 | Light chain | 7.00E+11 | US20090215691 SEQ ID NO: 15 | 3164 |
| TAU218 | Nogo receptor-1 | Light chain | 7.00E+11 | US20090215691 SEQ ID NO: 17 | 3165 |
| TAU219 | PrP | Light chain | Ab c-120 | WO2014186878 SEQ ID NO: 37 | 3166 |
| TAU220 | PrPC and/or | Light chain | | US20150166668 SEQ ID NO: 9 | 3167 |
| | PrPSc | | | | |
| TAU221 | PrPC and/or | Light chain | | U.S. Pat. No. 8,852,587 SEQ ID NO: 5 | 3168 |
| | PrPSc | | | | |
| TAU222 | tau | Light chain | hACl-36-3A8 | WO2013151762 SEQ ID NO: 22 | 3169 |
| | | | Ab1, hACl-36- | | |
| | | | 3A8 Ab1.v2, | | |
| | | | hACl-36-3A8 | | |
| | | | Ab1.v3, hACl- | | |
| | | | 36-3A8 Ab1.v4 | | |
| TAU223 | tau | Light chain | hACl-36-3B8 | WO2013151762 SEQ ID NO: 23 | 3170 |
| | | | Ab1, hACl-36- | | |
| | | | 3B8 Ab1.v2, | | |
| | | | hACl-36-3B8 | | |
| | | | Ab1.v3, hACl- | | |
| | | | 36-3B8 Ab1.v4 | | |
| TAU224 | tau | Light chain | IPN001 | U.S. Pat. No. 8,980,271 SEQ ID NO: 13 | 3171 |
| TAU225 | tau | Light chain | IPN002 | U.S. Pat. No. 8,980,271 SEQ ID NO: 15 | 3172 |
| TAU226 | tau | Light chain | hACl-36-3A8- | US20150175682 SEQ ID NO: 18 | 3173 |
| | | | Ab1 and hACl- | | |
| | | | 36-2B6-Ab1 | | |
| TAU227 | tau | Light chain | hACl-36-3A8- | US20150175682 SEQ ID NO: 22 | 3174 |
| | | | Ab1 (IgG4), | | |
| | | | hACl-36-3A8- | | |
| | | | Ab1.v2 (IgG4), | | |
| | | | hACl-36-3A8- | | |
| | | | Ab1.v3 (IgG1), | | |
| | | | and hACl-36- | | |
| | | | 3A8-Ab1.v4 | | |
| | | | (IgG1 N297G) | | |
| TAU228 | tau | Light chain | hACl-36-2B6- | US20150175682 SEQ ID NO: 23 | 3175 |
| | | | Ab1 (IgG4), | | |
| | | | hACl-36-2B6- | | |
| | | | Ab1.v2 (IgG4), | | |
| | | | hACl-36-2B6- | | |
| | | | Ab1.v3 (IgG1), | | |
| | | | and hACl-36- | | |
| | | | 2B6-Ab1.v4 | | |
| | | | (IgG1 N297G) | | |
| TAU229 | tau | Light chain | hACl-36-3A8- | US20150175682 SEQ ID NO: 24 | 3176 |
| | | | Ab1 (IgG4) | | |
| TAU230 | trk-C | Light chain | 2250 | U.S. Pat. No. 7,615,383 SEQ ID NO: 49 | 3177 |
| TAU231 | trk-C | Light chain | 2253 | U.S. Pat. No. 7,615,383 SEQ ID NO: 50 | 3178 |
| TAU232 | trk-C | Light chain | 2256 | U.S. Pat. No. 7,615,383 SEQ ID NO: 51 | 3179 |
| TAU233 | trk-C | Light chain | 6.1.2 | U.S. Pat. No. 7,615,383 SEQ ID NO: 52 | 3180 |
| TAU234 | trk-C | Light chain | 6.4.1 | U.S. Pat. No. 7,615,383 SEQ ID NO: 53 | 3181 |
| TAU235 | trk-C | Light chain | 2345 | U.S. Pat. No. 7,615,383 SEQ ID NO: 54 | 3182 |
| TAU236 | trk-C | Light chain | 2349 | U.S. Pat. No. 7,615,383 SEQ ID NO: 55 | 3183 |
| TAU237 | many | Light chain | | U.S. Pat. No. 8,053,569 SEQ ID NO: 31 | 3184 |
| | | fusion protein | | | |
| TAU238 | many | Light chain | | U.S. Pat. No. 8,053,569 SEQ ID NO: 36 | 3185 |
| | | fusion protein | | | |
| TAU239 | NOGO | Light chain | 2A10 construct | WO2007003421 SEQ ID NO: 80 | 3186 |
| | | humanized | | | |
| | | construct L11 | | | |
| TAU240 | NOGO | Light chain | 2A10 construct | WO2007003421 SEQ ID NO: 35 | 3187 |
| | | humanized | | | |
| | | construct L13 | | | |
| TAU241 | NOGO | Light chain | 2A10 construct | WO2007003421 SEQ ID NO: 36 | 3188 |
| | | humanized | | | |
| | | construct L14 | | | |
| TAU242 | NOGO | Light chain | 2A10 construct | WO2007003421 SEQ ID NO: 37 | 3189 |
| | | humanized | | | |
| | | construct L15 | | | |
| TAU243 | NOGO | Light chain | 2A10 construct | WO2007003421 SEQ ID NO: 38 | 3190 |
| | | humanized | | | |
| | | construct L16 | | | |
| TAU244 | NOGO | Light chain | 2A10 construct | WO2007003421 SEQ ID NO: 39 | 3191 |
| | | humanized | | | |
| | | construct L17 | | | |
| TAU245 | NOGO | Light chain | 2A10 construct | WO2007003421 SEQ ID NO: 40 | 3192 |
| | | humanized | | | |
| | | construct L18 | | | |
| TAU246 | NOGO | Light chain | 2A10 construct | WO2007003421 SEQ ID NO: 34 | 3193 |
| | | humanized | | | |
| | | construct L6 | | | |
| TAU247 | RTN4 | Light chain | Atinumab | U.S. Pat. No. 8,163,285 SEQ ID NO: 25 | 3194 |
| | | IgG4, | | | |
| | | immunomodulator | | | |
| TAU248 | tau | Light chain | ch4E4 | US20150252102 SEQ ID NO: 21 | 3195 |
| | | mature | | | |
| TAU249 | NOGO | Light chain | 2A10 construct | WO2007003421 SEQ ID NO: 78 | 3196 |
| | | variable | | | |
| | | humanized | | | |
| | | construct L11 | | | |
| TAU250 | NOGO | Light chain | 2A10 construct | WO2007003421 SEQ ID NO: 20 | 3197 |
| | | variable | | | |
| | | humanized | | | |
| | | construct L13 | | | |
| TAU251 | NOGO | Light chain | 2A10 construct | WO2007003421 SEQ ID NO: 21 | 3198 |
| | | variable | | | |
| | | humanized | | | |
| | | construct L14 | | | |
| TAU252 | NOGO | Light chain | 2A10 construct | WO2007003421 SEQ ID NO: 22 | 3199 |
| | | variable | | | |
| | | humanized | | | |
| | | construct L15 | | | |
| TAU253 | NOGO | Light chain | 2A10 construct | WO2007003421 SEQ ID NO: 23 | 3200 |
| | | variable | | | |
| | | humanized | | | |
| | | construct L16 | | | |
| TAU254 | NOGO | Light chain | 2A10 construct | WO2007003421 SEQ ID NO: 24 | 3201 |
| | | variable | | | |
| | | humanized | | | |
| | | construct L17 | | | |
| TAU255 | NOGO | Light chain | 2A10 construct | WO2007003421 SEQ ID NO: 25 | 3202 |
| | | variable | | | |
| | | humanized | | | |
| | | construct L18 | | | |
| TAU256 | NOGO | Light chain | 2A10 construct | WO2007003421 SEQ ID NO: 19 | 3203 |
| | | variable | | | |
| | | humanized | | | |
| | | construct L6 | | | |
| TAU257 | amyloid | Light chain | F11G3 | U.S. Pat. No. 9,125,846 SEQ ID NO: 12 | 3204 |
| | oligomers | variable | | | |
| | | region | | | |
| TAU258 | LPG(lysophosphatidylglucoside) | Light chain | #7 | U.S. Pat. No. 8,591,902 SEQ ID NO: 17 | 3205 |
| | | variable | | | |
| | | region | | | |
| TAU259 | LPG(lysophosphatidylglucoside) | Light chain | #15 | U.S. Pat. No. 8,591,902 SEQ ID NO: 7 | 3206 |
| | | variable | | | |
| | | region | | | |
| TAU260 | MAG | Light chain | | U.S. Pat. No. 8,071,731 SEQ ID NO: 16 | 3207 |
| | | variable | | | |
| | | region | | | |
| TAU261 | MAG | Light chain | | U.S. Pat. No. 8,071,731 SEQ ID NO: 17 | 3208 |
| | | variable | | | |
| | | region | | | |
| TAU262 | MAG | Light chain | | U.S. Pat. No. 8,071,731 SEQ ID NO: 18 | 3209 |
| | | variable | | | |
| | | region | | | |
| TAU263 | MAG | Light chain | | U.S. Pat. No. 8,071,731 SEQ ID NO: 19 | 3210 |
| | | variable | | | |
| | | region | | | |
| TAU264 | MAI (myelin | Light chain | | WO2013158748 SEQ ID NO: 11 | 3211 |
| | associated | variable | | | |
| | inhibitor) | region | | | |
| TAU265 | MAI (myelin | Light chain | | WO2013158748 SEQ ID NO: 27 | 3212 |
| | associated | variable | | | |
| | inhibitor) | region | | | |
| TAU266 | NMDA | Light chain | | EP2805972 SEQ ID NO: 44 | 3213 |
| | | variable | | | |
| | | region | | | |
| TAU267 | NOGO | Light chain | H1L6, H5L6, | US20140147435 SEQ ID NO: 19 | 3214 |
| | | variable | H6L6, H14L6, | | |
| | | region | H15L6, H16L6, | | |
| | | | H17L6, H18L6, | | |
| | | | H19L6, H20L6, | | |
| | | | H21L6, H22L6, | | |
| | | | H23L6, H24L6, | | |
| | | | H25L6, H700L6 | | |
| TAU268 | NOGO | Light chain | H1L13, H5L13, | US20140147435 SEQ ID NO: 20 | 3215 |
| | | variable | H6L13, H14L13, | | |
| | | region | H15L13, | | |
| | | | H16L13, | | |
| | | | H17L13, | | |
| | | | H18L13, | | |
| | | | H19L13, | | |
| | | | H20L13, | | |
| | | | H21L13, | | |
| | | | H22L13, | | |
| | | | H23L13, | | |
| | | | H24L13, | | |
| | | | H25L13, | | |
| | | | H700L13 | | |
| TAU269 | NOGO | Light chain | H1L14, H5L14, | US20140147435 SEQ ID NO: 21 | 3216 |
| | | variable | H6L14, H14L14, | | |
| | | region | H15L14, | | |
| | | | H16L14, | | |
| | | | H17L14, | | |
| | | | H18L14, | | |
| | | | H19L14, | | |
| | | | H20L14, | | |
| | | | H21L14, | | |
| | | | H22L14, | | |
| | | | H23L14, | | |
| | | | H24L14, | | |
| | | | H25L14, | | |
| | | | H700L14 | | |
| TAU270 | NOGO | Light chain | H1L15, H5L15, | US20140147435 SEQ ID NO: 22 | 3217 |
| | | variable | H6L15, H14L15, | | |
| | | region | H15L15, | | |
| | | | H16L15, | | |
| | | | H17L15, | | |
| | | | H18L15, | | |
| | | | H19L15, | | |
| | | | H20L15, | | |
| | | | H21L15, | | |
| | | | H22L15, | | |
| | | | H23L15, | | |
| | | | H24L15, | | |
| | | | H25L15, | | |
| | | | H700L15 | | |
| TAU271 | NOGO | Light chain | H1L16, H5L16, | US20140147435 SEQ ID NO: 23 | 3218 |
| | | variable | H6L16, H14L16, | | |
| | | region | H15L16, | | |
| | | | H16L16, | | |
| | | | H17L16, | | |
| | | | H18L16, | | |
| | | | H19L16, | | |
| | | | H20L16, | | |
| | | | H21L16, | | |
| | | | H22L16, | | |
| | | | H23L16, | | |
| | | | H24L16, | | |
| | | | H25L16, | | |
| | | | H700L16 | | |
| TAU272 | NOGO | Light chain | H1L17, H5L17, | US20140147435 SEQ ID NO: 24 | 3219 |
| | | variable | H6L17, H14L17, | | |
| | | region | H15L17, | | |
| | | | H16L17, | | |
| | | | H17L17, | | |
| | | | H18L17, | | |
| | | | H19L17, | | |
| | | | H20L17, | | |
| | | | H21L17, | | |
| | | | H22L17, | | |
| | | | H23L17, | | |
| | | | H24L17, | | |
| | | | H25L17, | | |
| | | | H700L17 | | |
| TAU273 | NOGO | Light chain | H1L18, H5L18, | US20140147435 SEQ ID NO: 25 | 3220 |
| | | variable | H6L18, H14L18, | | |
| | | region | H15L18, | | |
| | | | H16L18, | | |
| | | | H17L18, | | |
| | | | H18L18, | | |
| | | | H19L18, | | |
| | | | H20L18, | | |
| | | | H21L18, | | |
| | | | H22L18, | | |
| | | | H23L18, | | |
| | | | H24L18, | | |
| | | | H25L18, | | |
| | | | H700L18 | | |
| TAU274 | NOGO | Light chain | H5L11, H6L11, | US20140147435 SEQ ID NO: 78 | 3221 |
| | | variable | H14L11, | | |
| | | region | H15L11, | | |
| | | | H16L11, | | |
| | | | H17L11, | | |
| | | | H18L11, | | |
| | | | H19L11, | | |
| | | | H20L11, | | |
| | | | H21L11, | | |
| | | | H22L11, | | |
| | | | H23L11, | | |
| | | | H24L11, | | |
| | | | H25L11, | | |
| | | | H700L11 | | |
| TAU275 | NOGO | Light chain | 2A10 | U.S. Pat. No. 7,988,964 SEQ ID NO: 40 | 3222 |
| | | variable | | | |
| | | region | | | |
| TAU276 | NOGO | Light chain | 2C4 | U.S. Pat. No. 7,988,964 SEQ ID NO: 41 | 3223 |
| | | variable | | | |
| | | region | | | |
| TAU277 | Nogo-66 | Light chain | Antibody clone | US20140065155 SEQ ID NO: 4 | 3224 |
| | | variable | 50 | | |
| | | region | | | |
| TAU278 | Nogo-66 | Light chain | Antibody clone | US20140065155 SEQ ID NO: 6 | 3225 |
| | | variable | 51 | | |
| | | region | | | |
| TAU279 | NogoA/NiG | Light chain | 6A3-Ig4 | WO2009056509 SEQ ID NO: 25 | 3226 |
| | | variable | | | |
| | | region | | | |
| TAU280 | NogoA/NiG | Light chain | 6A3-IgG1 | WO2009056509 SEQ ID NO: 5 | 3227 |
| | | variable | | | |
| | | region | | | |
| TAU281 | PrP | Light chain | Ab c-120 | WO2014186878 SEQ ID NO: 39 | 3228 |
| | | variable | | | |
| | | region | | | |
| TAU282 | PrPC and/or | Light chain | | US20150166668 SEQ ID NO: 7 | 3229 |
| | PrPSc | variable | | | |
| | | region | | | |
| TAU283 | RGM A | Light chain | 5F9.1-GL, | US20150183871 SEQ ID NO: 44 | 3230 |
| | | variable | 5F9.1-GL, | | |
| | | region | 5F9.1-GL, | | |
| | | | 5F9.1-GL, | | |
| | | | 5F9.1-GL, | | |
| | | | 5F9.1-GL, | | |
| | | | 5F9.1-GL, | | |
| | | | 5F9.1-GL, | | |
| | | | 5F9.1-GL, | | |
| | | | 5F9.1-GL, | | |
| | | | h5F9.4, h5F9.11, | | |
| | | | h5F9.12 | | |
| TAU284 | RGM A | Light chain | 5F9.2-GL, | US20150183871 SEQ ID NO: 45 | 3231 |
| | | variable | 5F9.2-GL, | | |
| | | region | 5F9.2-GL, | | |
| | | | 5F9.2-GL, | | |
| | | | 5F9.2-GL, | | |
| | | | 5F9.2-GL, | | |
| | | | 5F9.2-GL, | | |
| | | | 5F9.2-GL, | | |
| | | | 5F9.2-GL, | | |
| | | | 5F9.2-GL, | | |
| | | | h5F9.5, h5F9.19, | | |
| | | | h5F9.20 | | |
| TAU285 | RGM A | Light chain | 5F9.3-GL, | US20150183871 SEQ ID NO: 46 | 3232 |
| | | variable | 5F9.3-GL, | | |
| | | region | 5F9.3-GL, | | |
| | | | 5F9.3-GL, | | |
| | | | 5F9.3-GL, | | |
| | | | 5F9.3-GL, | | |
| | | | 5F9.3-GL, | | |
| | | | 5F9.3-GL, | | |
| | | | 5F9.3-GL, | | |
| | | | 5F9.3-GL, | | |
| | | | h5F9.6, h5F9.21, | | |
| | | | h5F9.22 | | |
| TAU286 | RGM A | Light chain | h5F9.5, h5F9.6, | US20150183871 SEQ ID NO: 48 | 3233 |
| | | variable | h5F9.7, h5F9.8, | | |
| | | region | h5F9.9, h5F9.10 | | |
| TAU287 | RGM A | Light chain | h5F9.11, | US20150183871 SEQ ID NO: 49 | 3234 |
| | | variable | h5F9.19, h5F9.21 | | |
| | | region | | | |
| TAU288 | RGM A | Light chain | h5F9.12, | US20150183871 SEQ ID NO: 50 | 3235 |
| | | variable | h5F9.20, | | |
| | | region | h5F9.22, | | |
| | | | h5F9.23, | | |
| | | | h5F9.25, | | |
| | | | h5F9.25, | | |
| | | | h5F9.26 | | |
| TAU289 | RGM A | Light chain | h5F9.1, h5F9.7, | US20150183871 SEQ ID NO: 51 | 3236 |
| | | variable | h5F9.23 | | |
| | | region | | | |
| TAU290 | RGM A | Light chain | h5F9.2, h5F9.8, | US20150183871 SEQ ID NO: 52 | 3237 |
| | | variable | h5F9.25 | | |
| | | region | | | |
| TAU291 | RGMa | Light chain | AE12-15 | US20140023659 SEQ ID NO: 103 | 3238 |
| | | variable | | | |
| | | region | | | |
| TAU292 | RGMa | Light chain | AE12-20 | US20140023659 SEQ ID NO: 111 | 3239 |
| | | variable | | | |
| | | region | | | |
| TAU293 | RGMa | Light chain | AE12-21 | US20140023659 SEQ ID NO: 119 | 3240 |
| | | variable | | | |
| | | region | | | |
| TAU294 | RGMa | Light chain | AE12-23 | US20140023659 SEQ ID NO: 127 | 3241 |
| | | variable | | | |
| | | region | | | |
| TAU295 | RGMa | Light chain | AE12-2 | US20140023659 SEQ ID NO: 13 | 3242 |
| | | variable | | | |
| | | region | | | |
| TAU296 | RGMa | Light chain | AE12-24 | US20140023659 SEQ ID NO: 135 | 3243 |
| | | variable | | | |
| | | region | | | |
| TAU297 | RGMa | Light chain | AE12-3 | US20140023659 SEQ ID NO: 21 | 3244 |
| | | variable | | | |
| | | region | | | |
| TAU298 | RGMa | Light chain | AE12-4 | US20140023659 SEQ ID NO: 29 | 3245 |
| | | variable | | | |
| | | region | | | |
| TAU299 | RGMa | Light chain | AE12-5 | US20140023659 SEQ ID NO: 37 | 3246 |
| | | variable | | | |
| | | region | | | |
| TAU300 | RGMa | Light chain | AE12-6 | US20140023659 SEQ ID NO: 45 | 3247 |
| | | variable | | | |
| | | region | | | |
| TAU301 | RGMa | Light chain | AE12-1 | US20140023659 SEQ ID NO: 5 | 3248 |
| | | variable | | | |
| | | region | | | |
| TAU302 | RGMa | Light chain | AE12-7 | US20140023659 SEQ ID NO: 53 | 3249 |
| | | variable | | | |
| | | region | | | |
| TAU303 | RGMa | Light chain | AE12-8 | US20140023659 SEQ ID NO: 61 | 3250 |
| | | variable | | | |
| | | region | | | |
| TAU304 | RGMa | Light chain | AE12-13 | US20140023659 SEQ ID NO: 95 | 3251 |
| | | variable | | | |
| | | region | | | |
| TAU305 | tau | Light chain | NI-105.4E4 | US20150252102 SEQ ID NO: 11 | 3252 |
| | | variable | | | |
| | | region | | | |
| TAU306 | tau | Light chain | NI-105.24B2 | US20150252102 SEQ ID NO: 15 | 3253 |
| | | variable | | | |
| | | region | | | |
| TAU307 | tau | Light chain | NI-105.4A3 | US20150252102 SEQ ID NO: 19 | 3254 |
| | | variable | | | |
| | | region | | | |
| TAU308 | tau | Light chain | | WO2013041962 SEQ ID NO: 141 | 3255 |
| | | variable | | | |
| | | region | | | |
| TAU309 | tau | Light chain | | WO2013041962 SEQ ID NO: 142 | 3256 |
| | | variable | | | |
| | | region | | | |
| TAU310 | tau | Light chain | | WO2013041962 SEQ ID NO: 143 | 3257 |
| | | variable | | | |
| | | region | | | |
| TAU311 | tau | Light chain | | WO2013041962 SEQ ID NO: 150 | 3258 |
| | | variable | | | |
| | | region | | | |
| TAU312 | tau | Light chain | | WO2013041962 SEQ ID NO: 152 | 3259 |
| | | variable | | | |
| | | region | | | |
| TAU313 | tau | Light chain | | WO2013041962 SEQ ID NO: 153 | 3260 |
| | | variable | | | |
| | | region | | | |
| TAU314 | tau | Light chain | | WO2014100600 SEQ ID NO: 221 | 3261 |
| | | variable | | | |
| | | region | | | |
| TAU315 | tau | Light chain | | WO2014100600 SEQ ID NO: 222 | 3262 |
| | | variable | | | |
| | | region | | | |
| TAU316 | tau | Light chain | NI-105.17C1 | WO2014100600 SEQ ID NO: 46 | 3263 |
| | | variable | | | |
| | | region | | | |
| TAU317 | tau | Light chain | NI-105.6C5 | WO2014100600 SEQ ID NO: 49 | 3264 |
| | | variable | | | |
| | | region | | | |
| TAU318 | tau | Light chain | NI-105.29G10 | WO2014100600 SEQ ID NO: 51 | 3265 |
| | | variable | | | |
| | | region | | | |
| TAU319 | tau | Light chain | NI-105.6L9 | WO2014100600 SEQ ID NO: 53 | 3266 |
| | | variable | | | |
| | | region | | | |
| TAU320 | tau | Light chain | NI-105.40E8 | WO2014100600 SEQ ID NO: 55 | 3267 |
| | | variable | | | |
| | | region | | | |
| TAU321 | tau | Light chain | NI-105.48E5 | WO2014100600 SEQ ID NO: 57 | 3268 |
| | | variable | | | |
| | | region | | | |
| TAU322 | tau | Light chain | NI-105.6E3 | WO2014100600 SEQ ID NO: 59 | 3269 |
| | | variable | | | |
| | | region | | | |
| TAU323 | tau | Light chain | NI-105.22E1 | WO2014100600 SEQ ID NO: 61 | 3270 |
| | | variable | | | |
| | | region | | | |
| TAU324 | tau | Light chain | | WO2014100600 SEQ ID NO: 63 | 3271 |
| | | variable | | | |
| | | region | | | |
| TAU325 | tau | Light chain | NI-105.26B12 | WO2014100600 SEQ ID NO: 64 | 3272 |
| | | variable | | | |
| | | region | | | |
| TAU326 | tau | Light chain | NI-105.12E12 | WO2014100600 SEQ ID NO: 66 | 3273 |
| | | variable | | | |
| | | region | | | |
| TAU327 | tau | Light chain | NI-105.60E7 | WO2014100600 SEQ ID NO: 68 | 3274 |
| | | variable | | | |
| | | region | | | |
| TAU328 | tau | Light chain | NI-105.14E2 | WO2014100600 SEQ ID NO: 70 | 3275 |
| | | variable | | | |
| | | region | | | |
| TAU329 | tau | Light chain | NI-105.39E2 | WO2014100600 SEQ ID NO: 72 | 3276 |
| | | variable | | | |
| | | region | | | |
| TAU330 | tau | Light chain | NI-105.19C6 | WO2014100600 SEQ ID NO: 74 | 3277 |
| | | variable | | | |
| | | region | | | |
| TAU331 | tau | Light chain | | WO2014100600 SEQ ID NO: 77 | 3278 |
| | | variable | | | |
| | | region | | | |
| TAU332 | tau | Light chain | NI-105.9C4 | WO2014100600 SEQ ID NO: 78 | 3279 |
| | | variable | | | |
| | | region | | | |
| TAU333 | tau | Light chain | IPN002 variant 1 | U.S. Pat. No. 8,926,974 SEQ ID NO: 40 | 3280 |
| | | variable | | | |
| | | region | | | |
| TAU334 | tau | Light chain | IPN002 variant 2 | U.S. Pat. No. 8,926,974 SEQ ID NO: 41 | 3281 |
| | | variable | | | |
| | | region | | | |
| TAU335 | tau | Light chain | IPN002 variant 3 | U.S. Pat. No. 8,926,974 SEQ ID NO: 42 | 3282 |
| | | variable | | | |
| | | region | | | |
| TAU336 | tau | Light chain | IPN002 variant 4 | U.S. Pat. No. 8,926,974 SEQ ID NO: 43 | 3283 |
| | | variable | | | |
| | | region | | | |
| TAU337 | tau | Light chain | PT1 | US20150307600 SEQ ID NO: 36 | 3284 |
| | | variable | | | |
| | | region | | | |
| TAU338 | tau | Light chain | PT3 | US20150307600 SEQ ID NO: 38 | 3285 |
| | | variable | | | |
| | | region | | | |
| TAU339 | tau | Light chain | | U.S. Pat. No. 9,304,138 SEQ ID NO: 6 | 3286 |
| | | variable | | | |
| | | region | | | |
| TAU340 | tau | Light chain | | U.S. Pat. No. 9,304,138 SEQ ID NO: 7 | 3287 |
| | | variable | | | |
| | | region | | | |
| TAU341 | tau | Light chain | | U.S. Pat. No. 9,304,138 SEQ ID NO: 8 | 3288 |
| | | variable | | | |
| | | region | | | |
| TAU342 | tau | Light chain | | U.S. Pat. No. 9,304,138 SEQ ID NO: 9 | 3289 |
| | | variable | | | |
| | | region | | | |
| TAU343 | tau | Light chain | | U.S. Pat. No. 9,304,138 SEQ ID NO: 10 | 3290 |
| | | variable | | | |
| | | region | | | |
| TAU344 | tau | Light chain | | U.S. Pat. No. 9,304,138 SEQ ID NO: 11 | 3291 |
| | | variable | | | |
| | | region | | | |
| TAU345 | tau | Light chain | | U.S. Pat. No. 9,304,138 SEQ ID NO: 69 | 3292 |
| | | variable | | | |
| | | region | | | |
| TAU346 | tau | Light chain | | U.S. Pat. No. 9,304,138 SEQ ID NO: 77 | 3293 |
| | | variable | | | |
| | | region | | | |
| TAU347 | tau | Light chain | | U.S. Pat. No. 9,304,138 SEQ ID NO: 92 | 3294 |
| | | variable | | | |
| | | region | | | |
| TAU348 | tau | Light chain | | U.S. Pat. No. 9,304,138 SEQ ID NO: 97 | 3295 |
| | | variable | | | |
| | | region | | | |
| TAU349 | tau | Light chain | | U.S. Pat. No. 9,304,138 SEQ ID NO: 105 | 3296 |
| | | variable | | | |
| | | region | | | |
| TAU350 | tau | Light chain | | U.S. Pat. No. 9,304,138 SEQ ID NO: 116 | 3297 |
| | | variable | | | |
| | | region | | | |
| TAU351 | tau | Light chain | | U.S. Pat. No. 9,304,138 SEQ ID NO: 118 | 3298 |
| | | variable | | | |
| | | region | | | |
| TAU352 | tau | Light chain | hAC1-36-3A8- | US20150175682 SEQ ID NO: 8 | 3299 |
| | | variable | Ab1 | | |
| | | region | | | |
| TAU353 | tau | Light chain | hAC1-36-2B6- | US20150175682 SEQ ID NO: 9 | 3300 |
| | | variable | Ab1 | | |
| | | region | | | |
| TAU354 | tau | Light chain | ADx210 | US20140161875 SEQ ID NO: 16 | 3301 |
| | | variable | | | |
| | | region | | | |
| TAU355 | tau | Light chain | ADx210 isoform | US20140161875 SEQ ID NO: 18 | 3302 |
| | | variable | | | |
| | | region | | | |
| TAU356 | tau | Light chain | ADx215 | US20140161875 SEQ ID NO: 26 | 3303 |
| | | variable | | | |
| | | region | | | |
| TAU357 | tau antigen | Light chain | ADx202 | WO2015004163 SEQ ID NO: 9 | 3304 |
| | | variable | | | |
| | | region | | | |
| TAU358 | tau pS422 | Light chain | antibody | US20110059093 SEQ ID NO: 1 | 3305 |
| | | variable | Mab2.10.3 | | |
| | | region | | | |
| TAU359 | tau pS422 | Light chain | Mab 005 | US20110059093 SEQ ID NO: 26 | 3306 |
| | | variable | | | |
| | | region | | | |
| TAU360 | tau pS422 | Light chain | Mab 019 | US20110059093 SEQ ID NO: 34 | 3307 |
| | | variable | | | |
| | | region | | | |
| TAU361 | tau pS422 | Light chain | Mab 020 | US20110059093 SEQ ID NO: 42 | 3308 |
| | | variable | | | |
| | | region | | | |
| TAU362 | tau pS422 | Light chain | Mab 085 | US20110059093 SEQ ID NO: 50 | 3309 |
| | | variable | | | |
| | | region | | | |
| TAU363 | tau pS422 | Light chain | Mab 086 | US20110059093 SEQ ID NO: 58 | 3310 |
| | | variable | | | |
| | | region | | | |
| TAU364 | tau pS422 | Light chain | Mab 097 | US20110059093 SEQ ID NO: 66 | 3311 |
| | | variable | | | |
| | | region | | | |
| TAU365 | PrPC and/or | scFv | | U.S. Pat. No. 8,852,587 SEQ ID NO: 6 | 3312 |
| | PrPSc | | | | |
| TAU366 | amyloid | | M13 g3p | US20150376239 SEQ ID NO: 1 | 3313 |
| | proteins | | | | |
| TAU367 | amyloid | | Construct 5 | US20150376139 SEQ ID NO: 11 | 3314 |
| | proteins | | | | |
| TAU368 | amyloid | | Construct 6 | US20150376239 SEQ ID NO: 13 | 3315 |
| | proteins | | | | |
| TAU369 | amyloid | | fd N2 | US20150376239 SEQ ID NO: 14 | 3316 |
| | proteins | | | | |
| TAU370 | amyloid | | f1 N2 | US20150376239 SEQ ID NO: 15 | 3317 |
| | proteins | | | | |
| TAU371 | amyloid | | M13 N2 | US20150376239 SEQ ID NO: 16 | 3318 |
| | proteins | | | | |
| TAU372 | amyloid | | Ike N2 | US20150376239 SEQ ID NO: 17 | 3319 |
| | proteins | | | | |
| TAU373 | amyloid | | 12-2 N2 | US20150376239 SEQ ID NO: 18 | 3320 |
| | proteins | | | | |
| TAU374 | amyloid | | If1 N2 | US20150376239 SEQ ID NO: 19 | 3321 |
| | proteins | | | | |
| TAU375 | amyloid | | fd g3p | US20150376239 SEQ ID NO: 2 | 3322 |
| | proteins | | | | |
| TAU376 | amyloid | | Construct 3 | US20150376239 SEQ ID NO: 20 | 3323 |
| | proteins | | | | |
| TAU377 | amyloid | | Construct 3m | US20150376239 SEQ ID NO: 24 | 3324 |
| | proteins | | g3p portion | | |
| TAU378 | amyloid | | If1 g3p | US20150376239 SEQ ID NO: 29 | 3325 |
| | proteins | | | | |
| TAU379 | amyloid | | f1 g3p | US20150376239 SEQ ID NO: 3 | 3326 |
| | proteins | | | | |
| TAU380 | amyloid | | fd g3p | US20150376239 SEQ ID NO: 30 | 3327 |
| | proteins | | | | |
| TAU381 | amyloid | | Construct 8, rs- | US20150376239 SEQ ID NO: 31 | 3328 |
| | proteins | | g3p (If1-N1N2)- | | |
| | | | hIgG1-Fc | | |
| TAU382 | amyloid | | consensus | US20150376239 SEQ ID NO: 4 | 3329 |
| | proteins | | sequence of M13 | | |
| | | | g3p, fd g3p, f1 | | |
| | | | g3p | | |
| TAU383 | amyloid | | I2-2 g3p | US20150376239 SEQ ID NO: 5 | 3330 |
| | proteins | | | | |
| TAU384 | amyloid | | Ike g3p | US20150376239 SEQ ID NO: 6 | 3331 |
| | proteins | | | | |
| TAU385 | amyloid | | consensus | US20150376239 SEQ ID NO: 7 | 3332 |
| | proteins | | sequence of I2-2 | | |
| | | | g3p, Ike g3p | | |
| TAU386 | amyloid | | If1 g3p | US20150376239 SEQ ID NO: 8 | 3333 |
| | proteins | | | | |
| TAU387 | amyloid | | Construct 4 | US20150376239 SEQ ID NO: 9 | 3334 |
| | proteins | | | | |
| TAU388 | PrP | | ICSM181c | US20140294844 SEQ ID NO: 6 | 3335 |
| TAU389 | PrPC and/or | | | U.S. Pat. No. 8,852,587 SEQ ID NO: 3 | 3336 |
| | PrPSc | | | | |
| TAU390 | tau | | | US20140302046 SEQ ID NO: 103 | 3337 |
| TAU391 | B-amyloid | Heavy chain | 1B 1-40 | US20100323905 SEQ ID NO: 92 | 3338 |
| | | variable | | | |
| | | region | | | |
| | | antibody | | | |
| TAU392 | B-amyloid | Heavy chain | 3A 1-42 | US20100323905 SEQ ID NO: 94 | 3339 |
| | | variable | | | |
| | | region | | | |
| | | antibody | | | |
| TAU393 | B-amyloid | Heavy chain | FC5 | US20100323905 SEQ ID NO: 96 | 3340 |
| | | variable | | | |
| | | region | | | |
| | | antibody | | | |
| TAU394 | Tau | Chain A, | | Cehlar, O. et al., “Structure Of Tau | 3341 |
| | | Structure Of | | Peptide In Complex With Tau5 | |
| | | Tau Peptide | | Antib Fragment”, unpublished, | |
| | | In Complex | | 4TQE_A | |
| | | With Tau5 | | | |
| | | Antibody Fab | | | |
| | | Fragment | | | |
| TAU395 | Tau | Chain A and | | Shih, H. H., et al., An ultra-specific | 3342 |
| | | B, Structure | | avian antibody to phosphorylated | |
| | | Of The Anti- | | tau protein reveals a unique | |
| | | ptau Fab | | mechanism for phosphoepitope | |
| | | (pt231/ps235_1) | | recognition”, J. Biol. Chem. 287 | |
| | | In | | (53), 44425-44434 (2012), | |
| | | Complex | | Accession number 4GLR_A and | |
| | | With | | 4GLR_B | |
| | | Phosphoepitope | | | |
| | | Pt231/ps235 | | | |
| TAU396 | Tau | Chain P, | At8 Fab | Malia, T. J. et al, “Epitope mapping | 3343 |
| | | Anti-tau At8 | | and structural basis for the | |
| | | Fab With | | recognition of phosphorylated tau | |
| | | Doubly | | by the anti-tau antibody AT8”, | |
| | | Phosphorylated | | Proteins 84 (4), 427-434 (2016), | |
| | | Tau | | Accession number 5E2V_P | |
| | | Peptide | | | |
| TAU397 | Tau | Chain P, | At8 Fab | Malia, T. J. et al, “Epitope mapping | 3344 |
| | | Anti-tau At8 | | and structural basis for the | |
| | | Fab With | | recognition of phosphorylated tau | |
| | | Triply | | by the anti-tau antibody AT8”, | |
| | | Phosphorylated | | Proteins 84 (4), 427-434 (2016), | |
| | | Tau | | Accession number 5E2W_P | |
| | | Peptide | | | |
| TAU398 | Tau | Chain P, X- | Rb86 | Bujotzek, A. et al, “VH-VL | 3345 |
| | | ray Structure | | orientation prediction for antibody | |
| | | Of The Fab | | humanization candidate selection: A | |
| | | Fragment Of | | case study”, MAbs 8 (2), 288-305 | |
| | | The Anti Tau | | (2016), Accession number | |
| | | Antibody | | 5DMG_P, 5DMG_X, 5DMG_Z | |
| | | Rb86 In | | | |
| | | Complex | | | |
| | | With The | | | |
| | | Phosphorylated | | | |
| | | Tau | | | |
| | | Peptide (416-430) | | | |
| TAU399 | Tau | Heavy chain | cDC8E8 VH | WO2016079597 SEQ ID NO: 9; | 3346 |
| | | | | US20150050215 SEQ ID NO: 138 | |
| TAU400 | Tau | Heavy chain | RHA-IgG1 | WO2016079597 SEQ ID NO: 28 | 3347 |
| TAU401 | Tau | Heavy chain | RHB-IgG1 | WO2016079597 SEQ ID NO: 29 | 3348 |
| TAU402 | Tau | Heavy chain | RHC-IgG1 | WO2016079597 SEQ ID NO: 30 | 3349 |
| TAU403 | Tau | Heavy chain | RHD-IgG1 | WO2016079597 SEQ ID NO: 31 | 3350 |
| TAU404 | Tau | Heavy chain | RHE-IgG1 | WO2016079597 SEQ ID NO: 32 | 3351 |
| TAU405 | Tau | Heavy chain | RHF-IgG1 | WO2016079597 SEQ ID NO: 33 | 3352 |
| TAU406 | Tau | Heavy chain | RHG-IgG1 | WO2016079597 SEQ ID NO: 34 | 3353 |
| TAU407 | Tau | Heavy chain | RHH-IgG1 | WO2016079597 SEQ ID NO: 35 | 3354 |
| TAU408 | Tau | Heavy chain | RHI-IgG1 | WO2016079597 SEQ ID NO: 36 | 3355 |
| TAU409 | Tau | Heavy chain | RHJ-IgG1 | WO2016079597 SEQ ID NO: 37 | 3356 |
| TAU410 | Tau | Heavy chain | RHK-IgG1 | WO2016079597 SEQ ID NO: 38 | 3357 |
| TAU411 | Tau | Heavy chain | RHL-IgG1 | WO2016079597 SEQ ID NO: 39 | 3358 |
| TAU412 | Tau | Heavy chain | RHM-IgG1 | WO2016079597 SEQ ID NO: 40 | 3359 |
| TAU413 | Tau | Heavy chain | cDC8E8-IgG1 | WO2016079597 SEQ ID NO: 41 | 3360 |
| TAU414 | Tau | Heavy chain | mouse DC8E8- | WO2016079597 SEQ ID NO: 42 | 3361 |
| | | | IgG1 | | |
| TAU415 | Tau | Heavy chain | RHA-IgG4 | WO2016079597 SEQ ID NO: 43 | 3362 |
| TAU416 | Tau | Heavy chain | RHB-IgG4 | WO2016079597 SEQ ID NO: 44 | 3363 |
| TAU417 | Tau | Heavy chain | RHC-IgG4 | WO2016079597 SEQ ID NO: 45 | 3364 |
| TAU418 | Tau | Heavy chain | RHD-IgG4 | WO2016079597 SEQ ID NO: 46 | 3365 |
| TAU419 | Tau | Heavy chain | RHE-IgG4 | WO2016079597 SEQ ID NO: 47 | 3366 |
| TAU420 | Tau | Heavy chain | RHF-IgG4 | WO2016079597 SEQ ID NO: 48 | 3367 |
| TAU421 | Tau | Heavy chain | RHG-IgG4 | WO2016079597 SEQ ID NO: 49 | 3368 |
| TAU422 | Tau | Heavy chain | RHH-IgG4 | WO2016079597 SEQ ID NO: 50 | 3369 |
| TAU423 | Tau | Heavy chain | RHI-IgG4 | WO2016079597 SEQ ID NO: 51 | 3370 |
| TAU424 | Tau | Heavy chain | RHJ-IgG4 | WO2016079597 SEQ ID NO: 52 | 3371 |
| TAU425 | Tau | Heavy chain | RHK-IgG4 | WO2016079597 SEQ ID NO: 53 | 3372 |
| TAU426 | Tau | Heavy chain | RHL-IgG4 | WO2016079597 SEQ ID NO: 54 | 3373 |
| TAU427 | Tau | Heavy chain | RHM-IgG4 | WO2016079597 SEQ ID NO: 55 | 3374 |
| TAU428 | Tau | Heavy chain | cDC8E8-IgG4 | WO2016079597 SEQ ID NO: 56 | 3375 |
| TAU429 | Tau | Heavy chain | DC8E8 | WO2016079597 SEQ ID NO: 90 | 3376 |
| TAU430 | Tau | Heavy chain | cDC8E8 | WO2016079597 SEQ ID NO: 92 | 3377 |
| TAU431 | Tau | Heavy chain | OptiDC8E8 | WO2016079597 SEQ ID NO: 94 | 3378 |
| TAU432 | Tau | Heavy chain | RHA | WO2016079597 SEQ ID NO: 96 | 3379 |
| TAU433 | Tau | Heavy chain | RHB | WO2016079597 SEQ ID NO: 97 | 3380 |
| TAU434 | Tau | Heavy chain | RHC | WO2016079597 SEQ ID NO: 98 | 3381 |
| TAU435 | Tau | Heavy chain | RHD | WO2016079597 SEQ ID NO: 99 | 3382 |
| TAU436 | Tau | Heavy chain | RHE | WO2016079597 SEQ ID NO: 100 | 3383 |
| TAU437 | Tau | Heavy chain | RHF | WO2016079597 SEQ ID NO: 101 | 3384 |
| TAU438 | Tau | Heavy chain | RHG | WO2016079597 SEQ ID NO: 102 | 3385 |
| TAU439 | Tau | Heavy chain | RHH | WO2016079597 SEQ ID NO: 103 | 3386 |
| TAU440 | Tau | Heavy chain | RHI | WO2016079597 SEQ ID NO: 104 | 3387 |
| TAU441 | Tau | Heavy chain | RHJ | WO2016079597 SEQ ID NO: 105 | 3388 |
| TAU442 | Tau | Heavy chain | RHK | WO2016079597 SEQ ID NO: 106 | 3389 |
| TAU443 | Tau | Heavy chain | RHL | WO2016079597 SEQ ID NO: 107 | 3390 |
| TAU444 | Tau | Heavy chain | RHM | WO2016079597 SEQ ID NO: 108 | 3391 |
| TAU445 | Tau | Heavy chain | RHA-IgG1 | WO2016079597 SEQ ID NO: 111 | 3392 |
| TAU446 | Tau | Heavy chain | RHB-IgG1 | WO2016079597 SEQ ID NO: 112 | 3393 |
| TAU447 | Tau | Heavy chain | RHC-IgG1 | WO2016079597 SEQ ID NO: 113 | 3394 |
| TAU448 | Tau | Heavy chain | RHD-IgG1 | WO2016079597 SEQ ID NO: 114 | 3395 |
| TAU449 | Tau | Heavy chain | RHE-IgG1 | WO2016079597 SEQ ID NO: 115 | 3396 |
| TAU450 | Tau | Heavy chain | RHF-IgG1 | WO2016079597 SEQ ID NO: 116 | 3397 |
| TAU451 | Tau | Heavy chain | RHG-IgG1 | WO2016079597 SEQ ID NO: 117 | 3398 |
| TAU452 | Tau | Heavy chain | RHH-IgG1 | WO2016079597 SEQ ID NO: 118 | 3399 |
| TAU453 | Tau | Heavy chain | RHI-IgG1 | WO2016079597 SEQ ID NO: 119 | 3400 |
| TAU454 | Tau | Heavy chain | RHJ-IgG1 | WO2016079597 SEQ ID NO: 120 | 3401 |
| TAU455 | Tau | Heavy chain | RHK-IgG1 | WO2016079597 SEQ ID NO: 121 | 3402 |
| TAU456 | Tau | Heavy chain | RHL-IgG1 | WO2016079597 SEQ ID NO: 122 | 3403 |
| TAU457 | Tau | Heavy chain | RHM-IgG1 | WO2016079597 SEQ ID NO: 123 | 3404 |
| TAU458 | Tau | Heavy chain | cDC8E8-IgG1 | WO2016079597 SEQ ID NO: 124 | 3405 |
| TAU459 | Tau | Heavy chain | mouse DC8E8- | WO2016079597 SEQ ID NO: 125 | 3406 |
| | | | IgG1 | | |
| TAU-460 | Tau | Heavy chain | codon opt mouse | WO2016079597 SEQ ID NO: 126 | 3407 |
| | | | DC8E8 | | |
| TAU461 | Tau | Heavy chain | RHA-IgG4 | WO2016079597 SEQ ID NO: 127 | 3408 |
| TAU462 | Tau | Heavy chain | RHB-IgG4 | WO2016079597 SEQ ID NO: 128 | 3409 |
| TAU463 | Tau | Heavy chain | RHC-IgG4 | WO2016079597 SEQ ID NO: 129 | 3410 |
| TAU464 | Tau | Heavy chain | RHD-IgG4 | WO2016079597 SEQ ID NO: 130 | 3411 |
| TAU465 | Tau | Heavy chain | RHE-IgG4 | WO2016079597 SEQ ID NO: 131 | 3412 |
| TAU466 | Tau | Heavy chain | RHF-IgG4 | WO2016079597 SEQ ID NO: 132 | 3413 |
| TAU467 | Tau | Heavy chain | RHG-IgG4 | WO2016079597 SEQ ID NO: 133 | 3414 |
| TAU468 | Tau | Heavy chain | RHH-IgG4 | WO2016079597 SEQ ID NO: 134 | 3415 |
| TAU469 | Tau | Heavy chain | RHI-IgG4 | WO2016079597 SEQ ID NO: 135 | 3416 |
| TAU470 | Tau | Heavy chain | RHJ-IgG4 | WO2016079597 SEQ ID NO: 136 | 3417 |
| TAU471 | Tau | Heavy chain | RHK-IgG4 | WO2016079597 SEQ ID NO: 137 | 3418 |
| TAU472 | Tau | Heavy chain | RHL-IgG4 | WO2016079597 SEQ ID NO: 138 | 3419 |
| TAU473 | Tau | Heavy chain | RHM-IgG4 | WO2016079597 SEQ ID NO: 139 | 3420 |
| TAU474 | Tau | Heavy chain | cDC8E8-IgG4 | WO2016079597 SEQ ID NO: 140 | 3421 |
| TAU475 | Tau | Heavy chain | | U.S. Pat. No. 8,697,076 SEQ ID NO: 12 | 3422 |
| TAU476 | Tau | Heavy chain | 5202.4 | US20160024193 SEQ ID NO: 63 | 3423 |
| TAU477 | Tau | Heavy chain | | US20160031977 SEQ ID NO: 22 | 3424 |
| TAU478 | Tau | Heavy chain | | US20160031977 SEQ ID NO: 24 | 3425 |
| TAU479 | Tau | Heavy chain | | US20160031977 SEQ ID NO: 26 | 3426 |
| TAU480 | Tau | heavy chain | ch4A3-mIgG1- | US20150344553 SEQ ID NO: 213 | 3427 |
| | | | Agly | | |
| TAU481 | Tau | heavy chain | ch4E4(N30Q)- | US20150344553 SEQ ID NO: 214 | 3428 |
| | | | mIgG1-Agly | | |
| TAU482 | Tau | heavy chain | ch6C5-mIgG1- | US20150344553 SEQ ID NO: 215 | 3429 |
| | | | Agly | | |
| TAU483 | Tau | heavy chain | ch17C1-mIgG1- | US20150344553 SEQ ID NO: 216 | 3430 |
| | | | Agly | | |
| TAU484 | Tau | Heavy chain | human NI- | US20150344553 SEQ ID NO: 218 | 3431 |
| | | | 105.40E8(R104W)- | | |
| | | | hIgG1 | | |
| TAU485 | Tau | Heavy chain | NI- | US20150344553 SEQ ID NO: 43; | 3432 |
| | | | 105.4E4(N30Q) | U.S. Pat. No. 8,940,272 SEQ ID NO: 93 | |
| TAU486 | Tau | Heavy chain | | US20150050215 SEQ ID NO: 140 | 3433 |
| TAU487 | Tau | Heavy chain | | US20150050215 SEQ ID NO: 142 | 3434 |
| TAU488 | Tau | Heavy chain | pT231/pS235 | WO2014016737 SEQ ID NO: 70 | 3435 |
| TAU489 | Tau | heavy chain | ch40E8(R104W) | US20150344553 SEQ ID NO: 208 | 3436 |
| | | (mouse | | | |
| | | IgG2a) | | | |
| TAU490 | Tau | heavy chain | ch17C1 | US20150344553 SEQ ID NO: 203 | 3437 |
| | | (mouse | | | |
| | | IgG2a) | | | |
| TAU491 | Tau | heavy chain | ch6C5 | US20150344553 SEQ ID NO: 205 | 3438 |
| | | (mouse | | | |
| | | IgG2a) | | | |
| TAU492 | Tau | heavy chain | ch40E8 | US20150344553 SEQ ID NO: 207 | 3439 |
| | | (mouse | | | |
| | | IgG2a) | | | |
| TAU493 | Tau | heavy chain | ch6E3 | US20150344553 SEQ ID NO: 210 | 3440 |
| | | (mouse | | | |
| | | IgG2a) | | | |
| TAU494 | Tau | heavy chain | | WO2016079597 SEQ ID NO: 172 | 3441 |
| | | constant | | | |
| | | region | | | |
| TAU495 | Tau | heavy chain | | WO2016079597 SEQ ID NO: 173 | 3442 |
| | | constant | | | |
| | | region | | | |
| TAU496 | Tau | Heavy chain | | WO2015197823 SEQ ID NO: 83 | 3443 |
| | | constant | | | |
| | | region, IgGI | | | |
| TAU497 | Tau | Heavy chain | ch4E4(N30Q) | U.S. Pat. No. 8,940,272 SEQ ID NO: 22 | 3444 |
| | | mature | | | |
| | | (mouse | | | |
| | | IgG2a) | | | |
| TAU498 | Tau | Heavy chain | ch4E4 | U.S. Pat. No. 8,940,272 SEQ ID NO: 20 | 3445 |
| | | mature | | | |
| | | (mouse | | | |
| | | IgG2a) | | | |
| TAU499 | Tau | Heavy chain | ch4E4 | US20150344553 SEQ ID NO: 20 | 3446 |
| | | mature | | | |
| | | (mouse | | | |
| | | IgG2a) | | | |
| TAU500 | Tau | Heavy chain | ch4E4(N30Q) | US20150344553 SEQ ID NO: 22 | 3447 |
| | | mature | | | |
| | | (mouse | | | |
| | | IgG2a) | | | |
| TAU501 | Tau | Heavy chain | NI-105.4A3-VH | US20150344553 SEQ ID NO: 17; | 3448 |
| | | variable | | U.S. Pat. No. 8,940,272 SEQ ID NO: 17 | |
| TAU502 | Tau | Heavy chain | NI-105.24B2- | US20150344553 SEQ ID NO: 13; | 3449 |
| | | variable | VH | U.S. Pat. No. 8,940,272 SEQ ID NO: 13 | |
| TAU503 | Tau | Heavy chain | NI-105.4E4-VH | US20150344553 SEQ ID NO: 9; | 3450 |
| | | variable | | U.S. Pat. No. 8,940,272 SEQ ID NO: 9 | |
| TAU504 | Tau | Heavy chain | | US20150307600 SEQ ID NO: 35 | 3451 |
| | | variable | | | |
| TAU505 | Tau | Heavy chain | | US20150307600 SEQ ID NO: 37 | 3452 |
| | | variable | | | |
| TAU506 | Tau | Heavy chain | RHA | WO2016079597 SEQ ID NO: 13 | 3453 |
| | | variable | | | |
| | | region | | | |
| TAU507 | Tau | Heavy chain | RHB | WO2016079597 SEQ ID NO: 14 | 3454 |
| | | variable | | | |
| | | region | | | |
| TAU508 | Tau | Heavy chain | RHC | WO2016079597 SEQ ID NO: 15 | 3455 |
| | | variable | | | |
| | | region | | | |
| TAU509 | Tau | Heavy chain | RHD | WO2016079597 SEQ ID NO: 16 | 3456 |
| | | variable | | | |
| | | region | | | |
| TAU510 | Tau | Heavy chain | RHE | WO2016079597 SEQ ID NO: 17 | 3457 |
| | | variable | | | |
| | | region | | | |
| TAU511 | Tau | Heavy chain | RHF | WO2016079597 SEQ ID NO: 18 | 3458 |
| | | variable | | | |
| | | region | | | |
| TAU512 | Tau | Heavy chain | RHG | WO2016079597 SEQ ID NO: 19 | 3459 |
| | | variable | | | |
| | | region | | | |
| TAU513 | Tau | Heavy chain | RHH | WO2016079597 SEQ ID NO: 20 | 3460 |
| | | variable | | | |
| | | region | | | |
| TAU514 | Tau | Heavy chain | RHI | WO2016079597 SEQ ID NO: 21 | 3461 |
| | | variable | | | |
| | | region | | | |
| TAU515 | Tau | Heavy chain | RHJ | WO2016079597 SEQ ID NO: 22 | 3462 |
| | | variable | | | |
| | | region | | | |
| TAU516 | Tau | Heavy chain | RHK | WO2016079597 SEQ ID NO: 23 | 3463 |
| | | variable | | | |
| | | region | | | |
| TAU517 | Tau | Heavy chain | RHL | WO2016079597 SEQ ID NO: 24 | 3464 |
| | | variable | | | |
| | | region | | | |
| TAU518 | Tau | Heavy chain | RHM | WO2016079597 SEQ ID NO: 25 | 3465 |
| | | variable | | | |
| | | region | | | |
| TAU519 | Tau | Heavy chain | | U.S. Pat. No. 8,697,076 SEQ ID NO: 7 | 3466 |
| | | variable | | | |
| | | region | | | |
| TAU520 | Tau | Heavy chain | | US20160024193 SEQ ID NO: 58 | 3467 |
| | | variable | | and 62 | |
| | | region | | | |
| TAU521 | Tau | Heavy chain | 16B5 | US20160031976 SEQ ID NO: 10 | 3468 |
| | | variable | | | |
| | | region | | | |
| TAU522 | Tau | Heavy chain | NI-105.17C1 | US20150344553 SEQ ID NO: 45 | 3469 |
| | | variable | | | |
| | | region | | | |
| TAU523 | Tau | Heavy chain | NI-105.6C5 | US20150344553 SEQ ID NO: 48 | 3470 |
| | | variable | | | |
| | | region | | | |
| TAU524 | Tau | Heavy chain | NI-105.29G10 | US20150344553 SEQ ID NO: 50 | 3471 |
| | | variable | | | |
| | | region | | | |
| TAU525 | Tau | Heavy chain | NI-105.6L9 | US20150344553 SEQ ID NO: 52 | 3472 |
| | | variable | | | |
| | | region | | | |
| TAU526 | Tau | Heavy chain | NI-105.40E8 | US20150344553 SEQ ID NO: 54 | 3473 |
| | | variable | | | |
| | | region | | | |
| TAU527 | Tau | Heavy chain | NI-105.40E8 | US20150344553 SEQ ID NO: 220 | 3474 |
| | | variable | R104W | | |
| | | region | | | |
| TAU528 | Tau | Heavy chain | NI-105.48E5 | US20150344553 SEQ ID NO: 56 | 3475 |
| | | variable | | | |
| | | region | | | |
| TAU529 | Tau | Heavy chain | NI-105.6E3 | US20150344553 SEQ ID NO: 58 | 3476 |
| | | variable | | | |
| | | region | | | |
| TAU530 | Tau | Heavy chain | NI-105.22E1 | US20150344553 SEQ ID NO: 60 | 3477 |
| | | variable | | | |
| | | region | | | |
| TAU531 | Tau | Heavy chain | NI-105.26B12 | US20150344553 SEQ ID NO: 62 | 3478 |
| | | variable | | | |
| | | region | | | |
| TAU532 | Tau | Heavy chain | NI-105.12E12 | US20150344553 SEQ ID NO: 65 | 3479 |
| | | variable | | | |
| | | region | | | |
| TAU533 | Tau | Heavy chain | NI-105.60E7 | US20150344553 SEQ ID NO: 67 | 3480 |
| | | variable | | | |
| | | region | | | |
| TAU534 | Tau | Heavy chain | NI-105.14E2 | US20150344553 SEQ ID NO: 69 | 3481 |
| | | variable | | | |
| | | region | | | |
| TAU535 | Tau | Heavy chain | NI-105.39E2 | US20150344553 SEQ ID NO: 71 | 3482 |
| | | variable | | | |
| | | region | | | |
| TAU536 | Tau | Heavy chain | NI-105.19C6 | US20150344553 SEQ ID NO: 73 | 3483 |
| | | variable | | | |
| | | region | | | |
| TAU537 | Tau | Heavy chain | NI-105.9C4 | US20150344553 SEQ ID NO: 76 | 3484 |
| | | variable | | | |
| | | region | | | |
| TAU538 | Tau | Heavy chain | 19.3 | US20150320860 SEQ ID NO: 7 | 3485 |
| | | variable | | | |
| | | region | | | |
| TAU539 | Tau | Heavy chain | 3-66 | US20150320860 SEQ ID NO: 8 | 3486 |
| | | variable | | | |
| | | region | | | |
| TAU540 | Tau | Heavy chain | | US20150253341 SEQ ID NO: 37 | 3487 |
| | | variable | | | |
| | | region | | | |
| TAU541 | Tau | Heavy chain | NI-101.10 | US20150147343 SEQ ID NO: 4 | 3488 |
| | | variable | | | |
| | | region | | | |
| TAU542 | Tau | Heavy chain | NI-101.11 | US20150147343 SEQ ID NO: 6 | 3489 |
| | | variable | | | |
| | | region | | | |
| TAU543 | Tau | Heavy chain | NI-101.12 | US20150147343 SEQ ID NO: 10 | 3490 |
| | | variable | | | |
| | | region | | | |
| TAU544 | Tau | Heavy chain | NI-101.13; NI- | US20150147343 SEQ ID NO: 14, | 3491 |
| | | variable | 101.13A; NI- | 42, 43 | |
| | | region | 101.13B | | |
| TAU545 | Tau | Heavy chain | NI-101.12F6A | US20150147343 SEQ ID NO: 39 | 3492 |
| | | variable | | | |
| | | region | | | |
| TAU546 | Tau | Heavy chain | Ta1501 | US20150183854 SEQ ID NO: 18 | 3493 |
| | | variable | | | |
| | | region | | | |
| TAU547 | Tau | Heavy chain | Ta1502 | US20150183854 SEQ ID NO: 19 | 3494 |
| | | variable | | | |
| | | region | | | |
| TAU548 | Tau | Heavy chain | Ta1505 | US20150183854 SEQ ID NO: 20 | 3495 |
| | | variable | | | |
| | | region | | | |
| TAU549 | Tau | Heavy chain | Ta1506 | US20150183854 SEQ ID NO: 21 | 3496 |
| | | variable | | | |
| | | region | | | |
| TAU550 | Tau | Heavy chain | Ta1507 | US20150183854 SEQ ID NO: 22 | 3497 |
| | | variable | | | |
| | | region | | | |
| TAU551 | Tau | Heavy chain | Ta1508 | US20150183854 SEQ ID NO: 23 | 3498 |
| | | variable | | | |
| | | region | | | |
| TAU552 | Tau | Heavy chain | Ta1509 | US20150183854 SEQ ID NO: 24 | 3499 |
| | | variable | | | |
| | | region | | | |
| TAU553 | Tau | Heavy chain | | US20150050215 SEQ ID NO: 145 | 3500 |
| | | variable | | | |
| | | region | | | |
| TAU554 | Tau | Heavy chain | | US20150050215 SEQ ID NO: 147 | 3501 |
| | | variable | | | |
| | | region | | | |
| TAU555 | Tau | Heavy chain | | US20150050215 SEQ ID NO: 148 | 3502 |
| | | variable | | | |
| | | region | | | |
| TAU556 | Tau | Heavy chain | | U.S. Pat. No. 8,980,270 SEQ ID NO: 14 | 3503 |
| | | variable | | | |
| | | region | | | |
| TAU557 | Tau | Heavy chain | | U.S. Pat. No. 8,980,270 SEQ ID NO: 16 | 3504 |
| | | variable | | | |
| | | region | | | |
| TAU558 | Tau | Heavy chain | | US20150183855 SEQ ID NO: 15; | 3505 |
| | | variable | | WO2016126993 SEQ ID NO: 15 | |
| | | region | | | |
| TAU559 | Tau | Heavy chain | CBTAU-7.1 | WO2015197823 SEQ ID NO: 87 | 3506 |
| | | variable | | | |
| | | region | | | |
| TAU560 | Tau | Heavy chain | CBTAU-8.1 | WO2015197823 SEQ ID NO: 91 | 3507 |
| | | variable | | | |
| | | region | | | |
| TAU561 | Tau | Heavy chain | CBTAU-16.1 | WO2015197823 SEQ ID NO: 95 | 3508 |
| | | variable | | | |
| | | region | | | |
| TAU562 | Tau | Heavy chain | CBTAU-18.1 | WO2015197823 SEQ ID NO: 99 | 3509 |
| | | variable | | | |
| | | region | | | |
| TAU563 | Tau | Heavy chain | CBTAU-20.1 | WO2015197823 SEQ ID NO: 103 | 3510 |
| | | variable | | | |
| | | region | | | |
| TAU564 | Tau | Heavy chain | CBTAU-22.1 | WO2015197823 SEQ ID NO: 107 | 3511 |
| | | variable | | | |
| | | region | | | |
| TAU565 | Tau | Heavy chain | CBTAU-24.1 | WO2015197823 SEQ ID NO: 111 | 3512 |
| | | variable | | | |
| | | region | | | |
| TAU566 | Tau | Heavy chain | CBTAU-27.1 | WO2015197823 SEQ ID NO: 115 | 3513 |
| | | variable | | | |
| | | region | | | |
| TAU567 | Tau | Heavy chain | CBTAU 28.1 | WO2015197823 SEQ ID NO: 119 | 3514 |
| | | variable | | | |
| | | region | | | |
| TAU568 | Tau | Heavy chain | CBTAU-41.1 | WO2015197823 SEQ ID NO: 123 | 3515 |
| | | variable | | | |
| | | region | | | |
| TAU569 | Tau | Heavy chain | CBTAU-41.2 | WO2015197823 SEQ ID NO: 127 | 3516 |
| | | variable | | | |
| | | region | | | |
| TAU570 | Tau | Heavy chain | CBTAU-42.1 | WO2015197823 SEQ ID NO: 131 | 3517 |
| | | variable | | | |
| | | region | | | |
| TAU571 | Tau | Heavy chain | CBTAU 43.1 | WO2015197823 SEQ ID NO: 135 | 3518 |
| | | variable | | | |
| | | region | | | |
| TAU572 | Tau | Heavy chain | CBTAU 44.1 | WO2015197823 SEQ ID NO: 139 | 3519 |
| | | variable | | | |
| | | region | | | |
| TAU573 | Tau | Heavy chain | CBTAU 45.1 | WO2015197823 SEQ ID NO: 143 | 3520 |
| | | variable | | | |
| | | region | | | |
| TAU574 | Tau | Heavy chain | CBTAU 46.1 | WO2015197823 SEQ ID NO: 147 | 3521 |
| | | variable | | | |
| | | region | | | |
| TAU575 | Tau | Heavy chain | CBTAU 47.1 | WO2015197823 SEQ ID NO: 151 | 3522 |
| | | variable | | | |
| | | region | | | |
| TAU576 | Tau | Heavy chain | CBTAU 47.2 | WO2015197823 SEQ ID NO: 155 | 3523 |
| | | variable | | | |
| | | region | | | |
| TAU577 | Tau | Heavy chain | CBTAU 49.1 | WO2015197823 SEQ ID NO: 159 | 3524 |
| | | variable | | | |
| | | region | | | |
| TAU578 | Tau | Heavy chain | Native 7.1 | WO2015197823 SEQ ID NO: 257 | 3525 |
| | | variable | | | |
| | | region | | | |
| TAU579 | Tau | Heavy chain | Native 8.1 | WO2015197823 SEQ ID NO: 261 | 3526 |
| | | variable | | | |
| | | region | | | |
| TAU580 | Tau | Heavy chain | Native 16.1 | WO2015197823 SEQ ID NO: 265 | 3527 |
| | | variable | | | |
| | | region | | | |
| TAU581 | Tau | Heavy chain | Native 18.1 | WO2015197823 SEQ ID NO: 269 | 3528 |
| | | variable | | | |
| | | region | | | |
| TAU582 | Tau | Heavy chain | Native 20.1 | WO2015197823 SEQ ID NO: 272 | 3529 |
| | | variable | | | |
| | | region | | | |
| TAU583 | Tau | Heavy chain | Native 22.1 | WO2015197823 SEQ ID NO: 275 | 3530 |
| | | variable | | | |
| | | region | | | |
| TAU584 | Tau | Heavy chain | Native 24.1 | WO2015197823 SEQ ID NO: 279 | 3531 |
| | | variable | | | |
| | | region | | | |
| TAU585 | Tau | Heavy chain | Native 27.1 | WO2015197823 SEQ ID NO: 282 | 3532 |
| | | variable | | | |
| | | region | | | |
| TAU586 | Tau | Heavy chain | Native 28.1 | WO2015197823 SEQ ID NO: 284 | 3533 |
| | | variable | | | |
| | | region | | | |
| TAU587 | Tau | Heavy chain | Native 41.1; | WO2015197823 SEQ ID NO: 287, | 3534 |
| | | variable | Native 41.2 | 289 | |
| | | region | | | |
| TAU588 | Tau | Heavy chain | Native 42.1 | WO2015197823 SEQ ID NO: 292 | 3535 |
| | | variable | | | |
| | | region | | | |
| TAU589 | Tau | Heavy chain | Native 43.1 | WO2015197823 SEQ ID NO: 295 | 3536 |
| | | variable | | | |
| | | region | | | |
| TAU590 | Tau | Heavy chain | Native 44.1 | WO2015197823 SEQ ID NO: 298 | 3537 |
| | | variable | | | |
| | | region | | | |
| TAU591 | Tau | Heavy chain | Native 45.1 | WO2015197823 SEQ ID NO: 302 | 3538 |
| | | variable | | | |
| | | region | | | |
| TAU592 | Tau | Heavy chain | Native 46.1 | WO2015197823 SEQ ID NO: 306 | 3539 |
| | | variable | | | |
| | | region | | | |
| TAU593 | Tau | Heavy chain | Native 47.1 | WO2015197823 SEQ ID NO: 309 | 3540 |
| | | variable | | | |
| | | region | | | |
| TAU594 | Tau | Heavy chain | Native 47.2 | WO2015197823 SEQ ID NO: 311 | 3541 |
| | | variable | | | |
| | | region | | | |
| TAU595 | Tau | Heavy chain | Native 49.1 | WO2015197823 SEQ ID NO: 313 | 3542 |
| | | variable | | | |
| | | region | | | |
| TAU596 | Tau | Heavy chain | 6B2G12; | WO2016007414 SEQ ID NO: 9 and | 3543 |
| | | variable | scFv235 | 11 | |
| | | region | | | |
| TAU597 | Tau | Heavy chain | | WO2015120364 SEQ ID NO: 30 | 3544 |
| | | variable | | | |
| | | region | | | |
| TAU 598 | Tau | Heavy chain | | WO2015120364 SEQ ID NO: 42 | 3545 |
| | | variable | | | |
| | | region | | | |
| TAU599 | Tau | Heavy chain | pT231/pS235_1; | WO2014016737 SEQ ID NO: 15 | 3546 |
| | | variable | pT231/pS235_2 | and 17 | |
| | | region | | | |
| TAU600 | Tau | Heavy chain | pT212/pS214_1 | WO2014016737 SEQ ID NO: 19 | 3547 |
| | | variable | | | |
| | | region | | | |
| TAU601 | Tau | Heavy chain | pT212/pS214_2 | WO2014016737 SEQ ID NO: 21 | 3548 |
| | | variable | | | |
| | | region | | | |
| TAU602 | Tau | Heavy chain | pS396/pS404_1 | WO2014016737 SEQ ID NO: 23 | 3549 |
| | | variable | | | |
| | | region | | | |
| TAU603 | Tau | Heavy chain | pS396/pS404_2 | WO2014016737 SEQ ID NO: 25 | 3550 |
| | | variable | | | |
| | | region | | | |
| TAU604 | Tau | Heavy chain | 2H9 | WO2014096321 SEQ ID NO: 11 | 3551 |
| | | variable | | | |
| | | region | | | |
| TAU605 | Tau | Heavy chain | | WO2015122922 SEQ ID NO: 16 | 3552 |
| | | variable | | and 24 | |
| | | region | | | |
| TAU606 | Tau | Heavy chain | | WO2015122922 SEQ ID NO: 32 | 3553 |
| | | variable | | | |
| | | region | | | |
| TAU607 | Tau | Heavy chain | | WO2015122922 SEQ ID NO: 40 | 3554 |
| | | variable | | | |
| | | region | | | |
| TAU608 | Tau | Heavy chain | | WO2015122922 SEQ ID NO: 48 | 3555 |
| | | variable | | | |
| | | region | | | |
| TAU609 | Tau | Heavy chain | | WO2015122922 SEQ ID NO: 56 | 3556 |
| | | variable | | | |
| | | region | | | |
| TAU610 | Tau | Heavy chain | | WO2015122922 SEQ ID NO: 64 | 3557 |
| | | variable | | | |
| | | region | | | |
| TAU611 | Tau | Heavy chain | | WO2015122922 SEQ ID NO: 72 | 3558 |
| | | variable | | | |
| | | region | | | |
| TAU612 | Tau | Heavy chain | | US20150320860 SEQ ID NO: 34 | 3559 |
| | | variable | | | |
| | | region fused | | | |
| | | with a human | | | |
| | | IgG2 heavy | | | |
| | | chain | | | |
| | | constant | | | |
| | | region | | | |
| TAU613 | Tau | Heavy chain | NI-105.17C1 | US20150344553 SEQ ID NO: 44 | 3560 |
| | | variable | | | |
| | | region, before | | | |
| | | germlining | | | |
| TAU614 | Tau | Heavy chain | NI-105.6C5 | US20150344553 SEQ ID NO: 47 | 3561 |
| | | variable | | | |
| | | region, before | | | |
| | | germlining | | | |
| TAU615 | Tau | Heavy chain | NI-105.26B12 | US20150344553 SEQ ID NO: 63 | 3562 |
| | | variable | | | |
| | | region, before | | | |
| | | germlining | | | |
| TAU616 | Tau | Heavy chain | NI-105.9C4 | US20150344553 SEQ ID NO: 75 | 3563 |
| | | variable | | | |
| | | region, before | | | |
| | | germlining | | | |
| TAU617 | Tau | Heavy chain | variant 1-VH32 | US20150175685 SEQ ID NO: 19; | 3564 |
| | | variable | | WO2015197735 SEQ ID NO: 19 | |
| | | region, | | | |
| | | humanized | | | |
| TAU618 | Tau | Heavy chain | variant 2-VH20 | US20150175685 SEQ ID NO: 20; | 3565 |
| | | variable | | WO2015197735 SEQ ID NO: 20 | |
| | | region, | | | |
| | | humanized | | | |
| TAU619 | Tau | Heavy chain | IPN002 VH | U.S. Pat. No. 8,980,270 SEQ ID NO: 36 | 3566 |
| | | variable | variant 1 | | |
| | | region, | | | |
| | | humanized | | | |
| TAU1620 | Tau | Heavy chain | IPN002 VH | U.S. Pat. No. 8,980,270 SEQ ID NO: 37 | 3567 |
| | | variable | variant 2 | | |
| | | region, | | | |
| | | humanized | | | |
| TAU621 | Tau | Heavy chain | IPN002 VH | U.S. Pat. No. 8,980,270 SEQ ID NO: 38 | 3568 |
| | | variable | variant 3 | | |
| | | region, | | | |
| | | humanized | | | |
| TAU622 | Tau | Heavy chain | IPN002 VH | U.S. Pat. No. 8,980,270 SEQ ID NO: 39 | 3569 |
| | | variable | variant 4 | | |
| | | region, | | | |
| | | humanized | | | |
| TAU623 | Tau | Heavy chain, | BACO2002. 1 | US20160031976 SEQ ID NO: 14 | 3570 |
| | | human Ig | | | |
| TAU624 | Tau | Heavy chain, | | US20160031976 SEQ ID NO: 29 | 3571 |
| | | human IgG1 | | | |
| | | constant | | | |
| | | region | | | |
| TAU625 | Tau | Heavy chain, | TAM_1, | US20160024193 SEQ ID NO: 87 | 3572 |
| | | IgG1 | TAM_2, | | |
| | | | TAM_3, | | |
| | | | TAM_4, | | |
| | | | TAM_5, | | |
| | | | TAM_6, | | |
| | | | TAM_7, | | |
| | | | TAM_8, | | |
| | | | TAM_9, | | |
| | | | TAM_10, | | |
| | | | TAM_11, | | |
| | | | TAM_12, | | |
| | | | TAM_13, | | |
| | | | TAM_14, | | |
| | | | TAM_15, | | |
| | | | TAM_16, | | |
| | | | TAM_17, | | |
| | | | TAM_18, | | |
| | | | TAM_19, | | |
| | | | TAM_20, | | |
| | | | TAM_21, | | |
| | | | TAM_22, | | |
| | | | TAM_23 | | |
| TAU626 | Tau | Heavy chain, | TAM_1, | US20160024193 SEQ ID NO: 88 | 3573 |
| | | IgG1 N297G | TAM_2, | | |
| | | | TAM_3, | | |
| | | | TAM_4, | | |
| | | | TAM_5, | | |
| | | | TAM_6, | | |
| | | | TAM_7, | | |
| | | | TAM_8, | | |
| | | | TAM_9, | | |
| | | | TAM_10, | | |
| | | | TAM_11, | | |
| | | | TAM_12, | | |
| | | | TAM_13, | | |
| | | | TAM_14, | | |
| | | | TAM_15, | | |
| | | | TAM_16, | | |
| | | | TAM_17, | | |
| | | | TAM_18, | | |
| | | | TAM_19, | | |
| | | | TAM_20, | | |
| | | | TAM_21, | | |
| | | | TAM_22, | | |
| | | | TAM_23 | | |
| TAU627 | Tau | Heavy chain, | TAM_1, | US20160024193 SEQ ID NO: 86 | 3574 |
| | | IgG4 isotypes | TAM_2, | | |
| | | | TAM_3, | | |
| | | | TAM_4, | | |
| | | | TAM_5, | | |
| | | | TAM_6, | | |
| | | | TAM_7, | | |
| | | | TAM_8, | | |
| | | | TAM_9, | | |
| | | | TAM_10, | | |
| | | | TAM_11, | | |
| | | | TAM_12, | | |
| | | | TAM_13, | | |
| | | | TAM_14, | | |
| | | | TAM_15, | | |
| | | | TAM_16, | | |
| | | | TAM_17, | | |
| | | | TAM_18, | | |
| | | | TAM_19, | | |
| | | | TAM_20, | | |
| | | | TAM_21, | | |
| | | | TAM_22, | | |
| | | | TAM_23 | | |
| TAU628 | Tau | Heavy chain, | | US20160031976 SEQ ID NO: 15 | 3575 |
| | | mature | | | |
| TAU629 | Tau | heavy-chain | Tau-A2-SH | WO2015114538 SEQ ID NO: 14 | 3576 |
| | | antibody; | | | |
| | | camelid | | | |
| TAU630 | Tau | heavy-chain | TauA2var-SH | WO2015114538 SEQ ID NO: 17 | 3577 |
| | | antibody; | | | |
| | | Camelid | | | |
| TAU631 | Tau | heavy-chain | Tau-A2 variant | WO2015114538 SEQ ID NO: 15 | 3578 |
| | | antibody; | | | |
| | | Camelid | | | |
| TAU632 | Tau | heavy-chain | Tau-A2 variant | WO2015114538 SEQ ID NO: 16 | 3579 |
| | | antibody; | | | |
| | | Camelid | | | |
| TAU633 | Tau | Light chain | cDC8E8 VK | US20150050215 SEQ ID NO: 141; | 3580 |
| | | | | WO2016079597 SEQ ID NO: 10 | |
| TAU634 | Tau | Light chain | RKA | WO2016079597 SEQ ID NO: 57 | 3581 |
| TAU635 | Tau | Light chain | cDC8E8 | WO2016079597 SEQ ID NO: 59 | 3582 |
| TAU636 | Tau | Light chain | OptiDC8E8 | WO2016079597 SEQ ID NO: 95 | 3583 |
| TAU637 | Tau | Light chain | RKA | WO2016079597 SEQ ID NO: 109 | 3584 |
| TAU638 | Tau | Light chain | RKB | WO2016079597 SEQ ID NO: 110 | 3585 |
| TAU639 | Tau | Light chain | RKA | WO2016079597 SEQ ID NO: 141 | 3586 |
| TAU640 | Tau | Light chain | RKB | WO2016079597 SEQ ID NO: 142 | 3587 |
| TAU641 | Tau | Light chain | cDC8E8 | WO2016079597 SEQ ID NO: 143 | 3588 |
| TAU642 | Tau | Light chain | | U.S. Pat. No. 8,697,076 SEQ ID NO: 14 | 3589 |
| TAU643 | Tau | Light chain | 5202.4 | US20160024193 SEQ ID NO: 61 | 3590 |
| TAU644 | Tau | Light chain | TAM_1 | US20160024193 SEQ ID NO: 64 | 3591 |
| TAU645 | Tau | Light chain | TAM_2 | US20160024193 SEQ ID NO: 65 | 3592 |
| TAU646 | Tau | Light chain | TAM_3 | US20160024193 SEQ ID NO: 66 | 3593 |
| TAU647 | Tau | Light chain | TAM_4 | US20160024193 SEQ ID NO: 67 | 3594 |
| TAU648 | Tau | Light chain | TAM_5 | US20160024193 SEQ ID NO: 68 | 3595 |
| TAU649 | Tau | Light chain | TAM_6 | US20160024193 SEQ ID NO: 69 | 3596 |
| TAU650 | Tau | Light chain | TAM_7 | US20160024193 SEQ ID NO: 70 | 3597 |
| TAU651 | Tau | Light chain | TAM_8 | US20160024193 SEQ ID NO: 71 | 3598 |
| TAU652 | Tau | Light chain | TAM_9 | US20160024193 SEQ ID NO: 72 | 3599 |
| TAU653 | Tau | Light chain | TAM_10 | US20160024193 SEQ ID NO: 73 | 3600 |
| TAU654 | Tau | Light chain | TAM_11 | US20160024193 SEQ ID NO: 74 | 3601 |
| TAU655 | Tau | Light chain | TAM_12 | US20160024193 SEQ ID NO: 75 | 3602 |
| TAU656 | Tau | Light chain | TAM_13 | US20160024193 SEQ ID NO: 76 | 3603 |
| TAU657 | Tau | Light chain | TAM_14 | US20160024193 SEQ ID NO: 77 | 3604 |
| TAU658 | Tau | Light chain | TAM_15 | US20160024193 SEQ ID NO: 78 | 3605 |
| TAU659 | Tau | Light chain | TAM_16 | US20160024193 SEQ ID NO: 79 | 3606 |
| TAU660 | Tau | Light chain | TAM_17 | US20160024193 SEQ ID NO: 80 | 3607 |
| TAU661 | Tau | Light chain | TAM_18 | US20160024193 SEQ ID NO: 81 | 3608 |
| TAU662 | Tau | Light chain | TAM_19 | US20160024193 SEQ ID NO: 82 | 3609 |
| TAU663 | Tau | Light chain | TAM_20; | US20160024193 SEQ ID NO: 83 | 3610 |
| | | | TAM_22 | and 85 | |
| TAU664 | Tau | Light chain | TAM_21 | US20160024193 SEQ ID NO: 84 | 3611 |
| TAU665 | Tau | Light chain | | US20160031977 SEQ ID NO: 23 | 3612 |
| TAU666 | Tau | Light chain | | US20160031977 SEQ ID NO: 25 | 3613 |
| TAU667 | Tau | Light chain | | US20160031977 SEQ ID NO: 27 | 3614 |
| TAU668 | Tau | Light chain | | US20160031977 SEQ ID NO: 28 | 3615 |
| TAU669 | Tau | Light chain | | US20150050215 SEQ ID NO: 139 | 3616 |
| TAU670 | Tau | Light chain | | US20150050215 SEQ ID NO: 143 | 3617 |
| TAU671 | Tau | Light Chain | pT231/pS235 | WO2014016737 SEQ ID NO: 71 | 3618 |
| TAU672 | Tau | Light chain | RKB | WO2016079597 SEQ ID NO: 58 | 3619 |
| TAU673 | Tau | Light chain | cDC8E8 | WO2016079597 SEQ ID NO: 93 | 3620 |
| TAU674 | Tau | light chain | ch40E8 | US20150344553 SEQ ID NO: 209 | 3621 |
| | | (lambda) | | | |
| TAU675 | Tau | light chain | ch6E3 | US20150344553 SEQ ID NO: 211 | 3622 |
| | | (mouse | | | |
| | | kappa) | | | |
| TAU676 | Tau | light chain | ch17C1 | US20150344553 SEQ ID NO: 204 | 3623 |
| | | (mouse | | | |
| | | lambda) | | | |
| TAU677 | Tau | light chain | ch6C5 | US20150344553 SEQ ID NO: 206 | 3624 |
| | | (mouse | | | |
| | | lambda) | | | |
| TAU678 | Tau | light chain | ch17C1(N31Q) | US20150344553 SEQ ID NO: 212 | 3625 |
| | | (mouse | | | |
| | | lambda) | | | |
| TAU679 | Tau | light chain | | WO2016079597 SEQ ID NO: 170; | 3626 |
| | | constant | | WO2015197823 SEQ ID NO: 84; | |
| | | region | | US20150320860 SEQ ID NO: 36; | |
| | | | | WO2015197735 SEQ ID NO: 59; | |
| | | | | U.S. Pat. No. 9,290,567 SEQ ID NO: 11 | |
| TAU680 | Tau | light chain | | WO2016079597 SEQ ID NO: 171; | 3627 |
| | | constant | | US20160031976 SEQ ID NO: 32 | |
| | | region | | | |
| TAU681 | Tau | Light chain | human NI- | US20150344553 SEQ ID NO: 219 | 3628 |
| | | lambda | 105.40E8 light | | |
| | | | chain | | |
| TAU682 | Tau | Light chain | ch17C1(N31Q, | US20150344553 SEQ ID NO: 217 | 3629 |
| | | lambda | I48V) | | |
| | | mouse | | | |
| TAU683 | Tau | Light chain | ch4E4 | US20150344553 SEQ ID NO: 21; | 3630 |
| | | mature | | U.S. Pat. No. 8,940,272 SEQ ID NO: 21 | |
| | | (mouse | | | |
| | | lambda) | | | |
| TAU684 | Tau | Light chain | NI-105.4A3-VL | US20150344553 SEQ ID NO: 19; | 3631 |
| | | variable | | U.S. Pat. No. 8,940,272 SEQ ID NO: 19 | |
| TAU685 | Tau | Light chain | | US20150344553 SEQ ID NO: 15 | 3632 |
| | | variable | | | |
| TAU686 | Tau | Light chain | NI-105.4E4-VL; | US20150344553 SEQ ID NO: 11, | 3633 |
| | | variable | NI-105.24B2-VL | 15 | |
| TAU687 | Tau | Light chain | | US20150307600 SEQ ID NO: 36 | 3634 |
| | | variable | | | |
| TAU688 | Tau | Light chain | | US20150307600 SEQ ID NO: 38 | 3635 |
| | | variable | | | |
| TAU689 | Tau | Light chain | RKA | WO2016079597 SEQ ID NO: 26 | 3636 |
| | | variable | | | |
| | | region | | | |
| TAU690 | Tau | Light chain | RKB | WO2016079597 SEQ ID NO: 27 | 3637 |
| | | variable | | | |
| | | region | | | |
| TAU691 | Tau | Light chain | DC8E8 | WO2016079597 SEQ ID NO: 91 | 3638 |
| | | variable | | | |
| | | region | | | |
| TAU692 | Tau | Light chain | | U.S. Pat. No. 8,940,272 SEQ ID NO: 15 | 3639 |
| | | variable | | | |
| | | region | | | |
| TAU693 | Tau | Light chain | | U.S. Pat. No. 8,697,076 SEQ ID NO: 8 | 3640 |
| | | variable | | | |
| | | region | | | |
| TAU694 | Tau | Light chain | | US20160024193 SEQ ID NO: 36 | 3641 |
| | | variable | | | |
| | | region | | | |
| TAU695 | Tau | Light chain | | US20160024193 SEQ ID NO: 37 | 3642 |
| | | variable | | | |
| | | region | | | |
| TAU696 | Tau | Light chain | | US20160024193 SEQ ID NO: 38 | 3643 |
| | | variable | | | |
| | | region | | | |
| TAU697 | Tau | Light chain | | US20160024193 SEQ ID NO: 39 | 3644 |
| | | variable | | | |
| | | region | | | |
| TAU698 | Tau | Light chain | | US20160024193 SEQ ID NO: 40 | 3645 |
| | | variable | | | |
| | | region | | | |
| TAU699 | Tau | Light chain | | US20160024193 SEQ ID NO: 41 | 3646 |
| | | variable | | | |
| | | region | | | |
| TAU700 | Tau | Light chain | | US20160024193 SEQ ID NO: 42 | 3647 |
| | | variable | | | |
| | | region | | | |
| TAU701 | Tau | Light chain | | US20160024193 SEQ ID NO: 43 | 3648 |
| | | variable | | | |
| | | region | | | |
| TAU702 | Tau | Light chain | | US20160024193 SEQ ID NO: 44 | 3649 |
| | | variable | | | |
| | | region | | | |
| TAU703 | Tau | Light chain | | US20160024193 SEQ ID NO: 45 | 3650 |
| | | variable | | | |
| | | region | | | |
| TAU704 | Tau | Light chain | | US20160024193 SEQ ID NO: 46 | 3651 |
| | | variable | | | |
| | | region | | | |
| TAU705 | Tau | Light chain | | US20160024193 SEQ ID NO: 47 | 3652 |
| | | variable | | | |
| | | region | | | |
| TAU706 | Tau | Light chain | | US20160024193 SEQ ID NO: 48 | 3653 |
| | | variable | | | |
| | | region | | | |
| TAU707 | Tau | Light chain | | US20160024193 SEQ ID NO: 49 | 3654 |
| | | variable | | | |
| | | region | | | |
| TAU708 | Tau | Light chain | | US20160024193 SEQ ID NO: 50 | 3655 |
| | | variable | | | |
| | | region | | | |
| TAU709 | Tau | Light chain | | US20160024193 SEQ ID NO: 51 | 3656 |
| | | variable | | | |
| | | region | | | |
| TAU710 | Tau | Light chain | | US20160024193 SEQ ID NO: 52 | 3657 |
| | | variable | | | |
| | | region | | | |
| TAU711 | Tau | Light chain | | US20160024193 SEQ ID NO: 53 | 3658 |
| | | variable | | | |
| | | region | | | |
| TAU712 | Tau | Light chain | | US20160024193 SEQ ID NO: 54 | 3659 |
| | | variable | | | |
| | | region | | | |
| TAU713 | Tau | Light chain | | US20160024193 SEQ ID NO: 55 | 3660 |
| | | variable | | and 57 | |
| | | region | | | |
| TAU714 | Tau | Light chain | | US20160024193 SEQ ID NO: 56 | 3661 |
| | | variable | | | |
| | | region | | | |
| TAU715 | Tau | Light chain | 5202.4 | US20160024193 SEQ ID NO: 60 | 3662 |
| | | variable | | | |
| | | region | | | |
| TAU716 | Tau | Light chain | NI-105.17C1 | US20150344553 SEQ ID NO: 46 | 3663 |
| | | variable | | | |
| | | region | | | |
| TAU717 | Tau | Light chain | NI-105.17C1 | US20150344553 SEQ ID NO: 221 | 3664 |
| | | variable | N31Q | | |
| | | region | | | |
| TAU718 | Tau | Light chain | NI-105.17C1 | US20150344553 SEQ ID NO: 222 | 3665 |
| | | variable | N31Q, I48V | | |
| | | region | | | |
| TAU719 | Tau | Light chain | NI-105.6C5 | US20150344553 SEQ ID NO: 49 | 3666 |
| | | variable | | | |
| | | region | | | |
| TAU720 | Tau | Light chain | M-105.29G10 | US20150344553 SEQ ID NO: 51 | 3667 |
| | | variable | | | |
| | | region | | | |
| TAU721 | Tau | Light chain | NI-105.6L9 | US20150344553 SEQ ID NO: 53 | 3668 |
| | | variable | | | |
| | | region | | | |
| TAU722 | Tau | Light chain | NI-105.40E8 | US20150344553 SEQ ID NO: 55 | 3669 |
| | | variable | | | |
| | | region | | | |
| TAU723 | Tau | Light chain | NI-105.48E5 | US20150344553 SEQ ID NO: 57 | 3670 |
| | | variable | | | |
| | | region | | | |
| TAU724 | Tau | Light chain | NI-105.6E3 | US20150344553 SEQ ID NO: 59 | 3671 |
| | | variable | | | |
| | | region | | | |
| TAU725 | Tau | Light chain | NI-105.22E1 | US20150344553 SEQ ID NO: 61 | 3672 |
| | | variable | | | |
| | | region | | | |
| TAU726 | Tau | Light chain | NI-105.26B13 | US20150344553 SEQ ID NO: 64 | 3673 |
| | | variable | | | |
| | | region | | | |
| TAU727 | Tau | Light chain | NI-105.12E12 | US20150344553 SEQ ID NO: 66 | 3674 |
| | | variable | | | |
| | | region | | | |
| TAU728 | Tau | Light chain | NI-105.60E7 | US20150344553 SEQ ID NO: 68 | 3675 |
| | | variable | | | |
| | | region | | | |
| TAU729 | Tau | Light chain | NI-105.14E2 | US20150344553 SEQ ID NO: 70 | 3676 |
| | | variable | | | |
| | | region | | | |
| TAU730 | Tau | Light chain | NI-105.39E2 | US20150344553 SEQ ID NO: 72 | 3677 |
| | | variable | | | |
| | | region | | | |
| TAU731 | Tau | Light chain | NI-105.19C6 | US20150344553 SEQ ID NO: 74 | 3678 |
| | | variable | | | |
| | | region | | | |
| TAU732 | Tau | Light chain | NI-105.9C4 | US20150344553 SEQ ID NO: 78 | 3679 |
| | | variable | | | |
| | | region | | | |
| TAU733 | Tau | Light chain | 19.3 | US20150320860 SEQ ID NO: 9 | 3680 |
| | | variable | | | |
| | | region | | | |
| TAU734 | Tau | Light chain | 3-66 | US20150320860 SEQ ID NO: 10 | 3681 |
| | | variable | | | |
| | | region | | | |
| TAU735 | Tau | Light chain | h3B3 | US20150320860 SEQ ID NO: 25 | 3682 |
| | | variable | | | |
| | | region | | | |
| TAU736 | Tau | Light chain | 19.3 | US20150320860 SEQ ID NO: 26 | 3683 |
| | | variable | | | |
| | | region | | | |
| TAU737 | Tau | Light chain | 17.1 | US20150320860 SEQ ID NO: 27 | 3684 |
| | | variable | | | |
| | | region | | | |
| TAU738 | Tau | Light chain | 14.2 | US20150320860 SEQ ID NO: 28 | 3685 |
| | | variable | | | |
| | | region | | | |
| TAU739 | Tau | Light chain | 13.1 | US20150320860 SEQ ID NO: 29 | 3686 |
| | | variable | | | |
| | | region | | | |
| TAU740 | Tau | Light chain | 7.2 | US20150320860 SEQ ID NO: 30 | 3687 |
| | | variable | | | |
| | | region | | | |
| TAU741 | Tau | Light chain | 9.2 | US20150320860 SEQ ID NO: 31 | 3688 |
| | | variable | | | |
| | | region | | | |
| TAU742 | Tau | Light chain | 11.4 | US20150320860 SEQ ID NO: 32 | 3689 |
| | | variable | | | |
| | | region | | | |
| TAU743 | Tau | Light chain | | US20150253341 SEQ ID NO: 39 | 3690 |
| | | variable | | | |
| | | region | | | |
| TAU744 | Tau | Light chain | NI-101.10; NI- | US20150147343 SEQ ID NO: 8 | 3691 |
| | | variable | 101.11 | | |
| | | region | | | |
| TAU745 | Tau | Light chain | NI-101.12 | US20150147343 SEQ ID NO: 12 | 3692 |
| | | variable | | | |
| | | region | | | |
| TAU746 | Tau | Light chain | NI-101.13 | US20150147343 SEQ ID NO: 16 | 3693 |
| | | variable | | | |
| | | region | | | |
| TAU747 | Tau | Light chain | NI-101.12F6A | US20150147343 SEQ ID NO: 41 | 3694 |
| | | variable | | | |
| | | region | | | |
| TAU748 | Tau | Light chain | NI-101.13A | US20150147343 SEQ ID NO: 44 | 3695 |
| | | variable | | | |
| | | region | | | |
| TAU749 | Tau | Light chain | NI-101.13B | US20150147343 SEQ ID NO: 45 | 3696 |
| | | variable | | | |
| | | region | | | |
| TAU750 | Tau | Light chain | Ta1501 | US20150183854 SEQ ID NO: 25 | 3697 |
| | | variable | | | |
| | | region | | | |
| TAU751 | Tau | Light chain | Ta1502; Ta1505 | US20150183854 SEQ ID NO: 26 | 3698 |
| | | variable | | | |
| | | region | | | |
| TAU752 | Tau | Light chain | Ta1506 | US20150183854 SEQ ID NO: 27 | 3699 |
| | | variable | | | |
| | | region | | | |
| TAU753 | Tau | Light chain | Ta1507 | US20150183854 SEQ ID NO: 28 | 3700 |
| | | variable | | | |
| | | region | | | |
| TAU754 | Tau | Light chain | Ta1508 | US20150183854 SEQ ID NO: 29 | 3701 |
| | | variable | | | |
| | | region | | | |
| TAU755 | Tau | Light chain | Ta1509 | US20150183854 SEQ ID NO: 30 | 3702 |
| | | variable | | | |
| | | region | | | |
| TAU756 | Tau | Light chain | | US20150050215 SEQ ID NO: 150 | 3703 |
| | | variable | | | |
| | | region | | | |
| TAU757 | Tau | Light chain | | US20150050215 SEQ ID NO: 152 | 3704 |
| | | variable | | | |
| | | region | | | |
| TAU758 | Tau | Light chain | | US20150050215 SEQ ID NO: 153 | 3705 |
| | | variable | | | |
| | | region | | | |
| TAU759 | Tau | Light chain | | U.S. Pat. No. 8,980,270 SEQ ID NO: 13 | 3706 |
| | | variable | | | |
| | | region | | | |
| TAU760 | Tau | Light chain | | U.S. Pat. No. 8,980,270 SEQ ID NO: 15 | 3707 |
| | | variable | | | |
| | | region | | | |
| TAU761 | Tau | Light chain | CBTAU-7.1 | WO2015197823 SEQ ID NO: 88 | 3708 |
| | | variable | | | |
| | | region | | | |
| TAU762 | Tau | Light chain | CBTAU-8.1 | WO2015197823 SEQ ID NO: 92 | 3709 |
| | | variable | | | |
| | | region | | | |
| TAU763 | Tau | Light chain | CBTAU-16.1 | WO2015197823 SEQ ID NO: 96 | 3710 |
| | | variable | | | |
| | | region | | | |
| TAU764 | Tau | Light chain | CBTAU-18.1 | WO2015197823 SEQ ID NO: 100 | 3711 |
| | | variable | | | |
| | | region | | | |
| TAU765 | Tau | Light chain | CBTAU-20.1 | WO2015197823 SEQ ID NO: 104 | 3712 |
| | | variable | | | |
| | | region | | | |
| TAU766 | Tau | Light chain | CBTAU-22.1 | WO2015197823 SEQ ID NO: 108 | 3713 |
| | | variable | | | |
| | | region | | | |
| TAU767 | Tau | Light chain | CBTAU-24.1 | WO2015197823 SEQ ID NO: 112 | 3714 |
| | | variable | | | |
| | | region | | | |
| TAU768 | Tau | Light chain | CBTAU-27.1 | WO2015197823 SEQ ID NO: 116 | 3715 |
| | | variable | | | |
| | | region | | | |
| TAU769 | Tau | Light chain | CBTAU 28.1 | WO2015197823 SEQ ID NO: 120 | 3716 |
| | | variable | | | |
| | | region | | | |
| TAU770 | Tau | Light chain | CBTAU-41.1 | WO2015197823 SEQ ID NO: 124 | 3717 |
| | | variable | | | |
| | | region | | | |
| TAU771 | Tau | Light chain | CBTAU-41.2 | WO2015197823 SEQ ID NO: 128 | 3718 |
| | | variable | | | |
| | | region | | | |
| TAU772 | Tau | Light chain | CBTAU-42.1 | WO2015197823 SEQ ID NO: 132 | 3719 |
| | | variable | | | |
| | | region | | | |
| TAU773 | Tau | Light chain | CBTAU 43.1 | WO2015197823 SEQ ID NO: 136 | 3720 |
| | | variable | | | |
| | | region | | | |
| TAU774 | Tau | Light chain | CBTAU 44.1 | WO2015197823 SEQ ID NO: 140 | 3721 |
| | | variable | | | |
| | | region | | | |
| TAU775 | Tau | Light chain | CBTAU 45.1 | WO2015197823 SEQ ID NO: 144 | 3722 |
| | | variable | | | |
| | | region | | | |
| TAU776 | Tau | Light chain | CBTAU 46.1 | WO2015197823 SEQ ID NO: 148 | 3723 |
| | | variable | | | |
| | | region | | | |
| TAU777 | Tau | Light chain | CBTAU 47.1 | WO2015197823 SEQ ID NO: 152 | 3724 |
| | | variable | | | |
| | | region | | | |
| TAU778 | Tau | Light chain | CBTAU 47.2 | WO2015197823 SEQ ID NO: 156 | 3725 |
| | | variable | | | |
| | | region | | | |
| TAU779 | Tau | Light chain | CBTAU 49.1 | WO2015197823 SEQ ID NO: 160 | 3726 |
| | | variable | | | |
| | | region | | | |
| TAU780 | Tau | Light chain | Native 7.1 | WO2015197823 SEQ ID NO: 259 | 3727 |
| | | variable | | | |
| | | region | | | |
| TAU781 | Tau | Light chain | Native 8.1 | WO2015197823 SEQ ID NO: 263 | 3728 |
| | | variable | | | |
| | | region | | | |
| TAU782 | Tau | Light chain | Native 16.1 | WO2015197823 SEQ ID NO: 267 | 3729 |
| | | variable | | | |
| | | region | | | |
| TAU783 | Tau | Light chain | Native 18.1 | WO2015197823 SEQ ID NO: 270 | 3730 |
| | | variable | | | |
| | | region | | | |
| TAU784 | Tau | Light chain | Native 20.1 | WO2015197823 SEQ ID NO: 273 | 3731 |
| | | variable | | | |
| | | region | | | |
| TAU785 | Tau | Light chain | Native 22.1 | WO2015197823 SEQ ID NO: 277 | 3732 |
| | | variable | | | |
| | | region | | | |
| TAU786 | Tau | Light chain | Native 24.1 | WO2015197823 SEQ ID NO: 280 | 3733 |
| | | variable | | | |
| | | region | | | |
| TAU787 | Tau | Light chain | Native 27.1 | WO2015197823 SEQ ID NO: 283 | 3734 |
| | | variable | | | |
| | | region | | | |
| TAU788 | Tau | Light chain | Native 28.1 | WO2015197823 SEQ ID NO: 285 | 3735 |
| | | variable | | | |
| | | region | | | |
| TAU789 | Tau | Light chain | Native 41.1 | WO2015197823 SEQ ID NO: 288 | 3736 |
| | | variable | | | |
| | | region | | | |
| TAU790 | Tau | Light chain | Native 41.2; | WO2015197823 SEQ ID NO: 290; | 3737 |
| | | variable | Native 42.1 | WO2015197823 SEQ ID NO: 293 | |
| | | region | | | |
| TAU791 | Tau | Light chain | Native 43.1 | WO2015197823 SEQ ID NO: 296 | 3738 |
| | | variable | | | |
| | | region | | | |
| TAU792 | Tau | Light chain | Native 44.1 | WO2015197823 SEQ ID NO: 300 | 3739 |
| | | variable | | | |
| | | region | | | |
| TAU793 | Tau | Light chain | Native 45.1 | WO2015197823 SEQ ID NO: 304 | 3740 |
| | | variable | | | |
| | | region | | | |
| TAU794 | Tau | Light chain | Native 46.1 | WO2015197823 SEQ ID NO: 307 | 3741 |
| | | variable | | | |
| | | region | | | |
| TAU795 | Tau | Light chain | Native 47.1 | WO2015197823 SEQ ID NO: 310 | 3742 |
| | | variable | | | |
| | | region | | | |
| TAU796 | Tau | Light chain | Native 47.2 | WO2015197823 SEQ ID NO: 312 | 3743 |
| | | variable | | | |
| | | region | | | |
| TAU797 | Tau | Light chain | Native 49.1 | WO2015197823 SEQ ID NO: 314 | 3744 |
| | | variable | | | |
| | | region | | | |
| TAU798 | Tau | Light chain | 6B2G12 | WO2016007414 SEQ ID NO: 8 | 3745 |
| | | variable | | | |
| | | region | | | |
| TAU799 | Tau | Light chain | scFv235 | WO2016007414 SEQ ID NO: 10 | 3746 |
| | | variable | | | |
| | | region | | | |
| TAU800 | Tau | Light chain | | WO2015120364 SEQ ID NO: 24 | 3747 |
| | | variable | | | |
| | | region | | | |
| TAU801 | Tau | Light chain | | WO2015120364 SEQ ID NO: 36 | 3748 |
| | | variable | | | |
| | | region | | | |
| TAU802 | Tau | Light chain | pT231/pS235_1 | WO2014016737 SEQ ID NO: 14 | 3749 |
| | | variable | | | |
| | | region | | | |
| TAU803 | Tau | Light chain | pT231/pS235_2 | WO2014016737 SEQ ID NO: 16 | 3750 |
| | | variable | | | |
| | | region | | | |
| TAU804 | Tau | Light chain | pT212/pS214_1 | WO2014016737 SEQ ID NO: 18 | 3751 |
| | | variable | | | |
| | | region | | | |
| TAU805 | Tau | Light chain | pT212/pS214_2 | WO2014016737 SEQ ID NO: 20 | 3752 |
| | | variable | | | |
| | | region | | | |
| TAU806 | Tau | Light chain | pS396/pS404_1 | WO2014016737 SEQ ID NO: 22 | 3753 |
| | | variable | | | |
| | | region | | | |
| TAU807 | Tau | Light chain | pS396/pS404_2 | WO2014016737 SEQ ID NO: 24 | 3754 |
| | | variable | | | |
| | | region | | | |
| TAU808 | Tau | Light chain | 2H9 | WO2014096321 SEQ ID NO: 15 | 3755 |
| | | variable | | | |
| | | region | | | |
| TAU809 | Tau | Light chain | | WO2015122922 SEQ ID NO: 15 | 3756 |
| | | variable | | and 23 | |
| | | region | | | |
| TAU810 | Tau | Light chain | | WO2015122922 SEQ ID NO: 31 | 3757 |
| | | variable | | and 39 | |
| | | region | | | |
| TAU811 | Tau | Light chain | | WO2015122922 SEQ ID NO: 47 | 3758 |
| | | variable | | | |
| | | region | | | |
| TAU812 | Tau | Light chain | | WO2015122922 SEQ ID NO: 55 | 3759 |
| | | variable | | | |
| | | region | | | |
| TAU813 | Tau | Light chain | | WO2015122922 SEQ ID NO: 63 | 3760 |
| | | variable | | | |
| | | region | | | |
| TAU814 | Tau | Light chain | | WO2015122922 SEQ ID NO: 71 | 3761 |
| | | variable | | | |
| | | region | | | |
| TAU815 | Tau | light chain | 16B5 | US20160031976 SEQ ID NO: 16 | 3762 |
| | | variable | | | |
| | | region kappa | | | |
| TAU816 | Tau | light chain | | US20160031976 SEQ ID NO: 20 | 3763 |
| | | variable | | | |
| | | region kappa | | | |
| TAU817 | Tau | Light chain | NI-105.9C4 | US20150344553 SEQ ID NO: 77 | 3764 |
| | | variable | | | |
| | | region, before | | | |
| | | germlining | | | |
| TAU818 | Tau | Light chain | variant 1-VL21 | US20150175685 SEQ ID NO: 16; | 3765 |
| | | variable | | WO2015197735 SEQ ID NO: 16 | |
| | | region, | | | |
| | | humanized | | | |
| TAU819 | Tau | Light chain | variant 2-VL22 | US20150175685 SEQ ID NO: 17; | 3766 |
| | | variable | | WO2015197735 SEQ ID NO: 17 | |
| | | region, | | | |
| | | humanized | | | |
| TAU820 | Tau | Light chain | variant 4-VL01 | US20150175685 SEQ ID NO: 32 | 3767 |
| | | variable | | | |
| | | region, | | | |
| | | humanized | | | |
| TAU821 | Tau | Light chain | variant 5-VL09 | US20150175685 SEQ ID NO: 33 | 3768 |
| | | variable | | | |
| | | region, | | | |
| | | humanized | | | |
| TAU822 | Tau | Light chain | variant 6-VL12 | US20150175685 SEQ ID NO: 34 | 3769 |
| | | variable | | | |
| | | region, | | | |
| | | humanized | | | |
| TAU823 | Tau | Light chain | variant 7-VL15 | US20150175685 SEQ ID NO: 35 | 3770 |
| | | variable | | | |
| | | region, | | | |
| | | humanized | | | |
| TAU824 | Tau | Light chain | variant 8-VL16 | US20150175685 SEQ ID NO: 36 | 3771 |
| | | variable | | | |
| | | region, | | | |
| | | humanized | | | |
| TAU825 | Tau | Light chain | variant 9-VL17 | US20150175685 SEQ ID NO: 37 | 3772 |
| | | variable | | | |
| | | region, | | | |
| | | humanized | | | |
| TAU826 | Tau | Light chain | variant 10-VL19 | US20150175685 SEQ ID NO: 38 | 3773 |
| | | variable | | | |
| | | region | | | |
| | | humanized | | | |
| TAU827 | Tau | Light chain | variant 11-VL28 | US20150175685 SEQ ID NO: 39 | 3774 |
| | | variable | | | |
| | | region, | | | |
| | | humanized | | | |
| TAU828 | Tau (pS422) | Light chain | variant 12-VL33 | US20150175685 SEQ ID NO: 40 | 3775 |
| | | variable | | | |
| | | region, | | | |
| | | humanized | | | |
| TAU829 | Tau | Light chain | variant 13-VL35 | US20150175685 SEQ ID NO: 41 | 3776 |
| | | variable | | | |
| | | region, | | | |
| | | humanized | | | |
| TAU830 | Tau | Light chain | variant 14-VL39 | US20150175685 SEQ ID NO: 42 | 3777 |
| | | variable | | | |
| | | region, | | | |
| | | humanized | | | |
| TAU831 | Tau | Light chain | variant 15-VL40 | US20150175685 SEQ ID NO: 43 | 3778 |
| | | variable | | | |
| | | region, | | | |
| | | humanized | | | |
| TAU832 | Tau | Light chain | variant 16-VL41 | US20150175685 SEQ ID NO: 44 | 3779 |
| | | variable | | | |
| | | region, | | | |
| | | humanized | | | |
| TAU833 | Tau | Light chain | variant 17-VL42 | US20150175685 SEQ ID NO: 45 | 3780 |
| | | variable | | | |
| | | region, | | | |
| | | humanized | | | |
| TAU834 | Tau | Light chain | variant 4-VH01 | US20150175685 SEQ ID NO: 46 | 3781 |
| | | variable | | | |
| | | region, | | | |
| | | humanized | | | |
| TAU835 | Tau | Light chain | variant 5-VH02 | US20150175685 SEQ ID NO: 47 | 3782 |
| | | variable | | | |
| | | region, | | | |
| | | humanized | | | |
| TAU836 | Tau | Light chain | variant 6-VH03 | US20150175685 SEQ ID NO: 48 | 3783 |
| | | variable | | | |
| | | region, | | | |
| | | humanized | | | |
| TAU837 | Tau | Light chain | variant 7-VH04 | US20150175685 SEQ ID NO: 49 | 3784 |
| | | variable | | | |
| | | region, | | | |
| | | humanized | | | |
| TAU838 | Tau | Light chain | variant 8-VH14 | US20150175685 SEQ ID NO: 50 | 3785 |
| | | variable | | | |
| | | region, | | | |
| | | humanized | | | |
| TAU839 | Tau | Light chain | variant 9-VH15 | US20150175685 SEQ ID NO: 51 | 3786 |
| | | variable | | | |
| | | region, | | | |
| | | humanized | | | |
| TAU840 | Tau | Light chain | variant 10-VH18 | US20150175685 SEQ ID NO: 52 | 3787 |
| | | variable | | | |
| | | region, | | | |
| | | humanized | | | |
| TAU841 | Tau | Light chain | variant 11-VH19 | US20150175685 SEQ ID NO: 53 | 3788 |
| | | variable | | | |
| | | region, | | | |
| | | humanized | | | |
| TAU842 | Tau | Light chain | variant 12-VH22 | US20150175685 SEQ ID NO: 54 | 3789 |
| | | variable | | | |
| | | region, | | | |
| | | humanized | | | |
| TAU843 | Tau | Light chain | variant 13-VH23 | US20150175685 SEQ ID NO: 55 | 3790 |
| | | variable | | | |
| | | region, | | | |
| | | humanized | | | |
| TAU844 | Tau | Light chain | variant 14-VH24 | US20150175685 SEQ ID NO: 56 | 3791 |
| | | variable | | | |
| | | region, | | | |
| | | humanized | | | |
| TAU845 | Tau | Light chain | variant 15-VH31 | US20150175685 SEQ ID NO: 57 | 3792 |
| | | variable | | | |
| | | region, | | | |
| | | humanized | | | |
| TAU846 | Tau | Light chain | IPN002 Vk | U.S. Pat. No. 8,980,270 SEQ ID NO: 40 | 3793 |
| | | variable | variant 1 | | |
| | | region, | | | |
| | | humanized | | | |
| TAU847 | Tau | Light chain | IPN002 Vk | U.S. Pat. No. 8,980,270 SEQ ID NO: 41 | 3794 |
| | | variable | variant 2 | | |
| | | region, | | | |
| | | humanized | | | |
| TAU848 | Tau | Light chain | IPN002 Vk | U.S. Pat. No. 8,980,270 SEQ ID NO: 42 | 3795 |
| | | variable | variant 3 | | |
| | | region, | | | |
| | | humanized | | | |
| TAU849 | Tau | Light chain | IPN002 Vk | U.S. Pat. No. 8,980,270 SEQ ID NO: 43 | 3796 |
| | | variable | variant 4 | | |
| | | region, | | | |
| | | humanized | | | |
| TAU850 | Tau | Light chain | | US20160031976 SEQ ID NO: 21 | 3797 |
| | | variable | | | |
| | | region, | | | |
| | | mature | | | |
| TAU851 | Tau | Light chain | | US20160031976 SEQ ID NO: 22 | 3798 |
| | | variable | | | |
| | | region, | | | |
| | | mature | | | |
| TAU852 | Tau | Light chain | | US20160031976 SEQ ID NO: 23 | 3799 |
| | | variable | | | |
| | | region, | | | |
| | | mature | | | |
| TAU853 | Tau | ScFv | scFv235 | WO2016007414 SEQ ID NO: 18 | 3800 |
| TAU854 | Tau | scFv235 | | WO2016007414 SEQ ID NO: 22 | 3801 |
| | | Fusion | | | |
| | | Protein | | | |
| TAU855 | Tau | scFv235 | | WO2016007414 SEQ ID NO: 23 | 3802 |
| | | Fusion | | | |
| | | Protein | | | |
| TAU856 | Tau | scFv235 | | WO2016007414 SEQ ID NO: 24 | 3803 |
| | | Fusion | | | |
| | | Protein | | | |
| TAU857 | Tau | scFv235 | | WO2016007414 SEQ ID NO: 25 | 3804 |
| | | Fusion | | | |
| | | Protein | | | |
| TAU858 | Tau | scFv235 | | WO2016007414 SEQ ID NO: 26 | 3805 |
| | | Fusion | | | |
| | | Protein | | | |
| TAU859 | Tau | | Y15982 Igkv8- | WO2016079597 SEQ ID NO: 60 | 3806 |
| | | | 21*01 | | |
| TAU860 | Tau | | L17135 Igkv8- | WO2016079597 SEQ ID NO: 61 | 3807 |
| | | | 28*02 | | |
| TAU861 | Tau | | Y15980 IGKV8- | WO2016079597 SEQ ID NO: 62 | 3808 |
| | | | 19*01 | | |
| TAU862 | Tau | | AJ235948 | WO2016079597 SEQ ID NO: 63 | 3809 |
| | | | IGKV8-30*01 | | |
| TAU863 | Tau | | AJ235947 | WO2016079597 SEQ ID NO: 64 | 3810 |
| | | | IGKV8-28*01 | | |
| TAU864 | Tau | | X72449 | WO2016079597 SEQ ID NO: 65 | 3811 |
| TAU865 | Tau | | AC160990 | WO2016079597 SEQ ID NO: 66 | 3812 |
| | | | Musmus IGHV1- | | |
| | | | 81*01 | | |
| TAU866 | Tau | | AC160473 | WO2016079597 SEQ ID NO: 67 | 3813 |
| | | | Musmus IGHV1- | | |
| | | | 83*01 | | |
| TAU867 | Tau | | AC160990 | WO2016079597 SEQ ID NO: 68 | 3814 |
| | | | Musmus IGHV1- | | |
| | | | 83*01 | | |
| TAU868 | Tau | | AC160473 | WO2016079597 SEQ ID NO: 69 | 3815 |
| | | | Musmus IGHV1- | | |
| | | | 75*01 | | |
| TAU869 | Tau | | X02064 Musmus | WO2016079597 SEQ ID NO: 70 | 3816 |
| | | | IGHV1-54*02 | | |
| TAU870 | Tau | | M65092 | WO2016079597 SEQ ID NO: 71 | 3817 |
| TAU871 | Tau | | | US20150320860 SEQ ID NO: 56 | 3818 |
| TAU872 | Tau | | | US20150320860 SEQ ID NO: 57 | 3819 |
| TAU873 | Tau | | | US20150320860 SEQ ID NO: 58 | 3820 |
| TAU874 | Tau | | | US20150320860 SEQ ID NO: 59 | 3821 |
| TAU875 | Tau | Light chain | | US20150183855 SEQ ID NO: 14; | 3822 |
| | | variable | | WO2016126993 SEQ ID NO: 14 | |
| | | region | | | |
| TAU876 | Tau (O- | Heavy chain | | WO2014159244 SEQ ID NO: 1 | 3823 |
| | GlcNAc) | variable | | | |
| | | region | | | |
| TAU877 | Tau (O- | Light chain | | WO2014159244 SEQ ID NO: 2 | 3824 |
| | GlcNAc) | variable | | | |
| | | region | | | |
| TAU878 | Tau (pS422) | Heavy chain | | WO2015197735 SEQ ID NO: 58 | 3825 |
| | | constant | | | |
| | | region | | | |
| TAU879 | Tau (pS422) | Heavy chain | | WO2015197735 SEQ ID NO: 139 | 3826 |
| | | HC anti-TfR2 | | | |
| | | antibody | | | |
| | | conjugated to | | | |
| | | scFv anti- | | | |
| | | biotin | | | |
| | | antibody | | | |
| | | fragment | | | |
| TAU880 | Tau (pS422) | Heavy chain | | WO2015197735 SEQ ID NO: 138 | 3827 |
| | | HC anti-TfR2 | | | |
| | | antibody | | | |
| | | conjugated to | | | |
| | | scFv anti- | | | |
| | | digoxigenin | | | |
| | | antibody | | | |
| | | fragment | | | |
| TAU881 | Tau (pS422) | Heavy chain | | WO2015197735 SEQ ID NO: 135 | 3828 |
| | | HC anti-TfR1 | | | |
| | | antibody | | | |
| | | conjugated to | | | |
| | | scFv anti- | | | |
| | | digoxigenin | | | |
| | | antibody | | | |
| | | fragment | | | |
| TAU882 | Tau (pS422) | Heavy chain | VH00 | WO2015197735 SEQ ID NO: 11; | 3829 |
| | | variable | | U.S. Pat. No. 9,290,567 SEQ ID NO: 54 | |
| | | region | | | |
| TAU883 | Tau (pS422) | Heavy chain | | WO2015197735 SEQ ID NO: 68 | 3830 |
| | | variable | | | |
| | | region | | | |
| TAU884 | Tau (pS422) | Heavy chain | | WO2015197735 SEQ ID NO: 76 | 3831 |
| | | variable | | | |
| | | region | | | |
| TAU885 | Tau (pS422) | Heavy chain | | WO2015197735 SEQ ID NO: 84 | 3832 |
| | | variable | | | |
| | | region | | | |
| TAU886 | Tau (pS422) | Heavy chain | | WO2015197735 SEQ ID NO: 92 | 3833 |
| | | variable | | | |
| | | region | | | |
| TAU887 | Tau (pS422) | Heavy chain | | WO2015197735 SEQ ID NO: 100 | 3834 |
| | | variable | | | |
| | | region | | | |
| TAU888 | Tau (pS422) | Heavy chain | | WO2015197735 SEQ ID NO: 108 | 3835 |
| | | variable | | | |
| | | region | | | |
| TAU889 | Tau (pS422) | Heavy chain | | WO2015197735 SEQ ID NO: 116 | 3836 |
| | | variable | | | |
| | | region | | | |
| TAU890 | Tau (pS422) | Heavy chain | | WO2015197735 SEQ ID NO: 129 | 3837 |
| | | variable | | | |
| | | region | | | |
| TAU891 | Tau (pS422) | Heavy chain | | WO2015197735 SEQ ID NO: 131 | 3838 |
| | | variable | | | |
| | | region | | | |
| TAU892 | Tau (pS422) | Heavy chain | | WO2015197735 SEQ ID NO: 148 | 3839 |
| | | variable | | | |
| | | region of the | | | |
| | | anti-HeliCar | | | |
| | | motif | | | |
| TAU893 | Tau (pS422) | Heavy | | WO2015197735 SEQ ID NO: 136 | 3840 |
| | | chainHC anti- | | | |
| | | TfR1 antibody | | | |
| | | conjugated to | | | |
| | | scFv anti- | | | |
| | | biotin | | | |
| | | antibody | | | |
| | | fragment | | | |
| TAU894 | Tau (pS422) | Helicar motif | | WO2015197735 SEQ ID NO: 152 | 3841 |
| | | amino acid | | | |
| | | sequence | | | |
| | | cystein | | | |
| | | variant 1 | | | |
| | | fused to | | | |
| | | pseudomonas | | | |
| | | exotoxin | | | |
| | | LR8M with a | | | |
| | | GGG- | | | |
| | | peptidic | | | |
| | | linker and the | | | |
| | | C-terminal K | | | |
| | | deleted | | | |
| TAU895 | Tau (pS422) | human Ig- | | WO2015197735 SEQ ID NO: 60 | 3842 |
| | | lambda | | | |
| | | constant | | | |
| | | region | | | |
| TAU896 | Tau (pS422) | Light chain | | WO2015197735 SEQ ID NO: 137 | 3843 |
| | | LC anti-TfR2 | | | |
| | | antibody | | | |
| TAU897 | Tau (pS422) | Light chain | LC anti-TfR1 | WO2015197735 SEQ ID NO: 134 | 3844 |
| | | LC anti-TfR1 | antibody | | |
| | | antibody | | | |
| TAU898 | Tau (pS422) | Light chain | VL00 | WO2015197735 SEQ ID NO: 7 | 3845 |
| | | variable | | | |
| | | region | | | |
| TAU899 | Tau (pS422) | Light chain | | WO2015197735 SEQ ID NO: 72 | 3846 |
| | | variable | | | |
| | | region | | | |
| TAU900 | Tau (pS422) | Light chain | | WO2015197735 SEQ ID NO: 80 | 3847 |
| | | variable | | | |
| | | region | | | |
| TAU901 | Tau (pS422) | Light chain | | WO2015197735 SEQ ID NO: 88 | 3848 |
| | | variable | | | |
| | | region | | | |
| TAU902 | Tau (pS422) | Light chain | | WO2015197735 SEQ ID NO: 96 | 3849 |
| | | variable | | | |
| | | region | | | |
| TAU903 | Tau (pS422) | Light chain | | WO2015197735 SEQ ID NO: 104 | 3850 |
| | | variable | | | |
| | | region | | | |
| TAU904 | Tau (pS422) | Light chain | | WO2015197735 SEQ ID NO: 112 | 3851 |
| | | variable | | | |
| | | region | | | |
| TAU905 | Tau (pS422) | Light chain | | WO2015197735 SEQ ID NO: 120 | 3852 |
| | | variable | | | |
| | | region | | | |
| TAU906 | Tau (pS422) | Light chain | | WO2015197735 SEQ ID NO: 130 | 3853 |
| | | variable | | | |
| | | region | | | |
| TAU907 | Tau (pS422) | Light chain | | WO2015197735 SEQ ID NO: 132 | 3854 |
| | | variable | | | |
| | | region | | | |
| TAU908 | Tau (pS422) | Light cliain | | WO2015197735 SEQ ID NO: 151 | 3855 |
| | | variable | | | |
| | | region N51C | | | |
| | | variant of the | | | |
| | | anti-HeliCar | | | |
| | | motif | | | |
| TAU909 | Tau (pS422) | Light cliain | | WO2015197735 SEQ ID NO: 150 | 3856 |
| | | variable | | | |
| | | region N55C | | | |
| | | variant of the | | | |
| | | anti-HeliCar | | | |
| | | motif | | | |
| TAU910 | Tau (pS422) | Light chain | | WO2015197735 SEQ ID NO: 149 | 3857 |
| | | variable | | | |
| | | region of the | | | |
| | | anti-HeliCar | | | |
| | | motif | | | |
| TAU911 | Tau pS422 | Heavy chain | | U.S. Pat. No. 9,290,567 SEQ ID NO: 13 | 3858 |
| | | constant | | | |
| | | region | | | |
| TAU912 | Tau pS422 | Heavy cliain | | U.S. Pat. No. 9,290,567 SEQ ID NO: 14 | 3859 |
| | | constant | | | |
| | | region | | | |
| TAU913 | Tau pS422 | Heavy chain | | U.S. Pat. No. 9,290,567 SEQ ID NO: 15 | 3860 |
| | | constant | | | |
| | | region | | | |
| TAU914 | Tau pS422 | Heavy chain | | U.S. Pat. No. 9,290,567 SEQ ID NO: 16 | 3861 |
| | | constant | | | |
| | | region | | | |
| TAU915 | Tau pS422 | Heavy chain | Mab2.10.3 | U.S. Pat. No. 9,290,567 SEQ ID NO: 2 | 3862 |
| | | variable | | | |
| | | region | | | |
| TAU916 | Tau pS422 | Heavy chain | Mab 005 | U.S. Pat. No. 9,290,567 SEQ ID NO: 22 | 3863 |
| | | variable | | | |
| | | region | | | |
| TAU917 | Tau pS422 | Heavy chain | Mab 019 | U.S. Pat. No. 9,290,567 SEQ ID NO: 30 | 3864 |
| | | variable | | | |
| | | region | | | |
| TAU918 | Tau pS422 | Heavy cliain | Mab 020 | U.S. Pat. No. 9,290,567 SEQ ID NO: 38 | 3865 |
| | | variable | | | |
| | | region | | | |
| TAU919 | Tau pS422 | Heavy chain | Mab 085 | U.S. Pat. No. 9,290,567 SEQ ID NO: 46 | 3866 |
| | | variable | | | |
| | | region | | | |
| TAU920 | Tau pS422 | Heavy chain | Mab 097 | U.S. Pat. No. 9,290,567 SEQ ID NO: 62 | 3867 |
| | | variable | | | |
| | | region | | | |
| TAU921 | Tau pS422 | Light chain | Mab2.10.3 | U.S. Pat. No. 9,290,567 SEQ ID NO: 1 | 3868 |
| | | variable | | | |
| | | region | | | |
| TAU922 | Tau pS422 | Light chain | Mab 005 | U.S. Pat. No. 9,290,567 SEQ ID NO: 26 | 3869 |
| | | variable | | | |
| | | region | | | |
| TAU923 | Tau pS422 | Light chain | Mab 019 | U.S. Pat. No. 9,290,567 SEQ ID NO: 34 | 3870 |
| | | variable | | | |
| | | region | | | |
| TAU924 | Tau pS422 | Light chain | Mab 020 | U.S. Pat. No. 9,290,567 SEQ ID NO: 42 | 3871 |
| | | variable | | | |
| | | region | | | |
| TAU925 | Tau pS422 | Light chain | Mab 085 | U.S. Pat. No. 9,290,567 SEQ ID NO: 50 | 3872 |
| | | variable | | | |
| | | region | | | |
| TAU926 | Tau pS422 | Light chain | Mab 086 | U.S. Pat. No. 9,290,567 SEQ ID NO: 58 | 3873 |
| | | variable | | | |
| | | region | | | |
| TAU927 | Tau pS422 | Light chain | Mab 097 | U.S. Pat. No. 9,290,567 SEQ ID NO: 66 | 3874 |
| | | variable | | | |
| | | region | | | |
| TAU928 | Tau/Amyloid | Heavy chain | 3.F5 | US20100323905 SEQ ID NO: 13 | 3875 |
| | beta/Alpha | variable | | and 119 | |
| | synuclein | region | | | |
| | | antibody | | | |
| TAU929 | Tau/Amyloid | Heavy chain | 3.A9 | US20100323905 SEQ ID NO: 14 | 3876 |
| | beta/Alpha | variable | | and 120 | |
| | synuclein | region | | | |
| | | antibody | | | |
| TAU930 | Tau/Amyloid | Heavy chain | 3.00E+09 | US20100323905 SEQ ID NO: 15, | 3877 |
| | beta/Alpha | variable | | 110 | |
| | synuclein | region | | | |
| | | antibody | | | |
| TAU931 | Tau/Amyloid | Heavy chain | #08 | US20100323905 SEQ ID NO: 16 | 3878 |
| | beta/Alpha | variable | | and 111 | |
| | synuclein | region | | | |
| | | antibody | | | |
| TAU932 | Tau/Amyloid | Heavy chain | VHH29 | US20100323905 SEQ ID NO: 18, | 3879 |
| | beta/Alpha | variable | | 118 | |
| | synuclein | region | | | |
| | | antibody | | | |
| TAU933 | Tau/Amyloid | Heavy chain | VHH07 | US20100323905 SEQ ID NO: 97, | 3880 |
| | beta/Alpha | variable | | 98 | |
| | synuclein | region | | | |
| | | antibody | | | |
| TAU934 | Tau/Amyloid | Heavy chain | VHH15 | US20100323905 SEQ ID NO: 99-101 | 3881 |
| | beta/Alpha | variable | | | |
| | synuclein | region | | | |
| | | antibody | | | |
| TAU935 | Tau/Amyloid | Heavy chain | VHH01 | US20100323905 SEQ ID NO: 102 | 3882 |
| | beta/Alpha | variable | | | |
| | synuclein | region | | | |
| | | antibody | | | |
| TAU936 | Tau/Amyloid | Heavy chain | VHH04 | US20100323905 SEQ ID NO: 103 | 3883 |
| | beta/Alpha | variable | | | |
| | synuclein | region | | | |
| | | antibody | | | |
| TAU937 | Tau/Amyloid | Heavy chain | VHH19 | US20100323905 SEQ ID NO: 104 | 3884 |
| | beta/Alpha | variable | | | |
| | synuclein | | | | |
| | | region | | | |
| | | antibody | | | |
| TAU938 | Tau/Amyloid | Heavy chain | VHH21 | US20100323905 SEQ ID NO: 105 | 3885 |
| | beta/Alpha | variable | | | |
| | synuclein | region | | | |
| | | antibody | | | |
| TAU939 | Tau/Amyloid | Heavy chain | VHH05 | US20100323905 SEQ ID NO: 106 | 3886 |
| | beta/Alpha | variable | | | |
| | synuclein | region | | | |
| | | antibody | | | |
| TAU940 | Tau/Amyloid | Heavy chain | VHH23 | US20100323905 SEQ ID NO: 107 | 3887 |
| | beta/Alpha | variable | | | |
| | synuclein | region | | | |
| | | antibody | | | |
| TAU941 | Tau/Amyloid | Heavy chain | VHH34 | US20100323905 SEQ ID NO: 108 | 3888 |
| | beta/Alpha | variable | | | |
| | synuclein | region | | | |
| | | antibody | | | |
| TAU942 | Tau/Amyloid | Heavy chain | VHH26 | US20100323905 SEQ ID NO: 109 | 3889 |
| | beta/Alpha | variable | | | |
| | synuclein | region | | | |
| | | antibody | | | |
| TAU943 | Tau/Amyloid | Heavy chain | VHH18 | US20100323905 SEQ ID NO: 17 | 3890 |
| | beta/Alpha | variable | | and 112 | |
| | synuclein | region | | | |
| | | antibody | | | |
| TAU944 | Tau/Amyloid | Heavy chain | VHH09 | US20100323905 SEQ ID NO: 113 | 3891 |
| | beta/Alpha | variable | | | |
| | synuclein | region | | | |
| | | antibody | | | |
| TAU945 | Tau/Amyloid | Heavy chain | VHH20 | US20100323905 SEQ ID NO: 114 | 3892 |
| | beta/Alpha | variable | | | |
| | synuclein | region | | | |
| | | antibody | | | |
| TAU946 | Tau/Amyloid | Heavy chain | VHH32 | US20100323905 SEQ ID NO: 115 | 3893 |
| | beta/Alpha | variable | | | |
| | synuclein | region | | | |
| | | antibody | | | |
| TAU947 | Tau/Amyloid | Heavy chain | VHH30 | US20100323905 SEQ ID NO: 116 | 3894 |
| | beta/Alpha | variable | | | |
| | synuclein | region | | | |
| | | antibody | | | |
| TAU948 | Tau/Amyloid | Heavy chain | VHH28 | US20100323905 SEQ ID NO: 117 | 3895 |
| | beta/Alpha | variable | | | |
| | synuclein | region | | | |
| | | antibody | | | |
| TAU949 | Tau/Amyloid | Heavy chain | VHH14 | US20100323905 SEQ ID NO: 121 | 3896 |
| | beta/Alpha | variable | | | |
| | synuclein | region | | | |
| | | antibody | | | |
| TAU950 | Tau/Amyloid | Heavy chain | VHH12 | US20100323905 SEQ ID NO: 122 | 3897 |
| | beta/Alpha | variable | | | |
| | synuclein | region | | | |
| | | antibody | | | |
| TAU951 | Tau/Amyloid | Heavy chain | 1B | US20100323905 SEQ ID NO: 52 | 3898 |
| | beta/Alpha | variable | | | |
| | synuclein | region | | | |
| | | antibody, | | | |
| | | amyloid 42 | | | |
| | | VHH | | | |
| TAU952 | Tau/Amyloid | Heavy chain | 1D | US20100323905 SEQ ID NO: 53 | 3899 |
| | beta/Alpha | variable | | | |
| | synuclein | region | | | |
| | | antibody, | | | |
| | | amyloid 42 | | | |
| | | VHH | | | |
| TAU953 | Tau/Amyloid | Heavy chain | 2A | US20100323905 SEQ ID NO: 54 | 3900 |
| | beta/Alpha | variable | | | |
| | synuclein | region | | | |
| | | antibody, | | | |
| | | amyloid 42 | | | |
| | | VHH | | | |
| TAU954 | Tau/Amyloid | Heavy chain | 2B | US20100323905 SEQ ID NO: 55 | 3901 |
| | beta/Alpha | variable | | | |
| | synuclein | region | | | |
| | | antibody, | | | |
| | | amyloid 42 | | | |
| | | VHH | | | |
| TAU955 | Tau/Amyloid | Heavy chain | 2F | US20100323905 SEQ ID NO: 56 | 3902 |
| | beta/Alpha | variable | | | |
| | synuclein | region | | | |
| | | antibody, | | | |
| | | amyloid 42 | | | |
| | | VHH | | | |
| TAU956 | Tau/Amyloid | Heavy chain | 3A | US20100323905 SEQ ID NO: 57 | 3903 |
| | beta/Alpha | variable | | | |
| | synuclein | region | | | |
| | | antibody, | | | |
| | | amyloid 42 | | | |
| | | VHH | | | |
| TAU957 | Tau/Amyloid | Heavy chain | 3H | US20100323905 SEQ ID NO: 58 | 3904 |
| | beta/Alpha | variable | | | |
| | synuclein | region | | | |
| | | antibody, | | | |
| | | amyloid 42 | | | |
| | | VHH | | | |
| TAU958 | Tau/Amyloid | Heavy chain | 4C | US20100323905 SEQ ID NO: 59 | 3905 |
| | beta/Alpha | variable | | | |
| | synuclein | region | | | |
| | | antibody, | | | |
| | | amyloid 42 | | | |
| | | VHH | | | |
| TAU959 | Tau/Amyloid | Heavy chain | 8F | US20100323905 SEQ ID NO: 60 | 3906 |
| | beta/Alpha | variable | | | |
| | synuclein | region | | | |
| | | antibody, | | | |
| | | amyloid 42 | | | |
| | | VHH | | | |
| TAU960 | Tau/Amyloid | Heavy chain | 11D | US20100323905 SEQ ID NO: 61 | 3907 |
| | beta/Alpha | variable | | | |
| | synuclein | region | | | |
| | | antibody, | | | |
| | | amyloid 42 | | | |
| | | VHH | | | |
| TAU961 | Tau/Amyloid | Heavy chain | EME7E | US20100323905 SEQ ID NO: 62 | 3908 |
| | beta/Alpha | variable | | | |
| | synuclein | region | | | |
| | | antibody, | | | |
| | | VHH for | | | |
| | | emerin | | | |
| TAU962 | Tau/Amyloid | Heavy chain | EME1C | US20100323905 SEQ ID NO: 63 | 3909 |
| | beta/Alpha | variable | | | |
| | synuclein | region | | | |
| | | antibody, | | | |
| | | VHH for | | | |
| | | emerin | | | |
| TAU963 | Tau/Amyloid | Heavy chain | VHH01 | US20100323905 SEQ ID NO: 64 | 3910 |
| | beta/Alpha | variable | | | |
| | synuclein | region | | | |
| | | antibody, | | | |
| | | VHH for | | | |
| | | emerin | | | |
| TAU964 | Tau/Amyloid | Heavy chain | VHH03/ | US20100323905 SEQ ID NO: 65 | 3911 |
| | beta/Alpha | variable | VHH23 | | |
| | synuclein | region | | | |
| | | antibody, | | | |
| | | VHH for | | | |
| | | emerin | | | |
| TAU965 | Tau/Amyloid | Heavy chain | EME3H | US20100323905 SEQ ID NO: 66 | 3912 |
| | beta/Alpha | variable | | | |
| | synuclein | region | | | |
| | | antibody, | | | |
| | | VHH for | | | |
| | | emerin | | | |
| TAU966 | Tau/Amyloid | Heavy chain | VHH09 | US20100323905 SEQ ID NO: 67 | 3913 |
| | beta/Alpha | variable | | | |
| | synuclein | region | | | |
| | | antibody, | | | |
| | | VHH for | | | |
| | | emerin | | | |
| TAU967 | Tau/Amyloid | Heavy chain | VHH12 | US20100323905 SEQ ID NO: 68 | 3914 |
| | beta/Alpha | variable | | | |
| | synuclein | region | | | |
| | | antibody, | | | |
| | | VHH for | | | |
| | | emerin | | | |
| TAU968 | Tau/Amyloid | Heavy chain | VHH05 | US20100323905 SEQ ID NO: 69 | 3915 |
| | beta/Alpha | variable | | | |
| | synuclein | region | | | |
| | | antibody, | | | |
| | | VHH for | | | |
| | | emerin | | | |
| TAU969 | Tau/Amyloid | Heavy chain | VHH11 | US20100323905 SEQ ID NO: 70 | 3916 |
| | beta/Alpha | variable | | | |
| | synuclein | region | | | |
| | | antibody, | | | |
| | | VHH for | | | |
| | | emerin | | | |
| TAU970 | Tau/Amyloid | Heavy chain | EME8A | US20100323905 SEQ ID NO: 71 | 3917 |
| | beta/Alpha | variable | | | |
| | synuclein | region | | | |
| | | antibody, | | | |
| | | VHH for | | | |
| | | emerin | | | |
| TAU971 | Tau/Amyloid | Heavy chain | VHH02 | US20100323905 SEQ ID NO: 72 | 3918 |
| | beta/Alpha | variable | | | |
| | synuclein | region | | | |
| | | antibody, | | | |
| | | VHH for | | | |
| | | emerin | | | |
| TAU972 | Tau/Amyloid | Heavy chain | VHH15 | US20100323905 SEQ ID NO: 73 | 3919 |
| | beta/Alpha | variable | | | |
| | synuclein | region | | | |
| | | antibody, | | | |
| | | VHH for | | | |
| | | emerin | | | |
| TAU973 | Tau/Amyloid | Heavy chain | VHH10 | US20100323905 SEQ ID NO: 74 | 3920 |
| | beta/Alpha | variable | | | |
| | synuclein | region | | | |
| | | antibody, | | | |
| | | VHH for | | | |
| | | emerin | | | |
| TAU974 | Tau/Amyloid | Heavy chain | EME4B | US20100323905 SEQ ID NO: 75 | 3921 |
| | beta/Alpha | variable | | | |
| | synuclein | region | | | |
| | | antibody, | | | |
| | | VHH for | | | |
| | | emerin | | | |
| TAU975 | Tau/Amyloid | Heavy chain | VHH13 | US20100323905 SEQ ID NO: 76 | 3922 |
| | beta/Alpha | variable | | | |
| | synuclein | region | | | |
| | | antibody, | | | |
| | | VHH for | | | |
| | | emerin | | | |
| TAU976 | Tau/Amyloid | Heavy chain | EME7F | US20100323905 SEQ ID NO: 77 | 3923 |
| | beta/Alpha | variable | | | |
| | synuclein | region | | | |
| | | antibody, | | | |
| | | VHH for | | | |
| | | emerin | | | |
| TAU977 | Tau/Amyloid | Heavy chain | VHH14 | US20100323905 SEQ ID NO: 78 | 3924 |
| | beta/Alpha | variable | | | |
| | synuclein | region | | | |
| | | antibody, | | | |
| | | VHH for | | | |
| | | emerin | | | |
| TAU978 | Tau/Amyloid | Heavy chain | EME2G | US20100323905 SEQ ID NO: 79 | 3925 |
| | beta/Alpha | variable | | | |
| | synuclein | region | | | |
| | | antibody, | | | |
| | | VHH for | | | |
| | | emerin | | | |
| TAU979 | Tau/Amyloid | Heavy chain | EME8D | US20100323905 SEQ ID NO: 80 | 3926 |
| | beta/Alpha | variable | | | |
| | synuclein | region | | | |
| | | antibody, | | | |
| | | VHH for | | | |
| | | emerin | | | |
| TAU980 | Tau/Amyloid | Heavy chain | VHH04 | US20100323905 SEQ ID NO: 81 | 3927 |
| | beta/Alpha | variable | | | |
| | synuclein | region | | | |
| | | antibody, | | | |
| | | VHH for | | | |
| | | emerin | | | |
| TAU981 | Tau/Amyloid | Heavy chain | VHH07/ | US20100323905 SEQ ID NO: 82 | 3928 |
| | beta/Alpha | variable | VHH08 | | |
| | synuclein | region | | | |
| | | antibody, | | | |
| | | VHH for | | | |
| | | emerin | | | |
| TAU982 | Tau/Amyloid | Heavy chain | VHH16 | US20100323905 SEQ ID NO: 83 | 3929 |
| | beta/Alpha | variable | | | |
| | synuclein | region | | | |
| | | antibody, | | | |
| | | VHH for | | | |
| | | emerin | | | |
| TAU983 | Tau/Amyloid | Heavy chain | 3.6B | US20100323905 SEQ ID NO: 84 | 3930 |
| | beta/Alpha | variable | | | |
| | synuclein | region | | | |
| | | antibody, | | | |
| | | VHH for | | | |
| | | emerin | | | |
| TAU984 | Tau/Amyloid | Heavy chain | 3.8B | US20100323905 SEQ ID NO: 85 | 3931 |
| | beta/Alpha | variable | | | |
| | synuclein | region | | | |
| | | antibody, | | | |
| | | VHH for | | | |
| | | emerin | | | |
| TAU985 | Tau/Amyloid | Heavy chain | VHH24 | US20100323905 SEQ ID NO: 86 | 3932 |
| | beta/Alpha | variable | | | |
| | synuclein | region | | | |
| | | antibody, | | | |
| | | VHH for | | | |
| | | emerin | | | |
| TAU986 | Tau/Amyloid | Heavy chain | VHH21 | US20100323905 SEQ ID NO: 87 | 3933 |
| | beta/Alpha | variable | | | |
| | synuclein | region | | | |
| | | antibody, | | | |
| | | VHH for | | | |
| | | emerin | | | |
| TAU987 | Tau/Amyloid | Heavy chain | 3.8E | US20100323905 SEQ ID NO: 88 | 3934 |
| | beta/Alpha | variable | | | |
| | synuclein | region | | | |
| | | antibody, | | | |
| | | VHH for | | | |
| | | emerin | | | |
| TAU988 | Tau/Amyloid | Heavy chain | | US20100323905 SEQ ID NO: 89 | 3935 |
| | beta/Alpha | variable | | | |
| | synuclein | region | | | |
| | | antibody, | | | |
| | | VHH which | | | |
| | | can | | | |
| | | translocate | | | |
| | | via blood | | | |
| | | brain barrier | | | |
| TAU989 | Tau/Amyloid | Heavy chain | | US20100323905 SEQ ID NO: 90 | 3936 |
| | beta/Alpha | variable | | | |
| | synuclein | region | | | |
| | | antibody, | | | |
| | | VHH which | | | |
| | | can | | | |
| | | translocate | | | |
| | | via blood | | | |
| | | brain barrier | | | |
| TAU990 | Tau/Aβ | | | US20110002945 SEQ ID NO: 2 | 3937 |
| | peptides | | | | |
| TAU991 | Tau/Aβ | | | US20110002945 SEQ ID NO: 3 | 3938 |
| | peptides | | | | |
| TAU992 | Tau | CDR | | WO2016137811 SEQ ID NO: 3 | 3939 |
| TAU993 | Tau | CDR | | WO2016137811 SEQ ID NO: 4 | 3940 |
| TAU994 | Tau | CDR | | WO2016137811 SEQ ID NO: 5 | 3941 |
| TAU995 | Tau | CDR | | WO2016137811 SEQ ID NO: 6 | 3942 |
| TAU996 | Tau | CDR | | WO2016137811 SEQ ID NO: 7 | 3943 |
| TAU997 | Tau | CDR | | WO2016137811 SEQ ID NO: 8 | 3944 |
| TAU998 | Tau | CDR | | WO2015122922 SEQ ID NO: 41 | 3945 |
| TAU999 | Tau | CDR | | WO2015122922 SEQ ID NO: 49 | 3946 |
| | | | | and 57 | |
| TAU1000 | Tau | CDR | | WO2016126993 SEQ ID NO: 16 | 3947 |
| TAU1001 | Tau | CDR | | WO2016126993 SEQ ID NO: 17 | 3948 |
| TAU1002 | Tau | CDR | | WO2016126993 SEQ ID NO: 18 | 3949 |
| TAU1003 | Tau | CDR | | WO2016126993 SEQ ID NO: 19 | 3950 |
| TAU1004 | Tau | CDR | | WO2016126993 SEQ ID NO: 20 | 3951 |
| TAU1005 | Tau | CDR | | WO2016126993 SEQ ID NO: 21 | 3952 |
| TAU1006 | Tau | dimeric | DH-Tau15 | WO2016055941 SEQ ID NO: 20 | 3953 |
| | | antibody | | | |
| TAU1007 | Tau | Fc | Fc-Tau15 | WO2016055941 SEQ ID NO: 23 | 3954 |
| TAU1008 | Tau | full antibody | MC-1 Furin 2A | WO2015035190 SEQ ID NO: 2 | 3955 |
| TAU1009 | Tau | full antibody | MC-1 Furin 2A | WO2015035190 SEQ ID NO: 4 | 3956 |
| TAU1010 | Tau | full antibody | MC-1 optimized | WO2015035190 SEQ ID NO: 6 | 3957 |
| | | | seq | | |
| TAU1011 | Tau | full antibody | PHF-1 Furin 2A | WO2015035190 SEQ ID NO: 1 | 3958 |
| TAU1012 | Tau | full antibody | PHF-1 Furin 2A | WO2015035190 SEQ ID NO: 3 | 3959 |
| TAU1013 | Tau | full antibody | PHF-1 optimized | WO2015035190 SEQ ID NO: 5 | 3960 |
| | | | seq | | |
| TAU1014 | Tau | Heavy chain | 1 A6 | WO2016137950 SEQ ID NO: 46 | 3961 |
| TAU1015 | Tau | heavy chain | 113F5-F7 | WO2016196726 SEQ ID NO: 90 | 3962 |
| TAU1016 | Tau | heavy chain | 111E10-B8 | WO2016196726 SEQ ID NO: 30 | 3963 |
| TAU1017 | Tau | heavy chain | 123E9-A1 | WO2016196726 SEQ ID NO: 140 | 3964 |
| TAU1018 | Tau | heavy chain | 125B11-H3 | WO2016196726 SEQ ID NO: 80 | 3965 |
| TAU1019 | Tau | heavy chain | 126F11-G11 | WO2016196726 SEQ ID NO: 180 | 3966 |
| TAU1020 | Tau | heavy chain | 12A10-E8 | WO2016196726 SEQ ID NO: 250 | 3967 |
| TAU1021 | Tau | heavy chain | 14F5-D9 | WO2016196726 SEQ ID NO: 210 | 3968 |
| TAU1022 | Tau | heavy chain | 15C6-A7 | WO2016196726 SEQ ID NO: 150 | 3969 |
| TAU1023 | Tau | Heavy chain | 17H3.2 | WO2016112078 SEQ ID NO: 20 | 3970 |
| TAU1024 | Tau | heavy chain | 19F8-B1 | WO2016196726 SEQ ID NO: 160 | 3971 |
| TAU1025 | Tau | heavy chain | 19H6-F7 | WO2016196726 SEQ ID NO: 60 | 3972 |
| TAU1026 | Tau | heavy chain | 22G7-C9 | WO2016196726 SEQ ID NO: 230 | 3973 |
| TAU1027 | Tau | heavy chain | 24A11-D5 | WO2016196726 SEQ ID NO: 170 | 3974 |
| TAU1028 | Tau | heavy chain | 26C1-B11 and | WO2016196726 SEQ ID NO: 100 | 3975 |
| | | | 26C1-C8 | and 110 | |
| TAU1029 | Tau | Heavy chain | 29H2.10 | WO2016112078 SEQ ID NO: 22 | 3976 |
| TAU1030 | Tau | Heavy chain | 29H2.10N31S | WO2016112078 SEQ ID NO: 23 | 3977 |
| | | | (Mutant) | | |
| TAU1031 | Tau | heavy chain | 30G1-B2 | WO2016196726 SEQ ID NO: 120 | 3978 |
| TAU1032 | Tau | heavy chain | 37D3-H9 and | WO2016196726 SEQ ID NO: 10 | 3979 |
| | | | 37D3-H9b | and 20 | |
| TAU1033 | Tau | heavy chain | 3A4-H4 | WO2016196726 SEQ ID NO: 50 | 3980 |
| TAU1034 | Tau | Heavy chain | 4G11 | WO2016137950 SEQ ID NO: 42 | 3981 |
| TAU1035 | Tau | heavy chain | 52F6-H11 | WO2016196726 SEQ ID NO: 270 | 3982 |
| TAU1036 | Tau | heavy chain | 54C1-H11 and | WO2016196726 SEQ ID NO: 40 | 3983 |
| | | | 61E7-C4 | | |
| TAU1037 | Tau | heavy chain | 55E7-F11 | WO2016196726 SEQ ID NO: 260 | 3984 |
| TAU1038 | Tau | heavy chain | 66F5-A1 | WO2016196726 SEQ ID NO: 130 | 3985 |
| TAU1039 | Tau | heavy chain | 73H6-B8 | WO2016196726 SEQ ID NO: 220 | 3986 |
| TAU1040 | Tau | heavy chain | 7A11-C12 | WO2016196726 SEQ ID NO: 240 | 3987 |
| TAU1041 | Tau | heavy chain | 89F4-A1 | WO2016196726 SEQ ID NO: 190 | 3988 |
| TAU1042 | Tau | heavy chain | 93A8-D2 | WO2016196726 SEQ ID NO: 200 | 3989 |
| TAU1043 | Tau | heavy chain | 94B2-C1 | WO2016196726 SEQ ID NO: 70 | 3990 |
| TAU1044 | Tau ps409 | heavy chain | hAC1-36-3A8- | US20150175682 SEQ ID NO: 11 | 3991 |
| | | | Ab1 | | |
| TAU1045 | Tau | heavy chain | hu125B11.v17 | WO2016196726 SEQ ID NO: 310 | 3992 |
| | | | and hu125B11- | and 448 | |
| | | | H3.HC3 | | |
| TAU1046 | Tau | heavy chain | hu125B11.v17 | WO2016196726 SEQ ID NO: 311 | 3993 |
| TAU1047 | Tau | heavy chain | hu125B11.v26 | WO2016196726 SEQ ID NO: 320 | 3994 |
| TAU1048 | Tau | heavy chain | hu125B11.v26 | WO2016196726 SEQ ID NO: 321 | 3995 |
| TAU1049 | Tau | heavy chain | hu125B11.v28 | WO2016196726 SEQ ID NO: 330 | 3996 |
| TAU1050 | Tau | heavy chain | hu125B11.v28 | WO2016196726 SEQ ID NO: 331 | 3997 |
| TAU1051 | Tau | heavy chain | hu125B11- | WO2016196726 SEQ ID NO: 446 | 3998 |
| | | | H3.HC1 | | |
| TAU1052 | Tau | heavy chain | hu125B11- | WO2016196726 SEQ ID NO: 447 | 3999 |
| | | | H3.HC2 | | |
| TAU1053 | Tau | heavy chain | hu125B11- | WO2016196726 SEQ ID NO: 449 | 4000 |
| | | | H3.HC4 | | |
| TAU1054 | Tau | heavy chain | hu125B11- | WO2016196726 SEQ ID NO: 450 | 4001 |
| | | | H3.HC5 | | |
| TAU1055 | Tau | heavy chain | hu125B11- | WO2016196726 SEQ ID NO: 451 | 4002 |
| | | | H3.HC6 | | |
| TAU1056 | Tau | heavy chain | Hu37D3.v39 | WO2016196726 SEQ ID NO: 560, | 4003 |
| | | | | 570, 580 | |
| TAU1057 | Tau | heavy chain | Hu37D3-H9.v1 | WO2016196726 SEQ ID NO: 280 | 4004 |
| TAU1058 | Tau | heavy chain | Hu37D3- | WO2016196726 SEQ ID NO: 340 | 4005 |
| | | | H9.v28.A4 | | |
| TAU1059 | Tau | heavy chain | Hu37D3- | WO2016196726 SEQ ID NO: 348 | 4006 |
| | | | H9.v28.A4 | | |
| | | | IgG4- | | |
| | | | S228P.YTE | | |
| TAU1060 | Tau | heavy chain | Hu37D3- | WO2016196726 SEQ ID NO: 602 | 4007 |
| | | | H9.v28.A4 | | |
| | | | IgG4- | | |
| | | | S228P.YTE des-K | | |
| TAU1061 | Tau | heavy chain | Hu37D3-H9.v5 | WO2016196726 SEQ ID NO: 290 | 4008 |
| TAU1062 | Tau | heavy chain | Hu94B2.HC1 | WO2016196726 SEQ ID NO: 452 | 4009 |
| TAU1063 | Tau | heavy chain | Hu94B2.HC2 | WO2016196726 SEQ ID NO: 453 | 4010 |
| TAU1064 | Tau | heavy chain | Hu94B2.HC3 | WO2016196726 SEQ ID NO: 454 | 4011 |
| TAU1065 | Tau | heavy chain | Hu94B2.HC4 | WO2016196726 SEQ ID NO: 455 | 4012 |
| TAU1066 | Tau | heavy chain | Hu94B2.HC5 | WO2016196726 SEQ ID NO: 456 | 4013 |
| TAU1067 | Tau | heavy chain | Hu94B2.HC6 | WO2016196726 SEQ ID NO: 457 | 4014 |
| TAU1068 | Tau | heavy chain | Hu94B2.HC7 | WO2016196726 SEQ ID NO: 458 | 4015 |
| TAU1069 | Tau | heavy chain | Hu94B2.HC8 | WO2016196726 SEQ ID NO: 459 | 4016 |
| TAU1070 | Tau | heavy chain | Hu94B2.v105 | WO2016196726 SEQ ID NO: 300 | 4017 |
| TAU1071 | Tau(pS422) | heavy chain | MAb086 | WO2015197735 SEQ ID NO: 11 | 4018 |
| TAU1072 | Tau | heavy chain | | WO2016137811 SEQ ID NO: 2 | 4019 |
| TAU1073 | Tau | heavy chain | | WO2016137811 SEQ ID NO: 12 | 4020 |
| TAU1074 | Tau (pS422) | heavy chain | | WO2015197735 SEQ ID NO: 58 | 4021 |
| | | constant | | | |
| | | regions | | | |
| TAU1075 | Tau | heavy chain | DC8E8 | WO2016079597 SEQ ID NO: 7 | 4022 |
| | | variable | | | |
| | | domain | | | |
| TAU1076 | Tau(pS422) | heavy chain | | WO2015197735 SEQ ID NO: 21 | 4023 |
| | | variable | | | |
| | | domain | | | |
| TAU1077 | Tau | heavy chain | | WO2016137811 SEQ ID NO: 10 | 4024 |
| | | variable | | | |
| | | domain | | | |
| TAU1078 | Tau & | intrabody | A2 | WO2014193632 SEQ ID NO: 2 | 4025 |
| | huntingtin | | | | |
| TAU1079 | Tau & | intrabody | E10 | WO2014193632 SEQ ID NO: 3 | 4026 |
| | huntingtin | | | | |
| TAU1080 | Tau & | intrabody | H8 | WO2014193632 SEQ ID NO: 4 | 4027 |
| | huntingtin | | | | |
| TAU1081 | Tau & | intrabody | ΓNT41 | WO2014193632 SEQ ID NO: 1 | 4028 |
| | huntingtin | | | | |
| TAU1082 | Tau & | intrabody | | WO2014193632 SEQ ID NO: 5 | 4029 |
| | huntingtin | | | | |
| TAU1083 | Tau(pS422) | Ig-kappa light | | WO2015197735 SEQ ID NO: 59 | 4030 |
| | | chain | | | |
| | | constant | | | |
| | | region | | | |
| TAU1084 | Tau(pS422) | Ig-kappa light | | WO2015197735 SEQ ID NO: 60 | 4031 |
| | | chain | | | |
| | | constant | | | |
| | | region | | | |
| TAU1085 | Tau | light chain | 1 A6 | WO2016137950 SEQ ID NO: 48 | 4032 |
| TAU1086 | Tau | light chain | 113F5-F7 | WO2016196726 SEQ ID NO: 91 | 4033 |
| TAU1087 | Tau | light chain | 11E10-B8 | WO2016196726 SEQ ID NO: 31 | 4034 |
| TAU1088 | Tau | light chain | 123E9-A1 | WO2016196726 SEQ ID NO: 141 | 4035 |
| TAU1089 | Tau | light chain | 125B11-H3 | WO2016196726 SEQ ID NO: 81 | 4036 |
| TAU1090 | Tau | light chain | 126F11-G11 | WO2016196726 SEQ ID NO: 181 | 4037 |
| TAU1091 | Tau | light chain | 12A10-E8 | WO2016196726 SEQ ID NO: 251 | 4038 |
| TAU1092 | Tau | light chain | 14F5-D9 | WO2016196726 SEQ ID NO: 211 | 4039 |
| TAU1093 | Tau | light chain | 15C6-A7 | WO2016196726 SEQ ID NO: 151 | 4040 |
| TAU1094 | Tau | light chain | 17H3.2 | WO2016112078 SEQ ID NO: 21 | 4041 |
| TAU1095 | Tau | light chain | 19F8-B1 | WO2016196726 SEQ ID NO: 161 | 4042 |
| TAU1096 | Tau | light chain | 19H6-F7 | WO2016196726 SEQ ID NO: 61 | 4043 |
| TAU1097 | Tau | light chain | 22G7-C9 | WO2016196726 SEQ ID NO: 231 | 4044 |
| TAU1098 | Tau | light chain | 24A11-D5 | WO2016196726 SEQ ID NO: 171 | 4045 |
| TAU1099 | Tau | light chain | 26C1-B11 | WO2016196726 SEQ ID NO: 101 | 4046 |
| TAU1100 | Tau | light chain | 26C1-C8 | WO2016196726 SEQ ID NO: 111 | 4047 |
| TAU1101 | Tau | Light chain | 29H2.10 | WO2016112078 SEQ ID NO: 24 | 4048 |
| TAU1102 | Tau | light chain | 30G1-B2 | WO2016196726 SEQ ID NO: 121 | 4049 |
| TAU1103 | Tau | light chain | 37D3-H9 | WO2016196726 SEQ ID NO: 11 | 4050 |
| TAU1104 | Tau | light chain | 37D3-H9b | WO2016196726 SEQ ID NO: 21 | 4051 |
| TAU1105 | Tau | light chain | 3A4-H4 | WO2016196726 SEQ ID NO: 51 | 4052 |
| TAU1106 | Tau | Light chain | 4G11 | WO2016137950 SEQ ID NO: 44 | 4053 |
| TAU1107 | Tau | light chain | 52F6-F11 | WO2016196726 SEQ ID NO: 271 | 4054 |
| TAU1108 | Tau | light chain | 54C1-H11 and | WO2016196726 SEQ ID NO: 41 | 4055 |
| | | | 61E7-C4 | | |
| TAU1109 | Tau | light chain | 55E7-F11 | WO2016196726 SEQ ID NO: 261 | 4056 |
| TAU1110 | Tau | light chain | 66F5-A1 | WO2016196726 SEQ ID NO: 131 | 4057 |
| TAU1111 | Tau | light chain | 73H6-B8 | WO2016196726 SEQ ID NO: 221 | 4058 |
| TAU1112 | Tau | light chain | 7A11-C12 | WO2016196726 SEQ ID NO: 241 | 4059 |
| TAU1113 | Tau | light chain | 89F4-A1 | WO2016196726 SEQ ID NO: 191 | 4060 |
| TAU1114 | Tau | light chain | 93A8-D2 | WO2016196726 SEQ ID NO: 201 | 4061 |
| TAU1115 | Tau | light chain | 94B2-C1 | WO2016196726 SEQ ID NO: 71 | 4062 |
| TAU1116 | Tau ps410 | light chain | hAC1-36-3A8- | US20150175682 SEQ ID NO: 12 | 4063 |
| | | | Ab1 | | |
| TAU1117 | Tau | light chain | hu125B11- | WO2016196726 SEQ ID NO: 442 | 4064 |
| | | | H3.LC1 | | |
| TAU1118 | Tau | light chain | hu125B11- | WO2016196726 SEQ ID NO: 443 | 4065 |
| | | | H3.LC2 | | |
| TAU1119 | Tau | light chain | hu125B11- | WO2016196726 SEQ ID NO: 444 | 4066 |
| | | | H3.LC3 | | |
| TAU1120 | Tau | light chain | hu125B11- | WO2016196726 SEQ ID NO: 445 | 4067 |
| | | | H3.LC4 | | |
| TAU1121 | Tau | light chain | Hu37D3.v39 | WO2016196726 SEQ ID NO: 561 | 4068 |
| TAU1122 | Tau | light chain | Hu37D3.v40 | WO2016196726 SEQ ID NO: 571 | 4069 |
| TAU1123 | Tau | light chain | Hu37D3.v41 | WO2016196726 SEQ ID NO: 581 | 4070 |
| TAU1124 | Tau | light chain | Hu37D3-H9.v1 | WO2016196726 SEQ ID NO: 281 | 4071 |
| TAU1125 | Tau | light chain | Hu37D3- | WO2016196726 SEQ ID NO: 341 | 4072 |
| | | | H9.v28.A4 | | |
| TAU1126 | Tau | light chain | Hu37D3- | WO2016196726 SEQ ID NO: 349 | 4073 |
| | | | H9.v28.A4 | | |
| | | | IgG4- | | |
| | | | S228P.YTE | | |
| TAU1127 | Tau | light chain | Hu37D3-H9.v5 | WO2016196726 SEQ ID NO: 291 | 4074 |
| TAU1128 | Tau | light chain | Hu94B2.LC10 | WO2016196726 SEQ ID NO: 461 | 4075 |
| TAU1129 | Tau | light chain | Hu94B2.LC11 | WO2016196726 SEQ ID NO: 462 | 4076 |
| TAU1130 | Tau | light chain | Hu94B2.LC12 | WO2016196726 SEQ ID NO: 463 | 4077 |
| TAU1131 | Tau | light chain | Hu94B2.LC13 | WO2016196726 SEQ ID NO: 464 | 4078 |
| TAU1132 | Tau | light chain | Hu94B2.LC14 | WO2016196726 SEQ ID NO: 465 | 4079 |
| TAU1133 | Tau | light chain | Hu94B2.LC15 | WO2016196726 SEQ ID NO: 466 | 4080 |
| TAU1134 | Tau | light chain | Hu94B2.LC16 | WO2016196726 SEQ ID NO: 467 | 4081 |
| TAU1135 | Tau | light chain | Hu94B2.LC9 | WO2016196726 SEQ ID NO: 460 | 4082 |
| TAU1136 | Tau | light chain | Hu94B2.v105 | WO2016196726 SEQ ID NO: 301 | 4083 |
| TAU1137 | Tau(pS422) | light chain | MAb086 | WO2015197735 SEQ ID NO: 07 | 4084 |
| TAU1138 | Tau | light chain | | WO2016137811 SEQ ID NO: 1 | 4085 |
| TAU1139 | Tau | light chain | | WO2016137811 SEQ ID NO: 11 | 4086 |
| TAU1140 | Tau | light chain | | U.S. Pat. No. 8,940,272B2 SEQ ID NO: 11 | 4087 |
| TAU1141 | Tau ps411 | light chain | hAC1-36-2B6- | US20150175682 SEQ ID NO: 13 | 4088 |
| | | | Ab1 | | |
| TAU1142 | Tau | light chain | DC8E8 | WO2016079597 SEQ ID NO: 8 | 4089 |
| | | variable | | | |
| | | domain | | | |
| TAU1143 | Tau | light chain | | WO2016137811 SEQ ID NO: 9 | 4090 |
| | | variable | | | |
| | | domain | | | |
| TAU1144 | Tau | single domain | Tau15 | WO2016055941 SEQ ID NO: 7 | 4091 |
| | | antibody | | | |
| TAU1145 | Tau | single domain | Tau81 | WO2016055941 SEQ ID NO: 8 | 4092 |
| | | antibody | | | |
| TAU1146 | pTau | Heavy chain | AB1 | WO2017005732A1 SEQ ID NO: 8 | 4093 |
| | (pS198/pS199/ | | | | |
| | pS202/pT205) | | | | |
| TAU1147 | pTau | Heavy chain | AB1 | WO2017005732A1 SEQ ID NO: 10 | 4094 |
| | (pS198/pS199/ | | | | |
| | pS202/pT205) | | | | |
| TAU1148 | pTau | Heavy chain | AB1 | WO2017005732A1 SEQ ID NO: 14 | 4095 |
| | (pS198/pS199/ | | | | |
| | pS202/pT205) | | | | |
| TAU1149 | pTau | Heavy chain | AB1 | WO2017005732A1 SEQ ID NO: 15 | 4096 |
| | (pS198/pS199/ | | | | |
| | pS202/pT205) | | | | |
| TAU1150 | pTau | Heavy chain | AB1 | WO2017005732A1 SEQ ID NO: 16 | 4097 |
| | (pS198/pS199/ | | | | |
| | pS202/pT205) | | | | |
| TAU1151 | pTau | Heavy chain | AB1 | WO2017005732A1 SEQ ID NO: 20 | 4098 |
| | (pS198/pS199/ | | | | |
| | pS202/pT205) | | | | |
| TAU1152 | pTau | Heavy chain | AB1 | WO2017005732A1 SEQ ID NO: 21 | 4099 |
| | (pS198/pS199/ | | | | |
| | pS202/pT205) | | | | |
| TAU1153 | pTau | Heavy chain | AB1 | WO2017005732A1 SEQ ID NO: 22 | 4100 |
| | (pS198/pS199/ | | | | |
| | pS202/pT205) | | | | |
| TAU1154 | pTau | Heavy chain | AB1 | WO2017005732A1 SEQ ID NO: 23 | 4101 |
| | (pS198/pS199/ | | | | |
| | pS202/pT205) | | | | |
| TAU1155 | pTau | Heavy chain | AB1 | WO2017005732A1 SEQ ID NO: 24 | 4102 |
| | (pS198/pS199/ | | | | |
| | pS202/pT205) | | | | |
| TAU1156 | pTau | Heavy chain | AB1 | WO2017005732A1 SEQ ID NO: 25 | 4103 |
| | (pS198/pS199/ | | | | |
| | pS202/pT205) | | | | |
| TAU1157 | Tau | Heavy chain | AB1 | WO2017005732A1 SEQ ID NO: 27 | 4104 |
| TAU1158 | pTAU (pS396) | Heavy Chain | C10.2 | US20170015738A1 SEQ ID NO: 16 | 4105 |
| TAU1159 | Tau | heavy chain | C2N-8E12 | WO2016201434A2 SEQ ID NO: 14 | 4106 |
| TAU1160 | pTAU (pS396) | Heavy Chain | C5.2 | US20170015738A1 SEQ ID NO: 24 | 4107 |
| TAU1161 | pTAU (pS396) | Heavy Chain | C8.3 | US20170015738A1 SEQ ID NO: 32 | 4108 |
| TAU1162 | pTAU (pS396) | Heavy Chain | D1.2 | US20170015738A1 SEQ ID NO: 8 | 4109 |
| TAU1163 | pTAU (pS396) | Heavy Chain | humanized C10.2 | US20170015738A1 SEQ ID NO: 35 | 4110 |
| TAU1164 | Tau | Heavy chain | mFab AB 1 | WO2017005734A1 SEQ ID NO: 20 | 4111 |
| TAU1165 | Tau | Heavy chain | mFab AB1 | WO2017005734A1 SEQ ID NO: 8 | 4112 |
| TAU1166 | Tau | Heavy chain | | WO2017005734A1 SEQ ID NO: 10 | 4113 |
| TAU1167 | Tau | Heavy chain | | WO2017005734A1 SEQ ID NO: 11 | 4114 |
| TAU1168 | Tau | Heavy chain | | WO2017005734A1 SEQ ID NO: 12 | 4115 |
| TAU1169 | Tau | Heavy chain | | WO2017005734A1 SEQ ID NO: 13 | 4116 |
| TAU1170 | Tau | Heavy chain | | WO2017005734A1 SEQ ID NO: 22 | 4117 |
| TAU1171 | Tau | Heavy chain | | WO2017005734A1 SEQ ID NO: 23 | 4118 |
| TAU1172 | Tau | Heavy chain | | WO2017005734A1 SEQ ID NO: 54 | 4119 |
| TAU1173 | Tau | Heavy chain | | WO2017005734A1 SEQ ID NO: 55 | 4120 |
| TAU1174 | Tau | Heavy chain | | WO2017005734A1 SEQ ID NO: 15 | 4121 |
| TAU1175 | Tau | Heavy chain | | WO2017005734A1 SEQ ID NO: 16 | 4122 |
| TAU1176 | Tau | Heavy chain | | WO2017005734A1 SEQ ID NO: 17 | 4123 |
| TAU1177 | Tau | Heavy chain | | WO2017005734A1 SEQ ID NO: 18 | 4124 |
| TAU1178 | Tau | Heavy chain | C2N-8E12 | WO2016201434A2 SEQ ID NO: 15 | 4125 |
| | | (VH1) | | | |
| TAU1179 | Tau | Heavy chain | C2N-8E12 | WO2016201434A2 SEQ ID NO: 16 | 4126 |
| | | (VH2) | | | |
| TAU1180 | Tau | Heavy chain | C2N-8E12 | WO2016201434A2 SEQ ID NO: 17 | 4127 |
| | | (VH3) | | | |
| TAU1181 | Tau | Heavy chain | C2N-8E12 | WO2016201434A2 SEQ ID NO: 18 | 4128 |
| | | (VH4) | | | |
| TAU1182 | Tau (421) | Heavy chain | 1G10D2 | WO2017027685A2 SEQ ID NO: 12 | 4129 |
| | | variable | | | |
| | | domain | | | |
| TAU1183 | Tau (421) | Heavy chain | 1G11A10 | WO2017027685A2 SEQ ID NO: 20 | 4130 |
| | | variable | | | |
| | | domain | | | |
| TAU1184 | Tau pS404 | Heavy chain | 4E6G7 | WO2017027691A1 SEQ ID NO: 13 | 4131 |
| | | variable | | | |
| | | domain | | | |
| TAU1185 | Tau (421) | Heavy chain | 5G2A3 | WO2017027685A2 SEQ ID NO: 40 | 4132 |
| | | variable | | | |
| | | domain | | | |
| TAU1186 | Tau | Heavy chain | IPN001 VH | U.S. Pat. No. 9,567,395 SEQ ID NO: 18 | 4133 |
| | | variable | | | |
| | | region | | | |
| TAI1187 | Tau | Heavy chain | IPN002 VH | U.S. Pat. No. 9,567,395 SEQ ID NO: 20 | 4134 |
| | | variable | | | |
| | | region | | | |
| TAU1188 | Tau | Heavy chain | ACI-35-ID2- | U.S. Pat. No. 9,540,434 SEQ ID NO: 86 | 4135 |
| | | variable | Ab1 | | |
| | | region (VH) | | | |
| TAU1189 | Tau | Heavy chain | ACI-35-2A1- | U.S. Pat. No. 9,540,434 SEQ ID NO: 109 | 4136 |
| | | variable | Ab1, ACI-35- | | |
| | | region (VH) | 2A1-Ab2, and | | |
| | | | ACI-35-4A6- | | |
| | | | Ab2 | | |
| TAU1190 | Tau | Heavy chain | ACI-35-2G5- | U.S. Pat. No. 9,540,434 SEQ ID NO: 111 | 4137 |
| | | variable | AB1 | | |
| | | region (VH) | | | |
| TAU1191 | Tau | Heavy chain | ACI-35-2G5- | U.S. Pat. No. 9,540,434 SEQ ID NO: 113 | 4138 |
| | | variable | AB2 and ACI- | | |
| | | region (VH) | 35-2G5-AB3 | | |
| TAU1192 | Tau | Heavy chain | ACI-35-4A6- | U.S. Pat. No. 9,540,434 SEQ ID NO: 84 | 4139 |
| | | variable | Ab1 | | |
| | | region (VH) | | | |
| TAU1193 | Tau | Heavy chain | IPN002 VH | U.S. Pat. No. 9,567,395 SEQ ID NO: 28 | 4140 |
| | | variable | variant 1 | | |
| | | region, | | | |
| | | humanized | | | |
| TAU1194 | Tau | Heavy chain | IPN002 VH | U.S. Pat. No. 9,567,395 SEQ ID NO: 29 | 4141 |
| | | variable | variant 2 | | |
| | | region, | | | |
| | | humanized | | | |
| TAU1195 | Tau | Heavy chain | IPN002 VH | U.S. Pat. No. 9,567,395 SEQ ID NO: 30 | 4142 |
| | | variable | variant 3 | | |
| | | region, | | | |
| | | humanized | | | |
| TAU1196 | Tau | Heavy chain | IPN002 VH | U.S. Pat. No. 9,567,395 SEQ ID NO: 31 | 4143 |
| | | variable | variant 4 | | |
| | | region, | | | |
| | | humanized | | | |
| TAU1197 | Tau (pS422) | Heavy chain | VH35H5 | US20160376352A1 SEQ ID NO: 65 | 4144 |
| | | variant 16 | | | |
| TAU1198 | Tau | Heavy chain | C2N-8E12 | WO2016201434A2 SEQ ID NO: 1 | 4145 |
| | | variant gVH1 | | | |
| TAU1199 | Tau | Heavy chain | C2N-8E12 | WO2016201434A2 SEQ ID NO: 2 | 4146 |
| | | variant gVH2 | | | |
| TAU1200 | Tau | Heavy chain | C2N-8E12 | WO2016201434A2 SEQ ID NO: 3 | 4147 |
| | | variant gVH3 | | | |
| TAU1201 | Tau | Heavy chain | C2N-8E12 | WO2016201434A2 SEQ ID NO: 4 | 4148 |
| | | variant gVH4 | | | |
| TAU1202 | Tau (421) | Heavy Chain | 5B3C11 | WO2017027685A2 SEQ ID NO: 32 | 4149 |
| | | VL2 Variable | | | |
| | | Domain | | | |
| TAU1203 | Tau | Heavy chain; | | WO2017005734A1 SEQ ID NO: 25 | 4150 |
| | | humanized | | | |
| TAU1204 | Tau | Heavy chain; | | WO2017005734A1 SEQ ID NO: 26 | 4151 |
| | | humanized | | | |
| TAU1205 | Tau | Heavy chain; | | WO2017005734A1 SEQ ID NO: 56 | 4152 |
| | | humanized | | | |
| TAU1206 | Tau | Heavy chain; | | WO2017005734A1 SEQ ID NO: 57 | 4153 |
| | | humanized | | | |
| TAU1207 | Tau | Heavy chain; | | WO2017005732A1 SEQ ID NO: 32 | 4154 |
| | | humanized | | | |
| TAU1208 | Tau | Heavy chain; | | WO2017005732A1 SEQ ID NO: 33 | 4155 |
| | | humanized | | | |
| TAU1209 | Tau | Heavy chain; | | WO2017005732A1 SEQ ID NO: 36 | 4156 |
| | | humanized | | | |
| TAU1210 | Tau | Heavy chain; | | WO2017005732A1 SEQ ID NO: 37 | 4157 |
| | | humanized | | | |
| TAU1211 | Tau | Heavy chain; | | WO2017005732A1 SEQ ID NO: 38 | 4158 |
| | | humanized | | | |
| TAU1212 | Tau | Heavy chain; | | WO2017005732A1 SEQ ID NO: 39 | 4159 |
| | | humanized | | | |
| TAU1213 | pTau | Light chain | AB1 | WO2017005732A1 SEQ ID NO: 7 | 4160 |
| | (pS198/pS199/ | | | | |
| | pS202/pT205) | | | | |
| TAU1214 | pTau | Light chain | AB1 | WO2017005732A1 SEQ ID NO: 9 | 4161 |
| | (pS198/pS199/ | | | | |
| | pS202/pT205) | | | | |
| TAU1215 | pTau | Light chain | AB1 | WO2017005732A1 SEQ ID NO: 11 | 4162 |
| | (pS198/pS199/ | | | | |
| | pS202/pT205) | | | | |
| TAU1216 | pTau | Light chain | AB1 | WO2017005732A1 SEQ ID NO: 12 | 4163 |
| | (pS198/pS199/ | | | | |
| | pS202/pT205) | | | | |
| TAU1217 | pTau | Light chain | AB1 | WO2017005732A1 SEQ ID NO: 13 | 4164 |
| | (pS198/pS199/ | | | | |
| | pS202/pT205) | | | | |
| TAU1218 | pTau | Light chain | AB1 | WO2017005732A1 SEQ ID NO: 17 | 4165 |
| | (pS198/pS199/ | | | | |
| | pS202/pT205) | | | | |
| TAU1219 | pTau | Light chain | AB1 | WO2017005732A1 SEQ ID NO: 18 | 4166 |
| | (pS198/pS199/ | | | | |
| | pS202/pT205) | | | | |
| TAU1220 | pTau | Light chain | AB1 | WO2017005732A1 SEQ ID NO: 19 | 4167 |
| | (pS198/pS199/ | | | | |
| | pS202/pT205) | | | | |
| TAU1221 | Tau | Light chain | AB1 | WO2017005732A1 SEQ ID NO: 26 | 4168 |
| TAU1222 | pTAU (pS396) | Light Chain | C10.2 | US20170015738A1 SEQ ID NO: 15 | 4169 |
| TAU1223 | Tau | light chain | C2N-8E12 | WO2016201434A2 SEQ ID NO: 9 | 4170 |
| TAU1224 | pTAU (pS396) | Light Chain | C5.2 | US20170015738A1 SEQ ID NO: 23 | 4171 |
| TAU1225 | pTAU (pS396) | Light Chain | C8.3 | US20170015738A1 SEQ ID NO: 31 | 4172 |
| TAU1226 | pTAU (pS396) | Light Chain | D1.2 | US20170015738A1 SEQ ID NO: 7 | 4173 |
| TAU1227 | pTAU (pS396) | Light Chain | D1.2* | US20170015738A1 SEQ ID NO: 34 | 4174 |
| TAU1228 | pTAU (pS396) | Light Chain | humanized C10.2 | US20170015738A1 SEQ ID NO: 36 | 4175 |
| TAU1229 | Tau | Light chain | mFab AB 1 | WO2017005734A1 SEQ ID NO: 19 | 4176 |
| TAU1230 | Tau | Light chain | mFab AB1 | WO2017005734A1 SEQ ID NO: 7 | 4177 |
| TAU1231 | Tau | Light chain | | WO2017005734A1 SEQ ID NO: 9 | 4178 |
| TAU1232 | Tau | Light chain | | WO2017005734A1 SEQ ID NO: 14 | 4179 |
| TAU1233 | Tau | Light chain | | WO2017005734A1 SEQ ID NO: 21 | 4180 |
| TAU1234 | Tau | Light chain | C2N-8E12 | WO2016201434A2 SEQ ID NO: 10 | 4181 |
| | | (VK1) | | | |
| TAU1235 | Tau | Light chain | C2N-8E12 | WO2016201434A2 SEQ ID NO: 11 | 4182 |
| | | (VK2) | | | |
| TAU1236 | Tau | Light chain | C2N-8E12 | WO2016201434A2 SEQ ID NO: 12 | 4183 |
| | | (VK3) | | | |
| TAU1237 | Tau | Light chain | C2N-8E12 | WO2016201434A2 SEQ ID NO: 13 | 4184 |
| | | (VK4) | | | |
| TAU1238 | Tau (421) | Light Chain | 1G10D2 | WO2017027685A2 SEQ ID NO: 8 | 4185 |
| | | Variable | | | |
| | | Domain | | | |
| TAU1239 | Tau (421) | Light Chain | 1G11A10 | WO2017027685A2 SEQ ID NO: 16 | 4186 |
| | | Variable | | | |
| | | Domain | | | |
| TAU1240 | Tau pS404 | Light chain | 4E6G7 | WO2017027691A1 SEQ ID NO: 9 | 4187 |
| | | variable | | | |
| | | domain | | | |
| TAU1241 | Tau (421) | Light Chain | 5G2A3 | WO2017027685A2 SEQ ID NO: 36 | 4188 |
| | | Variable | | | |
| | | Domain | | | |
| TAU1242 | Tau | Light chain | IPN001 VL | U.S. Pat. No. 9,567,395 SEQ ID NO: 17 | 4189 |
| | | variable | | | |
| | | region | | | |
| TAU1243 | Tau | Light chain | IPN002 VL | U.S. Pat. No. 9,567,395 SEQ ID NO: 19 | 4190 |
| | | variable | | | |
| | | region | | | |
| TAU1244 | Tau | Light chain | ACI-35-1D2- | U.S. Pat. No. 9,540,434 SEQ ID NO: 87 | 4191 |
| | | variable | Ab1 | | |
| | | region (VK) | | | |
| TAU1245 | Tau | Light chain | ACI-35-2A1- | U.S. Pat. No. 9,540,434 SEQ ID NO: 117 | 4192 |
| | | variable | Ab1 | | |
| | | region (VK) | | | |
| TAU1246 | Tau | Light chain | ACI-35-2A1- | U.S. Pat. No. 9,540,434 SEQ ID NO: 110 | 4193 |
| | | variable | Ab2 | | |
| | | region (VK) | | | |
| TAU1247 | Tau | Light chain | ACI-35-2G5- | U.S. Pat. No. 9,540,434 SEQ ID NO: 112 | 4194 |
| | | variable | AB1 | | |
| | | region (VK) | | | |
| TAU1248 | Tau | Light chain | ACI-35-2G5- | U.S. Pat. No. 9,540,434 SEQ ID NO: 114 | 4195 |
| | | variable | AB2 and ACI- | | |
| | | region (VK) | 35-2G5-AB3 | | |
| TAU1249 | Tau | Light chain | ACI-35-4A6- | U.S. Pat. No. 9,540,434 SEQ ID NO: 85 | 4196 |
| | | variable | Ab1 | | |
| | | region (VK) | | | |
| TAU1250 | Tau | Light chain | AC-35-4A6- | U.S. Pat. No. 9,540,434 SEQ ID NO: 119 | 4197 |
| | | variable | Ab2 | | |
| | | region (VK) | | | |
| TAU1251 | Tau | Light chain | IPN002 Vk | U.S. Pat. No. 9,567,395 SEQ ID NO: 32 | 4198 |
| | | variable | variant 1 | | |
| | | region, | | | |
| | | humanized | | | |
| TAU1252 | Tau | Light chain | IPN002 Vk | U.S. Pat. No. 9,567,395 SEQ ID NO: 33 | 4199 |
| | | variable | variant 2 | | |
| | | region, | | | |
| | | humanized | | | |
| TAU1253 | Tau | Light chain | IPN002 Vk | U.S. Pat. No. 9,567,395 SEQ ID NO: 34 | 4200 |
| | | variable | variant 3 | | |
| | | region, | | | |
| | | humanized | | | |
| TAU1254 | Tau | Light chain | IPN002 Vk | U.S. Pat. No. 9,567,395 SEQ ID NO: 35 | 4201 |
| | | variable | variant 4 | | |
| | | region, | | | |
| | | humanized | | | |
| TAU1255 | Tau (pS422) | Light chain | VL31A1 | US20160376352A1 SEQ ID NO: 66 | 4202 |
| | | variant 18 | | | |
| TAU1256 | Tau (pS422) | Light chain | VL49G1 | US20160376352A1 SEQ ID NO: 67 | 4203 |
| | | variant 19 | | | |
| TAU1257 | Tau (pS422) | Light chain | VL35F2 | US20160376352A1 SEQ ID NO: 68 | 4204 |
| | | variant 20 | | | |
| TAU1258 | Tau (pS422) | Light chain | VL53A2 | US20160376352A1 SEQ ID NO: 69 | 4205 |
| | | variant 21 | | | |
| TAU1259 | Tau (pS422) | Light chain | VL35G4 | US20160376352A1 SEQ ID NO: 78 | 4206 |
| | | variant 22 | | | |
| TAU1260 | Tau (pS422) | Light chain | VL4G1 | US20160376352A1 SEQ ID NO: 86 | 4207 |
| | | variant 24 | | | |
| TAU1261 | Tau | Light chain | C2N-8E12 | WO2016201434A2 SEQ ID NO: 5 | 4208 |
| | | variant gVL1 | | | |
| TAU1262 | Tau | Light chain | C2N-8E12 | WO2016201434A2 SEQ ID NO: 6 | 4209 |
| | | variant gVL2 | | | |
| TAU1263 | Tau | Light chain | C2N-8E12 | WO2016201434A2 SEQ ID NO: 7 | 4210 |
| | | variant gVL3 | | | |
| TAU1264 | Tau | Light chain | C2N-8E12 | WO2016201434A2 SEQ ID NO: 8 | 4211 |
| | | variant gVL4 | | | |
| TAU1265 | Tau (421) | Light chain | 5B3C11 | WO2017027685A2 SEQ ID NO: 24 | 4212 |
| | | VL1 variable | | | |
| | | domain | | | |
| TAU1266 | Tau (421) | Light chain | 5B3C11 | WO2017027685A2 SEQ ID NO: 28 | 4213 |
| | | VL2 variable | | | |
| | | domain | | | |
| TAU1267 | Tau | Light chain; | | WO2017005734A1 SEQ ID NO: 24 | 4214 |
| | | humanized | | | |
| TAU1268 | Tau | Light chain; | | WO2017005732A1 SEQ ID NO: 30 | 4215 |
| | | humanized | | | |
| TAU1269 | Tau | Light chain; | | WO2017005732A1 SEQ ID NO: 31 | 4216 |
| | | humanized | | | |
| TAU1270 | Tau | Light chain; | | WO2017005732A1 SEQ ID NO: 34 | 4217 |
| | | humanized | | | |
| TAU1271 | Tau | Light chain; | | WO2017005732A1 SEQ ID NO: 35 | 421.8 |
| | | humanized | | | |
| TAU1272 | Tau (421) | scFv | 1G10D2 | WO2017027685A2 SEQ ID NO: 47 | 4219 |
| TAU1273 | Tau (421) | scFv | 1G10D2 | WO2017027685A2 SEQ ID NO: 48 | 4220 |
| TAU1274 | Tau (421) | scFv | 1G10D2 | WO2017027685A2 SEQ ID NO: 49 | 4221 |
| TAU1275 | Tau (421) | scFv | 1G10D2 | WO2017027685A2 SEQ ID NO: 50 | 4222 |
| TAU1276 | Tau (421) | scFv | 1G10D2 | WO2017027685A2 SEQ ID NO: 51 | 4223 |
| TAU1277 | Tau (421) | scFv | 1G10D2 | WO2017027685A2 SEQ ID NO: 52 | 4224 |
| TAU1278 | Tau (421) | scFv | 1G10D2 | WO2017027685A2 SEQ ID NO: 53 | 4225 |
| TAU1279 | Tau (421) | scFv | 1G10D2 | WO2017027685A2 SEQ ID NO: 54 | 4226 |
| TAU1280 | Tau (421) | scFv | 1G10D2 | WO2017027685A2 SEQ ID NO: 55 | 4227 |
| TAU1281 | Tau (421) | scFv | 1G10D2 | WO2017027685A2 SEQ ID NO: 56 | 4228 |
| TAU1282 | Tau (421) | scFv | 1G11A10 | WO2017027685A2 SEQ ID NO: 57 | 4229 |
| TAU1283 | Tau (421) | scFv | 1G11A10 | WO2017027685A2 SEQ ID NO: 58 | 4230 |
| TAU1284 | Tau (421) | scFv | 1G11A10 | WO2017027685A2 SEQ ID NO: 59 | 4231 |
| TAU1285 | Tau (421) | scFv | 1G11A10 | WO2017027685A2 SEQ ID NO: 60 | 4232 |
| TAU1286 | Tau (421) | scFv | 1G11A10 | WO2017027685A2 SEQ ID NO: 61 | 4233 |
| TAU1287 | Tau (421) | scFv | 1G11A10 | WO2017027685A2 SEQ ID NO: 62 | 4234 |
| TAU1288 | Tau (421) | scFv | 1G11A10 | WO2017027685A2 SEQ ID NO: 63 | 4235 |
| TAU1289 | Tau (421) | scFv | 1G11A10 | WO2017027685A2 SEQ ID NO: 64 | 4236 |
| TAU1290 | Tau (421) | scFv | 1G11A10 | WO2017027685A2 SEQ ID NO: 65 | 4237 |
| TAU1291 | Tau (421) | scFv | 1G11A10 | WO2017027685A2 SEQ ID NO: 66 | 4238 |
| TAU1292 | Tau pS404 | scFv | 4E607 | WO2017027691A1 SEQ ID NO: 17 | 4239 |
| TAU1293 | Tau (421) | scFv | 5B3C11 (VL1) | WO2017027685A2 SEQ ID NO: 67 | 4240 |
| TAU1294 | Tau (421) | scFv | 5B3C11 (VL1) | WO2017027685A2 SEQ ID NO: 68 | 4241 |
| TAU1295 | Tau (421) | scFv | 5B3C11 (VL1) | WO2017027685A2 SEQ ID NO: 69 | 4242 |
| TAU1296 | Tau (421) | scFv | 5B3C11 (VL1) | WO2017027685A2 SEQ ID NO: 70 | 4243 |
| TAU1297 | Tau (421) | scFv | 5B3C11 (VL1) | WO2017027685A2 SEQ ID NO: 71 | 4244 |
| TAU1298 | Tau (421) | scFv | 5B3C11 (VL1) | WO2017027685A2 SEQ ID NO: 72 | 4245 |
| TAU1299 | Tau (421) | scFv | 5B3C11 (VL1) | WO2017027685A2 SEQ ID NO: 73 | 4246 |
| TAU1300 | Tau (421) | scFv | 5B3C11 (VL1) | WO2017027685A2 SEQ ID NO: 74 | 4247 |
| TAU1301 | Tau (421) | scFv | 5B3C11 (VL1) | WO2017027685A2 SEQ ID NO: 75 | 4248 |
| TAU1302 | Tau (421) | scFv | 5B3C11 (VL1) | WO2017027685A2 SEQ ID NO: 76 | 4249 |
| TAU1303 | Tau (421) | scFv | 5B3C11 (VL2) | WO2017027685A2 SEQ ID NO: 77 | 4250 |
| TAU1304 | Tau (421) | scFv | 5B3C11 (VL2) | WO2017027685A2 SEQ ID NO: 78 | 4251 |
| TAU1305 | Tau (421) | scFv | 5B3C11 (VL2) | WO2017027685A2 SEQ ID NO: 79 | 4252 |
| TAU1306 | Tau (421) | scFv | 5B3C11 (VL2) | WO2017027685A2 SEQ ID NO: 80 | 4253 |
| TAU1307 | Tau (421) | scFv | 5B3C11 (VL2) | WO2017027685A2 SEQ ID NO: 81 | 4254 |
| TAU1308 | Tau (421) | scFv | 5B3C11 (VL2) | WO2017027685A2 SEQ ID NO: 82 | 4255 |
| TAU1309 | Tau (421) | scFv | 5B3C11 (VL2) | WO2017027685A2 SEQ ID NO: 83 | 4256 |
| TAU1310 | Tau (421) | scFv | 5B3C11 (VL2) | WO2017027685A2 SEQ ID NO: 84 | 4257 |
| TAU1311 | Tau (421) | scFv | 5B3C11 (VL2) | WO2017027685A2 SEQ ID NO: 85 | 4258 |
| TAU1312 | Tau (421) | scFv | 5B3C11 (VL2) | WO2017027685A2 SEQ ID NO: 86 | 4259 |
| TAU1313 | Tau (421) | scFv | 5G2A3 | WO2017027685A2 SEQ ID NO: 87 | 4260 |
| TAU1314 | Tau (421) | scFv | 5G2A3 | WO2017027685A2 SEQ ID NO: 88 | 4261 |
| TAU1315 | Tau (421) | scFv | 5G2A3 | WO2017027685A2 SEQ ID NO: 89 | 4262 |
| TAU1316 | Tau (421) | scFv | 5G2A3 | WO2017027685A2 SEQ ID NO: 90 | 4263 |
| TAU1317 | Tau (421) | scFv | 5G2A3 | WO2017027685A2 SEQ ID NO: 91 | 4264 |
| TAU1318 | Tau (421) | scFv | 5G2A3 | WO2017027685A2 SEQ ID NO: 92 | 4265 |
| TAU1319 | Tau (421) | scFv | 5G2A3 | WO2017027685A2 SEQ ID NO: 93 | 4266 |
| TAU1320 | Tau (421) | scFv | 5G2A3 | WO2017027685A2 SEQ ID NO: 94 | 4267 |
| TAU1321 | Tau (421) | scFv | 5G2A3 | WO2017027685A2 SEQ ID NO: 95 | 4268 |
| TAU1322 | Tau (421) | scFv | 5G2A3 | WO2017027685A2 SEQ ID NO: 96 | 4269 |

[0289] In one embodiment, the payload region of the AAV particle comprises a nucleic acid sequence encoding a polypeptide which is an antibody, an antibody-based composition, or a fragment thereof. As a non-limiting example, the antibody may be one or more of the polypeptides listed in Table 3. As another non-limiting example, the antibody may be one or more of the heavy chain sequences listed in Table 3. As a non-limiting example, the antibody may be one or more of the light chain sequences listed in Table 3.

[0290] In one embodiment, the payload region of the AAV particle comprises a nucleic acid sequence encoding a polypeptide comprising a heavy chain and a light chain sequence listed in Table 3. The payload region may also comprise a linker between the heavy and light chain sequences. The linker may be a sequence known in the art or described in Table 2.

[0291] In one embodiment, the payload region of the AAV particle comprises a nucleic acid sequence encoding a polypeptide comprising a heavy chain and a light chain sequence listed in Table 3, where the heavy chain sequence is from a different antibody than the light chain sequence. The payload region may also comprise a linker between the heavy and light chain sequences. The linker may be a sequence known in the art or described in Table 2.

[0292] In one embodiment, the payload region comprises, in the 5′ to 3′ direction, an antibody light chain sequence, a linker and a heavy chain sequence.

[0293] In one embodiment, the payload region comprises a nucleic acid sequence encoding, in the 5′ to 3′ direction, an antibody light chain sequence from Table 3, a linker from Table 2 and a heavy chain sequence from Table 3. Non-limiting examples are included in Table 4.

[0294] In one embodiment, the payload region comprises, in the 5′ to 3′ direction, an antibody heavy chain sequence, a linker and a light chain sequence.

[0295] In one embodiment the payload region comprises a nucleic acid sequence encoding, in the 5′ to 3′ direction, an antibody heavy chain sequence from Table 3, a linker from Table 2, and a. light chain sequence from Table 3. Non-limiting examples are included in Table 4.

[0296] In one embodiment, the payload region comprises a nucleic acid sequence encoding a single heavy chain. As a non-limiting example, the heavy chain is an amino acid sequence or fragment thereof described in Table 3.

[0297] Shown in Table 3 are a listing of antibodies and their polynucleotides and/or polypeptides sequences. These sequences may be encoded by or included in the AAV particles of the present invention. Variants or fragments of the antibody sequences described in Table 3 may be utilized in the AAV particles of the present invention,

[0298] In some embodiments, the AAV particles may comprise eodon-optimized versions of the nucleic acids encoding the polypeptides listed in Table 3. In some cases, the payload region of the AAV particles of the invention may encode one or more isoforms or variants of these heavy and light chain antibody domains. Such variants may be humanized or optimized antibody domains composing one or more complementarity determining regions (CDRs) from the heavy and light chains listed in Table 3, CDRs of the antibodies encoded by the viral genomes of the present invention may be 50%, 60%, 70%, 80%, 90%, 95% identical to CDRs listed in or incorporated in the sequences of Table 3. Methods of determining CDRs are well known in the art and are described herein. Payioad regions may encode antibody variants with one or more heavy chain variable domain (V_{H}) or light chain variable domain (V_{L}) derived from the antibody sequences in Table 3. In some cases, such variants may include bispecific antibodies. Bispecific antibodies encoded by payload regions of the invention may comprise variable domain pairs from two different antibodies.

[0299] In one embodiment, the AAV particles may comprise a heavy and a light chain of an antibody described herein and two promoters. As a non-limiting example, the AAV particles may comprise a nucleic acid sequence of a genome as described in FIG. 1 or FIG. 2 of US Patent Publication No. US20030219733, the contents of which are herein incorporated by reference in its entirety. As another non-limiting example, the AAV particles may be a dual-promoter AAV for antibody expression as described by Lewis et al. (J. of. Virology, Sept 2002, Vol. 76(17), p8769-8775; the contents of which are herein incorporated by reference in its entirety).

[0300] Payioad regions of the viral genomes of the invention may encode any anti-tau antibodies, or tau-associated antibodies, not limited to those described in Table 3, including antibodies that are known in the art and/or antibodies that are commercially available. This may include fragments of such antibodies or antibodies that have been developed to comprise one or more of such fragments [e.g., variable domains or complementarity determining regions (CDRs)]. Anti-tau antibodies that may be encoded by payloads of the invention include, but are not limited to, AT8 (pSer²⁰²/pThr²⁰²; ThermoFisher. Waltham, Mass.; described in International Publication No. WO1995017429, the contents of which are herein incorporated in their entirety). AT100 (pSef²¹²/pSer²¹⁴; ThermoFisher, Waltham, Mass.; described in U.S. Pat. No. 6,121,003, the contents of which are herein incorporated in their entirety), AT180 (pTh²³¹, ThermoFisher, Waltham, Mass.; described in International Publication No. WO1995017429, the contents of which are herein incorporated by reference in their entirety ), MC-1 (Tau^{2-18/312-342} conformational antibody; as described in International Publication WO 199620218, the contents of which are herein incorporated by reference in their entirety ), MC-6 (pSer²³⁵; described in U.S. Pat. No. 5,811,310, the contents of which are herein incorporated in their entirety), TG-3 (pThr²³¹; described in Jicha, G A et al., 1997 J Neurochem 69(5):2087-95, the contents of which are herein incorporated by reference in their entirety), CP13 (pSer²⁰²), CP27 (human Tan¹³⁰⁻¹⁵⁰), Tau12 (human Tan⁹⁻¹⁸: Abeam, Cambridge, Mass.), TG5 (Tau²²⁰-242; described in U.S. Pat. No. 5,811,310), DA9 (Tau¹⁰²⁻¹⁴⁰; described in U.S. Pat. No. 5,811,310), PHF-1 (pSer³⁹⁶/pSer⁴⁰⁴; described in International Publication WO199620218), Alz50 (Tau⁷⁻⁹ and Tau³¹²⁻³⁴² conformational epitope; described in U.S. Pat. No. 5,811,310 and Carmel, G et al 1996 J Biol Chem 271(51):32780-32795 and Jicha, GaA et al, 1997 J Neurosci Res 48(2): 128-132, the contents of each of which are herein incorporated by reference in their entirety), Tau-1 (de-phosphorylated Ser¹⁹⁵/Ser¹⁹⁸/Ser¹⁹⁹/Ser²⁰²; ThermoFisher, Waltham, Mass.), Tau46 (Tau⁴⁰⁴⁻⁴⁴¹; Abcam, Cambridge, Mass.), pSI99 (ThermoFisher, Waltham, Mass.), pT205, pS396 (ThermoFisher, Waltham, Mass.; described in U.S. Pat. No. 8,647,631, the contents of which are herein incorporated by reference in their entirety ), pS404(ThermoFisher, Waltham, Mass.; described in U.S. Pat. No. 8,647,631, the contents of which are herein incorporated by reference in their entirety), pS422 (ThermoFisher, Waltham, Mass.), A0024 (hTau²⁴³⁻⁴⁴¹; Dako, Glostrup, Denmark), HT7 (hTau¹⁵⁹⁻³⁶³; ThermoFisher, Waltham, Mass.), Tau2 (hTau⁵²⁻⁶⁸; Abeam, Cambridge, Mass.), AD2 (pSer³⁹⁶/pSer⁴⁰⁴; Bio-Rad Laboratories, Hercules, Calif.), ATI 20 (hTau²¹⁶⁻²²⁴; described in U.S. Pat. No. 5,843,779, the contents of which are herein incorporated by reference in their entirety), AT270 (pThr¹⁸¹; ThermoFisher, Waltham, Mass.), 12E8 (pSer²⁶² and/or Ser³⁵⁶), K.9JA (hTau²⁴³⁻⁴⁴³; Dako, Caprinteria, Calif.), TauC3 (hTau Asp441; Santa Cruz Biotechnology, Dallas, Tex.; described in U.S. Patent Publication US20120244174 and Gamblin, T C et al 2003 PNAS 100(17): 10032-7, the contents of each of which are herein incorporated by reference in their entirety), 4E6G7 (pSer³⁹⁶/pSer⁴⁰⁴; described in U.S. Patent Publication No. US2010316564 and Congdon, E. E. et al., 2016. Molecular Neurodegeneration Aug 30;11(1) :62, the contents of which are herein incorporated by reference in their entirety), 6B2 and variants thereof described in International Patent Publication WO2016007414, the contents of which are herein incorporated by reference in their entire RZ3 (pThr²³¹), PG5 (pSer⁴⁰⁹), BT2 (pS^{199/202}), DAS 31 (Tau¹⁵⁰⁻¹⁹⁰), CP9 (pThr²³¹) Ta1505 (phospho site between Tau⁴¹⁰⁻⁴²¹, particularly pSer⁴¹³ as described in U.S. Patent Publication US20150183854 and Umeda, T. et al., 2015. Ann Clin Trans Neurol 2(3): 241-255, the contents of each of which are herein incorporated by reference in their entirety), PHF-6 (pThr²³¹, as described in Hoffman R et al., 1997, Biochemistry 36:8114-8124, the contents of which are herein incorporated by reference in their entirety), PHF-13 (pSer³⁹⁶, as described in Hoffman R et al., 1997. Biochemisty 36:8114-8124), 16B5 (Tau²⁵⁻⁴⁶, as described in United States Publication US20160031976, the contents of which are herein incorporated by reference in their entirety), DC8E8 (as described in United States Patent Publication US20150050215, the contents of which are herein incorporated by reference in their entirety), PT1 or PT3 (as described in U.S. Pat. No. 9,371,376, the contents of which are herein incorporated by reference in their entirety), 4G11 (Tau⁵⁷⁻⁶⁴, as described in International Publication WO2016137950, the contents of which are herein incorporated by reference in their entirety), 1A6 (Tau⁷⁻¹⁷ and Tau²¹⁵⁻²²⁰, as described in International Publication WO2016137950), Tau15 or Tau81 (as described in International Publication WO2016055941, the contents of which, are herein incorporated, by reference in their entirely), TOC-1 (dimerized or aggregated tau, as described in International Publication WO2012149365, the contents of which are herein incorporated by reference in their entirety), pS4041gG2a/k (Neotope Biosciences, South San Francisco, Calif.; as described in Ittner et al., 201.5. Neurochemistry 132:135-145, the contents of which are herein incorporated by reference in their entirety), TOMA (tau oligomer monoclonal antibody; as described in U.S. Pat. Nos. 8,778,343 and 9,125,846, International Publications WO2012051498 and WO2011026031, or United States Publication Nos. US20150004169 and US20150322143, and Castfflo-Cananza, DL et al, 2014 J Neurosci 34(12)4260-72, the contents of each of which are herein incorporated by reference in their entirety), TT099 (oligomeric tau), BMS-986168 (as described in U.S. Patent Publication US2014294831, International Publication WO2015081085 and U.S. Pat. 898027 L the contents of which are herein incorporated by reference in their entirety), 3H3 (pan-amyloid epitope; described in Levites, Y et al 2015 J Neurosci 35(16)6265-76, the contents of which are herein incorporated by reference in their entirety), cis-pT231(described in International Publications WO2012149334 and WO2011056561, the contents of which are herein incorporated by reference in their entirety), CP-3 (pSer²¹⁴; described in Jicha et al 1999 J Neurosci 19(17):7486-94, the contents of which are herein incorporated by reference in their entirety), TNT1 (Tau²⁻¹⁸, as described in United States Patent Publication 20160031978, the contents of which are herein incorporated by reference in their entirety ), Tau-nY29 (nTyr²⁹; described in Reynolds M R, et al., 2006 J Neurosci 26(42):10636-45, the contents of which are herein incorporated by reference in their entirety), Tau-nY197 (nTyr197; described in Reyes, J F et al., 2012 Acta Neuropath ol 123(1):119-32, the contents of which are herein incorporated by reference in their entirety), Tau-nY394 (nTyr³⁹⁴; described in Reyes, J F et al 2012), 4E4 (Tau³³⁷⁻³⁴³ Tau³⁸⁷⁻³⁹⁷; described in International Publication WO2012049570 and United States Patent Publication US20150252102, the contents of each of which are herein incorporated by reference in their entirety), ADx210 (described in United States Patent Publication US20140161875, the contents of which are herein incorporated by reference in their entirety), ADx215 (described in U.S. Patent Publication US20140161875), ADx202 (as described in International Publication WO2015004163, the contents of which are herein incorporated by reference in their entirety), AP422 (pSer⁴²²: described in Hasegawa, M et al 1996 FEBS Lett 384:25-30, the contents of which are herein incorporated by reference in their entirety), Tau5 (Tau²¹⁰⁻²⁴¹), RTA2(Tau²⁷⁵⁻²⁸³), RTAC (Tan⁴²⁶⁻⁴⁴¹), RTA1 (Tau²⁵⁷⁻²⁷⁴), T46 (Tau³⁹⁵⁻⁴³²), T49, MIGT4, O.BG.15, 525. 3-39, 4FL MapTau (Tau⁹⁵⁻¹⁰⁸; SMI Covance), T1, HYB33801 (Tau⁵⁻⁵²), Tau13 (Tau²⁻¹⁸), B11E8, 5J20 (14-3-3 tau), DC25 (Tau³⁴⁷⁻³⁵³), DC39N1 (Tai⁴⁵⁻⁷³), DC-11 (Tau³²¹⁻³⁹¹; described in U.S. Pat. No. 7,746,180, the contents of which are herein incorporated by reference in their entirety), DC39 (Tau⁴⁰¹⁻⁴¹¹), DC4R, n847 (nitrated tau), SPM452, T14, 1E1/A6 (Tau²⁷⁵⁻²⁹¹), 5E2, 8E6/C11 (Tau²⁰⁹⁻²²⁴), 2E12 (pT231), NFT200, 248E5 (Tau³⁻²¹⁴), IG2 (Thr¹⁷⁵, Thr¹⁸¹, Thr²³³; as described in International Publication WO2016041553, the contents of which are herein incorporated by reference in their entirety), YP3 (as described in WO2007019273, the contents of which are herein incorporated by reference in their entirety), YP4 (as described in WO2007019273) and 14-3-3 Tau (pSer 14-3-3 binding motif: Abeam, Cambridge, Mass.). Further, anti-tau antibodies may be any of those listed in the antibody section of Alzforum.org or at the Antibody Resource Page.com, the contents of each of which are herein incorporated by reference in their entirety. Further, anti-tau antibodies may be any commercially available anti-tau antibody. Additional antibodies may include any of those taught in Petty, F. R. et al., 2014. PLoS One 9(5): e94251, the contents of which are herein incorporated by reference in their entirety. In one example, such antibodies may include any of those described in Jicha, G. A. et al., 1997. Journal ofNeuroscience Research 48:128-132, the contents of which are herein incorporated by reference in their entirety. One such antibody, MC-1, recognizes distinct conformations of tau that are associated with neurological disease,

[0301] In some embodiments, payloads may encode anti-tau antibodies (or fragments thereof) taught in United States Publication No. US2014294831, the contents of which are herein incorporated by reference in their entirety. Such antibodies may include IPN001 and/or IPN002antibodies or fragments of such antibodies. In some cases, variable domains of IPN002 as presented in FIGS. 2A and 2B of US2014294831 may be used (e.g., incorporated into another antibody). In some cases, CDR regions of IPN002 as underlined in FIGS. 2A and 2B may be used (e.g., incorporated into another antibody or used to prepare humanized versions of IPN002), In some cases, anti-tau antibodies may include any of the IPN001or IPN002 antibody variants taught in US2014294831 (e.g., in FIGS. 9-16 of that publication). In one embodiment, this antibody is also referred to as RMS-986168.

[0302] In some cases, payloads may encode anti-tau antibodies (or fragments thereof) taught in Otvos, L. et al., 1994. J Neurosci. Res 39(6:669-73, the contents of which are herein incorporated by reference in their entirety. Such antibodies may include monoclonal antibody PHF-1 or fragments thereof. The PHF-1 antibody binds to tau paired helical filaments, a pa thological conformation of tau, found in certain neurological disorders, including Alzheimer's disease. Further, antibody affinity is increased when either serine 396 or serine 404 of tau is phosphorylated and even further increased when both are phosphorylated.

[0303] In some embodiments, payloads may encode anti-tau antibodies (or fragments thereof) taught in U.S. Pat. No. 5,811,310, the contents of which are herein incorporated by reference in their entirety. Such embodiments may include monoclonal antibodies PHF-1 or MC-1 or fragments thereof. MC-1 is a conformational antibody binding to the epitopes presented in Jicha, G. A., et al., 1997. J Neurosci Res 48(128-132).

[0304] In some embodiments, payloads may encode anti-tau antibodies (or fragments thereof) taught in International Publication Number WO2015035190, the contents of which are herein incorporated by reference in their entirety. Such embodiments may include, but are not limited to, antibodies PHF-1 or MC-1 or fragments thereof. Viral genomes of the AAV particles of the present invention may comprise or encode any of SEQ ID NO: 1-6 of WO2015035190.

[0305] Anti-tau antibodies (or fragments thereof) encoded by viral genomes of the invention may include antibodies that bind to one or more of the epitopes presented in Otvos, L. et al., 1994, J Neurosci. Res 39(6:669-73 (e.g., any of those presented in Table 1 of that publication).

[0306] In some embodiments, payloads may encode anti-tau antibodies (or fragments thereof) taught in U.S. Pat. No. 7,746,180, the contents of which are herein incorporated by reference in their entirety. Such embodiments may include antibody DC-1.1 or fragments thereof.

[0307] In some embodiments, the antibodies encoded by the viral genomes of the present invention may target any of the antigenic regions or epitopes described in United States Patent Publication No US2008050383 or US20100316564, the contents of which are herein incorporated by reference in their entirety. In one embodiment, the antibody targets pS396/pS404. Such embodiments may include antibody 4E6 and/or variants or fragments thereof. The affinity of antibody 4E6 for soluble PFIF and its ability to reduce soluble phospho tau has been described in Congdon, E. E. et al., 2016. Molecular Neurodegeneration Aug 30;11(1):62, the contents of which are herein incorporated by reference in their entirety.

[0308] In some embodiments, the antibodies encoded by the viral genomes of the present invention may target any of the antigenic regions or epitopes described in International Patent Publication WO1998022120, the contents of which are herein incorporated by reference in their entirety. In one embodiment, the antibody may be PHF-6 (pT231), or fragments or variants thereof. In another embodiment, the antibody may be PHF-13 (pS396). or a fragment of variant thereof. These antibodies are further described in Hoffman et al., 1997. Biochemistry 36: 8114-8124, the contents of which are herein incorporated by reference in their entirety.

[0309] In some embodiments, the antibodies encoded by the viral genomes of the present invention may target any of the antigenic regions or epitopes described in International Publication WO2016126993, the contents of which are herein incorporated by reference in their entirely. The antibodies may be derived from any of the tau epitopes described, in Table A of WO2016126993. In one embodiment, the antibody of the present invention may comprise any of the sequences listed in Table B or Table 1 of WO2016126993.

[0310] In some embodiments, the antibodies encoded by the viral genomes of the present invention may target any of the antigenic regions or epitopes described in United States Patent Publication US20120244174, the contents of which are herein incorporated by reference in their entirety. In one embodiment, the antibody may bind to caspase-cleaved tau. In one embodiment, the epitope for antibodies targeting caspa.se cleaved tau is aspartic acid 421. In another embodiment, the epitope for antibodies targeting caspase cleaved tau may be the C-terminus after glutamic residue Glu391. In yet another embodiment, the epitope for antibodies targeting caspase cleaved tau may be at the N-terrminus at aspartic acid residue 13. In another embodiment, the antibody may be TauC3.

[0311] In some embodiments, the antibodies encoded by the viral genomes of the present invention may target any of the antigenic regions or epitopes described in U.S. Patent Publication US20160031978, the contents of which are herein incorporated by reference in their entirely. In one embodiment, the antibody may bind to tau N˜terminal residues associated with the PP1/GSK3 signaling cascade. In one embodiment, the antibody may be TNT1.

[0312] In some embodiments, the antibodies encoded by the viral genomes of the present invention may be any of those described in d'Abrarao, C et al., 2015. PLOS One 10(8):e0135774, the contents of which are herein incorporated by reference in their entirety. In one embodiment, the antibody may be CP13 (pS202), or a fragment or variant thereof. In another embodiment, the antibody may be RZ3 (pT231), or a fragment or variant thereof. In another embodiment, the antibody may be PG5 (pS409), or a fragment or variant thereof.

[0313] Anti-tau antibodies or fragments thereof encoded by the viral genomes of the present invention may target tau in any antigenic form. As non-limiting examples, antigenic tau may be an unphosphorylated or unmodified, tau protein, a phosphorylated or otherwise post-translationally modified tau protein (O-GlnAcylated, or nitrosylated), an oligomeric species of tau protein, a soluble species of tau protein, an insoluble species of tau protein, a conformationally abnormal species of tau protein, a neuropathological form of tau protein and/or a neurofibrillary tangle or a precursor thereof.

[0314] Anti-tau antibodies or fragments thereof encoded by the viral genomes of the invention, may target any antigenic region or epitope along the full length of any of the six human tau protein isoforms. As non-limiting examples, the targeted antigenic peptides of the tau protein may be any of the following phosphorylated sites pT50, pS396, pS396˜pS404, pS404, pS396-pS404-pS422, pS409, pS413, pS422, pS198, pS199, pS199-pS202, pS202, pT205, pT212, pS214, pT212-pS214, pT181, pT231, cis-pT231, pS235, pS238, pT245, pS262, pY310, pY394, pS324, pS356, pTau¹⁷⁷⁻¹⁸⁷, pY18, pS610, pS622. nitrosvlated tau (nY18, nY29), methylated tau (di-meK28L dimeK311), O-GlnAcylated tau at S400, any of the following acetylated sites acK174, acK274, acK280, acK281 and/or any combination thereof. Acetylated tau proteins and associated antigenic peptides are described in Min et al, 2010, Neuron., 67, 953-966, Min et al., 2015, Nature Medicine., 10, 1154-1162, Cohen et al., 2011, Nature Communications., 2, 252, Gorsky et al, 2016, Scientific Report., 6, 22685, Tracy et al., 2016, Neuron., 90, 245-260, the contents of each of which are herein incorporated by reference in their entirety. Phosphorylated tau proteins and associated antigenic peptides are described in Asuni et al., 2007, J Neuroscl. 27, 9115-9129, Boutajangout et al., 2010, J Neuroses., 30, 16559-16566, Boutajangout et al., 2011, J Neurochem, 118, 658-667, Chai et al., 2011, J Biol Chem, 286, 34457-34467, Gu et al., 2011, J Biol Chem, 288, 33081-33095, Sankaranarayanan et al., 2015, PloS One, 10, e0125614, Ittner et al., 2015, J Neurochem., 132, 135-145, D'Abramo et al., 2016, Neurobiol Aging., 37, 58-65, Collin et al., 2014, Brain., 137, 2834-2846, Kondo et al., 2015, Nature., 523, 431-436, the contents of each of which are herein incorporated by reference in their entirety.

[0315] In one embodiment, the antibody encoded by the viral genomes of the present invention may be a pS409 targeting antibody as described in Lee et al., 2016, Cell Reports, 16, 1690-1700, or International Patent Publication WO2013151762, the contents of each of which are herein incorporated by reference in their entirety. In some embodiments, this antibody may be RG6100 or R071057 or variants or fragments thereof.

[0316] In one embodiment, the antibody encoded by the viral genomes of the present invention may be a pS413 targeting antibody as described in Umeda et al, 2015, Ann Clin Trans Neurol., 2(3), 241-255 or International Patent Publication WO2013180238, the contents of each of which are herein incorporated by reference in their entirety. In one embodiment, the antibody is Ta1505 or variants or fragments thereof.

[0317] In one embodiment, the antibody encoded by the viral genomes of the present invention may target a tau epitope with amino acid residues 210-275, more specifically pS238 and/or pT245, as described in International Publication WO2011053565, the contents of which are herein incorporated by reference in their entirety.

[0318] In one embodiment, the CDRs of an antibody encoded by the viral genomes of the present invention may be any of those listed in or incorporated in the antibody sequences of Table 3. In one embodiment, the CDRs may be any of those described in International Publication WO2015122922, the contents of which are herein incorporated by reference in their entirety. In one embodiment, a CDR may be any of those chosen from the group of SEQ ID NO: 41, 49, or 57 of WO2015122922. Further a CDR of an antibody encoded by the viral genomes of the present invention may have 50%, 60%, 70%, 80%, 90%, or 95% identity to SEQ ID NO: 41, 49, or 57 of WO2015122922.

[0319] In one embodiment, the antibodies encoded by the viral genomes of the present invention may be any of those described in international Publication WO2016097315, the contents of which are herein incorporated by reference in their entirety. In one embodiment, the antibody may have an amino acid sequence as shown by SEQ ID NO: 2, 11, 20, 29, 38, 47, 56, 65, 74, 83, 92, 101, 110, 119, 128, 137, 146, 155, 164, 173, 182, 191, 209, 218, 226, or 227 of WO2016097315.

[0320] In one embodiment, the antibodies encoded by the viral genomes of the present invention may be a muitispecific blood brain barrier receptor antibody that also targets tau, as described, in International Publication WO2016094566, the contents of which are herein incorporated by reference in their entirety. In one embodiment, the antibody may have a sequence as shown by SEQ ID NO: 1, 2, 17, 18, 33, 34, 49, 50, 65, 66, 81, 82, 9-16, 25-32, 41-48, 57-64, 73-80, 89-96 of WO2016094566.

[0321] In some embodiments, the antibodies (or fragments thereof) encoded by the viral genomes of the present invention may be any of those taught in U.S. Pat. No. 8,778,343 and U.S. Pat. No. 9,125,846, International Publications WG2012051498 and WO2011026031, or United States Publication Nos. US20150004169 and US20150322143, the contents of each of which are herein incorporated by reference in their entirety. Such antibodies may include those that bind to oligoraeric species of tau. Further, such an antibody may be referred to as TOMA (tau oligomer monoclonal antibody), as described in Castillo-Carranza et at (Castillo-Carranza, DL et al., 2014 J Neurosci 34(12)4260-72) the contents of which are herein incorporated by reference in their entirety. In one embodiment, the antibody that binds oligomeric tau may be TTC-99.

[0322] In some embodiments, the antibodies (or fragments thereof) encoded by the viral genomes of the present invention may be any of those taught in International Publications WO2014059442, the contents of which are herein incorporated by reference in their entirety. Such antibodies may include those that bind to oligomeric species of tau.

[0323] In some embodiments, the antibodies (or fragments thereof) encoded by the viral genomes of the present invention may be any of those taught in the International Publications WO2014008404 and WO2016126993, United States Patent Publication US20150183855, Yanamandra, K et al., 2013 Neuron 80(2):402-14 and Yanamandra, K et al 2015 Ann Clin Transl Neurol 2(3):278-88, the contents of each of which are herein incorporated by reference in their entirety. Such antibodies may block tau seeding. Non-limiting examples of antibodies described in these publications include HJ8.1.1, HJ8.1.2, HJ8.2, HJ8.3, HJ8.4, HJ8.5, HJ8.7, HJ8.8, HJ9.1, HJ9.2, HJ9.3, HJ9.4, HJ9.5, and variants thereof. Non-limiting examples of targeted epitopes of tau may include amino acids 22-34, 385-391, 405-411, 3-6, 118-122, 386-401, 7-13, and/or 272-281 of human tau.

[0324] In some embodiments, the antibodies (or fragments thereof) encoded by the viral genomes of the present invention may be any of those taught in the International Publications WO200206285.1, the contents of which are herein incorporated by reference in their entirety.

[0325] In some embodiments, the antibodies (or fragments thereof) encoded by the viral genomes of the present invention may be as described in Bright, J et al., 2015 Neurobiol of Aging 36:693-709; Pedersen, J T and Sigurdsson E M, 2015 Trends Mol Med 21(6):394-402; Levites. Y et al. 2015 J Neurosci 35(16)6265-76; Jicha et al 1999 J Neuroses 19(17): 7486-94; Reyes J F et al., 2012 Acta Neuropathol 123(1):119-32; Reynolds M R, et al., 2006 J Neurosci 26(42):10637-45; Gamblin, TcC et al 2003 PNAS 1.00(17):10032-7; Castfflo-Cananza, D L et al., 2014 J Neuroses 34(12)4260-72; Walls, K C et al., 2014 Neuroses Lett 575:96-100; Yanamandra. K et al., 2013 Neuron 80(2):402-14; Yanamandra, K et al 2015 Ann Clin Transl Neurol 2(3):278-88; Allen B. et al., 2002 J Neurosci 22(21):9340-51; Gotz, J et al, 2010 Biochem Biophys Acta 1802(10:860-71; Hasegawa, M et al 1996 FEES Lett 384:25-30; Carmel, G et al 1996 J Biol Chem 271 (51 ):32780-32795; Jicha, G A et al, 1997 J Neurosci Res 48(2):1.28-132; Jicha, G A et al., 1997 j Neurochem 69(5):2087-95; the contents of each of which are herein incorporated by reference in their entirety.

[0326] Anti-tau antibodies or fragments thereof encoded by the viral genomes of the present invention may be any commercially available anti-tau antibody known in the art or developed by a person with skill in the art. Non-limiting examples of commercially available anti-tau antibodies include EPR2396(2) (pThr⁵⁰; Abcam, Cambridge, Mass.), 5H911 (pThr¹⁸¹; ThermoFisher, Waltham, Mass.), M7004D06 (pThr¹⁸¹; BioLegend, San Diego, Calif), 1E7 (pThr¹⁸¹, EMD Miliipore, Billerica, Mass.), EPR2400 (pSsr398; Abcam, Cambridge, Mass.), EPR2401Y (pSer¹⁹⁹; Abcam, Cambridge, Mass.), 2H23L4 (pSer¹⁹⁹; ThermoFisher, Waltham, Mass.), EPR2402 (pSer²⁰²; Abcam, Cambridge, Mass.), 10F8 (pSer202; Abcam, Cambridge, Mass.), EPR2403(2) (pThr²⁰⁵; Abcam, Cambridge, Mass.), EPR1884(2) (pSer²¹⁴; Abcam, Cambridge, Mass.), EPR2488 (pThr²³¹; Abcam, Cambridge, Mass.), 1H6L6 (pThr231; ThermoFisher, Waltham, Mass.), 3G3 (pThr²³¹, pSer²³⁵; Abcam, Cambridge, Mass.), EPR2452 (pSer²³⁵; Abcam, Cambridge, Mass.), 12G10 (pSer238; Abcam, Cambridge, Mass.), EPR2454 (pSer²⁶²; Abcam, Cambridge, Mass.), EPR2457(2) (pSer³²⁴; Abcam, Cambridge, Mass.), EPR2603 (pSer³⁵⁶; Abcam, Cambridge, Mass.), EPR2731 (pSer³⁹⁶; Abcam, Cambridge, Mass.), EPR2605 (pSer⁴⁰⁴; Abcam, Cambridge, Mass.), EPR2866 (pSer⁴²²; Abcam, Cambridge, Mass), 1A4 (pTau¹⁷⁷⁻¹⁸⁷; Origene, Roekville, Md.), 7G9 (pTau¹⁷⁷⁻¹⁸⁷; Origene, Rockville, Md.), 9B4 (pTau¹⁷⁷⁻¹⁸⁷, Origene, Rockville, Md.), 2A4 (pTau¹⁷⁷⁻¹⁸⁷; Origene, Roekville, Md.), 9G3 (pTyr¹⁸; NovusBio, Littleton, Colo.), EPR2455(2) (pSer⁶¹⁰; Abcam, Cambridge, Mass.), EP2456Y (pSer622; Abcam, Cambridge, Mass.; EMD Miliipore, Biilerica, Mass.), SMI 51 (PHF Tan⁹⁵⁻¹⁰⁸; BioLegend, San Diego, Calif.), TOMA-1 (Oligomeric Tau, EMD Miliipore, Billerica, Mass.), Tau-nY18 (nTyr¹⁸, Origene, Rockville, Md.; BioLegend, San Diego, Calif.; EMD Miliipore, Billerica, Mass.), Tau-nY29 (nTyr²⁹; BioLegend, San Diego, Calif.; EMD Miliipore, Billerica, Mass.; Abcam, Cambridge, Mass.), 1C9.G6 (di-methyl-Lys²⁸¹; BioLegend, San Diego, Calif.), 7G5.F4 (di-methyl-Lys³¹¹; BioLegend, San Diego, Calif.), TNT-1 (Tau²⁻¹⁸; EMD Miliipore, Billerica, Mass.), TNT-2 (Tau²⁻⁵⁸; EMD Miliipore, Billerica, Mass.), 7B8 (Tau⁵⁻¹²; Abcam, Cambridge, Mass.), Tau-13 (Tau²⁰⁻³⁵; BioLegend, San Diego, Calif.), 1-100 (Tau¹⁻¹⁰⁰; BioLegend, San Diego, Calif.), 2G9.F10 (Tau¹⁵⁷⁻¹⁶⁸, BioLegend, San Diego, Calif., Origene, Rockville, Md.), 39E10 (Tau¹⁸⁹⁻¹⁹⁵; BioLegend, San Diego, Calif., Origene, Rockville, Md.), 77E9 (Tau¹⁸⁵⁻¹⁹⁵; BioLegend, San Diego, Calif.; Origene, Rockville, Md.), ATS (pSer²⁰², pSer²⁰⁵; ThermoFisher, Waltham, Mass.), AT100 (pSer²¹², pSer²¹⁴; ThermoFisher, Waltham, Mass.), PHF-6 (pThr²³¹; NovusBio, Littleton, Colo.; EMD Miliipore, Billerica, Mass.; BioLegend, San Diego, Calif.; ThermoFisher, Waltham, Mass.), AT180 (pThr²³¹; ThermoFisher, Waltham, Mass.), AT270 (pThr¹⁸¹; ThermoFisher, Waltham, Mass.), PHF-13 (pSer³⁹⁶; ThermoFisher, Waltham, Mass.; BioLegend, San Diego, Calif.), TauC3 (Asp⁴²¹; BioLegend, San Diego, Calif.; EMD Miliipore, Billerica, Mass.; ThermoFisher, Waltham, Mass.), Taul2 (Tau⁶⁻¹⁸; BioLegend, San Diego, Calif.; EMD Miliipore, Billerica, Mass.), Tau5 (Tau210-241; BioLegend, San Diego, Calif.; EMD Millipore, Billerica, Mass.; Abcam, Cambridge Mass.; ThermoFisher, Waltham, Mass.), HT7 (Tau¹⁵⁹⁻¹⁶³; ThermoFisher, Waltham, Mass.), 77G7 (Tau³¹⁶⁻³⁵⁵; BioLegend, San Diego, Calif.), Tau46 (Tau⁴⁰⁴⁻⁴⁴¹; BioLegend, San Diego, Calif.; NovusBio, Littleton, Colo.; Abcam, Cambridge, Mass.), UMAB239 (Tau⁶²³⁻⁷⁵⁸, Origene, Rockville. Md.), OTI6G3 (Tau⁶²³⁻⁷⁵⁸; Origene, Rockville, Md.), OTI13E11 (Tau⁶²³⁻⁷⁵⁸, Origene, Rockville, Md.), OTI13B5 (Tau⁶²³⁻⁷⁵⁸; Origene, Rockville, Md.), E178 (Tau⁷⁰⁰⁻⁸⁰⁰; Abcam, Cambridge, Mass.), SP70 (N-terminal Tau; Origene, Rockville, Md.; NovusBio, Littleton, Colo.; ThermoFisher, Waltham, Mass.; Abcam, Cambridge, Mass.), C45 (N-terminal Tau; Origene, Rockville, MD), Tau7 (C-terminal Tau; EMD Millipore, Billerica, Mass.), S. 125.0 (C-terminal Tau; ThermoFisher, Waltham, Mass.), 8E6/C11 (Three-repeat Tau²⁰⁹⁻²²⁴; EMD Millipore, Billerica, Mass.), 1E1/A6 (Four-repeat Tau²⁷⁵⁻²⁹¹; EMD Millipore, Billerica, Mass.), 7D12.1 (Four-repeat Tau²⁷⁵⁻²⁹¹; EMD Millipore, Billerica, Mass.), 5C7 (Four-repeat Tau²⁶⁷⁻²⁷⁸; BioLegend, San Diego, Calif.; Origene, Rockville, Md.), 5F9 (Four-repeat Tau²⁷⁵⁻²⁹¹; BioLegend, San Diego, Calif.: Origene, Rockville, Md.), 3H6.H7 (0N Tau³⁹⁻⁵⁰; BioLegend, San Diego, Calif.; Origene, Rockville, Md.), 4H5.B9 (1N Tau⁶⁸⁻⁷⁹: BioLegend, San Diego, Calif.; Origene, Rockville, Md.), 71C11 (2N Tau; BioLegend, San Diego, Calif.), PC1C6 (unphosphorylated tau; EMD Millipore, Billerica, Mass.), Tau2 (BioLegend, San Diego, Calif.; Origene, Rockville, Md.; EMD Millipore, Billerica, Mass.), 2E9 (Origene, Rockville, Md.; NovusBio, Littleton, Colo.), 4F1 (Origene, Rockville, Md., NovusBio, Littleton, Colo.), 5B10 (NovusBio, Littleton, Colo.); 5E2 (EMD Millipore, Billerica, Mass.), Tau-93 (Origene, Rockville, Md.), T14 (ThermoFisher, Waltham, Mass.), T46 (ThermoFisher, Waltham, Mass.), BT2 (ThermoFisher, Waltham, Mass.) and/or variants or derivates thereof.

[0327] In one embodiment, the antibodies encoded by the viral genomes of the present invention may be multispecific antibodies for transferrin receptor and a brain antigen, wherein the brain antigen may be tau, as described in International Publication WO2016081643, the contents of which are herein incorporated by reference in their entirety. In one embodiment, the antibody may have a sequence as given by SEQ ID NO: 160 or 161 of WO2016081643.

[0328] In one embodiment, the antibodies encoded by the viral genomes of the present invention are any of those described in U.S. Pat. Nos. 8,871,447, 8,420,613, International Publication No. WO2014193935, WO2010011999, or in United States Publication Nos. US20110250217, US20110020237, US20100316590, or US20120225864, the contents of each of which are herein incorporated by reference in their entirety. In one embodiment, the antibody recognizes an amyloidogenic or aggregating protein.

### Disease Specific Epitopes, Innate Defense Regulator Peptides, Cyclic Peptides

[0329] In one embodiment, the viral genomes of the AAV particles may comprise nucleic acids which have been engineered to enable expression of antibodies binding to disease-specific epitopes of proteins. Such antibodies may be used to diagnose, prevent, and/or treat the corresponding medical conditions by targeting epitopes of the protein presented by or accessible on native or non-native forms (e.g., misfolded forms of native proteins) of the target. Such epitopes may be specific to diseases involved with misfolding of a protein due to pathologic condition and resulting in misfolded aggregates. The disease-specific proteins are considered to be toxic to neurons and to have a role in neuronal cell death and dysfunction in neurodegenerative diseases including, but not limited to, Alzheimer's disease (AD), amyotrophic lateral sclerosis (ALS), Parkinson's disease, dementia by Lewy body (DLB), and prion diseases, e.g. Creutzfeldt-Jakob disease (CJD), Gerstmann-Straussier-Scheinker syndrome (GSS), kuru, and fatal familial insomnia (FFI).

[0330] In one embodiment, the encoded disease-specific epitopes may include epitopes on SOD1 that are revealed, as SOD1 (Superoxide dismutase [Cu—Zn]) dissociates from its homodimeric, normal state. The SOD epitopes may be selectively presented or accessible in non-native SOD1 forms including misfolded SOD1 monomer, misfolded SOD1 dimer, and the epitopes selectively presented or accessible in SOD1 aggregates. Such epitopes may be specific to neurodegenerative diseases including, but not limited to, amyotrophic lateral sclerosis (ALS), Alzheimer's (AD), Parkinson's (PD), and Lewy body diseases (LBD).

[0331] In one embodiment, the expressed antibodies may bind to epitopes presented by or accessible on non-native forms of SOD1, such as those presented by SED ID NO: 2, 3, 5, 6, and 7 of U.S. Pat No.7,977,314 (the contents of which are herein incorporated by reference in its entirety), or presented by or accessible on monomeric forms of SOD1, such as those presented by SEQ ID NO: 1 and 4 of U.S. Pat. No. 7,977,314, the contents of which are herein incorporated by reference in their entirety. In one embodiment, the expressed antibodies may comprise isolated peptides corresponding to such epitopes, such as those presented in SEQ ID NO: 1-8 or SEQ ID NO: 8-16, or epitopes presented by SEQ ID NO: 34-63, 65-79 of U.S. Pat. No. 7,977,314, the contents of which are herein incorporated by reference in their entirety.

[0332] In one embodiment, the encoded disease-specific epitopes may be specific to diseases associated with prion protein (PrP); familial amyloid polyneuropathy or senile systemic amyloidosis or a disease related by the presence of misfolded transthyretins (TTR), renal accumulation of β2 microglobulin amyloid deposits or a disease related by the presence of misfolded β2 microglobulin, amyotrophic lateral sclerosis (ALS) or a disease related by the presence of misfolded SOD1, leukemias or myelomas or a disease related by the presence of misfolded cluster of differentiation 38 (CD38); colon cancer metastasis and or a disease related by the presence of misfolded cluster of differentiation (CD44); tumors associated with tumor necrosis factor receptor (TNFR); cancers including cervical, head and neck, endometrial, lung and breast carcinomas, pleural mesotheliomas, malignant melanomas, Hodgkin lymphomas, anaplastic large cell non-Hodgkin lymphomas, or a disease related by the presence of misfolded Notch homolog 1 (NOTCH1) e.g. acute myeloid leukemias and B-cell chronic lymphoid leukemias; cancer in which Fas receptor (FasR) is implicated; cancers and related disorders in which misfolded epidermal growth factor (EGFR) is implicated; aid/or other related diseases, disorders and conditions.

[0333] In one embodiment, the encoded disease specific epitopes may include epitopes that are revealed as the proteins misfold. In one embodiment, the expressed antibodies may bind to predicted epitopes of human PrP, such as those presented by SEQ ID NO: 1-10 of US Patent Publication No. US20100233176; bovine PrP, such as those presented by SEQ ID NO: 11-15 of US Patent Publication No. 11820100233176, TTR, such as those presented by SEQ ID NO: 16-22 of US Patent Publication No. US20100233176; beta-2 microglobulin, such as those presented by SEQ ID NO: 23-26 of US Patent Publication No. US20.100233176; SOD1, such as those presented by SEQ ID NO; 27-40 of US Patent Publication No. US20100233176; CD38, such as those presented by SEQ ID NO: 41-45 of US Patent Publication No. US20100233176; CD44, such as those presented by 46-50 of US Patent Publication No. US20100233176; TNFR, such as those presented by 51-55 of US Patent Publication No. US20100233176, notch protein, such as those presented in SEQ ID NO: 56-60 of US Patent Publication No. US20100233176; FasR, such as those presented by SEQ ID NO: 61-65 of US Patent Publication No. US20100233176; and EGFR, such as those presented by SEQ ID NO: 66-80 of US Patent Publication No. US 20100233176; the contents of which are herein incorporated by reference in their entirety.

[0334] In one embodiment, the expressed antibodies may comprise peptides corresponding to such epitopes. In one embodiment, the expressed antibodies may comprise prion-specific peptides, such as those presented by SEQ ID NO: 81-88 of US Patent Publication No. US20100233176, the contents of which are herein incorporated by reference in their entirety, and variations thereof.

[0335] In one embodiment, the encoded disease-specific epitopes may be specific to prion diseases, including transmissible spongiform encephalopathies (TSEs) or other prion diseases. In one embodiment, the expressed antibodies may bind to predicted epitopes of PrP, such as those presented by SEQ ID NO: 24, 26, 28, 30, 32, 34, 36, 39-43, of US Patent Publication No. US20150004185, the contents of which are herein incorporated by reference in their entirety. In one embodiment, the expressed antibodies may comprise prion-specific peptides or peptide fusions, such as those presented by SEQ ID NO: 12-23, 25, 27, 29, 31, 33, 35, 37, 38, 43, and 44-48 of US Patent Publication No. US20150004185, the contents of which are herein incorporated by reference in their entirety.

[0336] In one embodiment, the expressed antibodies may comprise prion peptides binding to prion specific abnormal isoform of the prion protein, such as those presented by SEQ ID NO: 2-10 of US Patent Publication No. US20040072236, the contents of which are herein incorporated by reference in their entirety.

[0337] In one embodiment, the viral genomes of the AAV particles may comprise nucleic acids which have been engineered to express innate defense regulator (IDR) peptides. IDRs are imniunomodulatory peptides that act directly on cells to affect an innate immune response. Such IDRs may be used to treat neurodegenerative diseases associated with neuroinflammation, e.g. amyotrophic lateral sclerosis (ALS), Alzheimer's disease, Friedreich's ataxia, Huntington's disease, Lewy body disease, Parkinson's disease, spinal muscular atrophy, and multiple sclerosis (MS) and other neurodegenerative diseases. In one embodiment, IDRs may be those presented by SEQ IDNO: 1-969, find 973-1264 of International Publication No. WO2013034982, the contents of which are herein incorporated by reference in their entirety, or analogs, derivatives, amidated variations and conservative variations thereof.

[0338] In one embodiment, the viral genomes of the AAV particles may comprise nucleic acids which have been engineered to express antibodies binding to an epitope of the Tropomyosin receptor kinase (TrkC) receptor. Such antibodies may comprise a peptide, such, as one presented by SEQ ID NO: 1 of U.S. Pat. No.9,200,080, the contents of which are herein incorporated by reference in their entirety.

[0339] In some embodiments, the viral genomes of the AAV particles may comprise nucleic acids which have been engineered to express cyclic peptides with an amino acid, sequence SNK. Non-limiting examples of other cyclic peptides include SEQ ID NO: 1-7 of U.S. Pat. No. 9,216,217, the contents of which are herein incorporated by reference in their entirety. The method of preparing the antibodies may include hyperimmune preparation method, as described, in U.S. Pat. No. 9,216,217, the contents of which are herein incorporated by reference in their entirety.

### Prions

[0340] In one embodiment, the viral genomes of the AAV particles may comprise a nucleic acid sequence encoding antibodies comprising prion peptides comprising prion epitopes, and fusions and repeats thereof, such as those presented by SEQ ID NO: 8-32, 35, and 36 of U.S. Pat.9,056,918, the contents of which are herein incorporated by reference in their entirety.

[0341] In one embodiment, the viral genomes of the AAV particles may comprise a nucleic acid sequence encoding prion binding proteins (PrPBP). In one embodiment, the PrPBPs are cadherins, such as those presented by SEQ ID NO. 1 and 2 of International Publication WO1997/045746, the contents of which are herein incorporated by reference in their entirety. In one embodiment, the PrPBPs are cadherins, such as those presented by SEQ ID NO: 2 and 7-9 of International Publication No. WO200100023 5, the contents of which are herein incorporated by reference in their entirety.

### The Nature of the Polypeptides and Variants

[0342] Antibodies encoded by payload regions of the viral genomes of the invention may be translated as a whole polypeptide, a plurality of polypeptides or fragments of polypeptides, which independently may be encoded by one or more nucleic acids, fragments of nucleic acids or variants of any of the aforementioned. As used herein, “polypeptide” means a polymer of amino acid residues (natural or unnatural) linked together most often by peptide bonds. The term, as used herein, refers to proteins, polypeptides, and peptides of any size, structure, or function. In some instances, the polypeptide encoded is smaller than about 50 amino acids and the polypeptide is then termed a peptide. If the polypeptide is a peptide, it will be at least about 2, 3, 4, or at least 5 amino acid residues long. Thus, polypeptides include gene products, naturally occurring polypeptides, synthetic polypeptides, homologs, orthologs, paralogs, fragments and other equivalents, variants, and analogs of the foregoing. A polypeptide may be a single molecule or may be a multi-molecular complex such as a dimer, trimer or tetramer. They may also comprise single chain or multichain polypeptides and may be associated or linked. The term polypeptide may also apply to amino acid polymers in which one or more amino acid residues are an artificial chemical analogue of a corresponding naturally occurring amino acid.

[0343] The term “polypeptide variant” refers to molecules which differ in their amino acid sequence from a native or reference sequence. The amino acid sequence variants may possess substitutions, deletions, and/or insertions at certain positions within the amino acid sequence, as compared to a native or reference sequence. Ordinarily, variants will possess at least about 50% identity (homology) to a native or reference sequence, and preferably, they will be at least about 80%, more preferably at least about 90% identical (homologous) to a native or reference sequence.

[0344] In some embodiments “variant mimics” are provided. As used herein, the term “variant mimic” is one which contains one or more amino acids which would mimic an activated sequence. For example, glutamate may serve as a mimic for phosphoro-threonine and/or phosphoro-serine. Alternatively, variant mimics may result in deactivation or in an inactivated product containing the mimic, e.g., phenylalanine may act as an inactivating substitution for tyrosine; or alanine may act as an inactivating substitution for serine.

[0345] The term “amino acid sequence variant” refers to molecules with some differences in their amino acid sequences as compared to a native or starting sequence. The amino acid sequence variants may possess substitutions, deletions, and/or insertions at certain positions within the amino acid sequence. “Native” or “starting” sequence should not be confused with a wild type sequence. As used herein, a native or starting sequence is a relative term referring to an original molecule against which a comparison may be made. “Native”or “starting” sequences or molecules may represent the wild-type (that sequence found in nature) but do not have to be the wild-type sequence.

[0346] Ordinarily, variants will possess at least about 70% homology to a native sequence, and preferably, they will be at least about 80%, more preferably at least about 90% homologous to a native sequence. “Homology” as it applies to amino acid sequences is defined as the percentage of residues in the candidate amino acid sequence that are identical with the residues in the amino acid sequence of a second sequence after aligning the sequences and introducing gaps, if necessary, to achieve the maximum percent homology. Methods and computer programs for the alignment are well known in the art. It is understood that homology depends on a calculation of percent identity but may differ in value due to gaps and penalties introduced in the calculation.

[0347] By “homologs” as it applies to amino acid sequences is meant the corresponding sequence of other species having substantial identity to a second sequence of a second species.

[0348] “Analogs” is meant to include polypeptide variants which differ by one or more amino acid alterations, e.g., substitutions, additions, or deletions of amino acid residues that still maintain the properties of the parent poly peptide.

[0349] Sequence tags or amino acids, such as one or more lysines, can be added to the peptide sequences of the invention (e.g., at the N-terminal or C-terminal ends). Sequence tags can be used for peptide purification or localization. Lysines can be used to increase peptide solubility or to allow for biotinylation. Alternatively, amino acid residues located at the carboxy and amino terminal regions of the amino acid sequence of a peptide or protein may optionally be deleted providing for truncated, sequences. Certain amino acids (e.g., C-terminal or N-terminal residues) may alternatively be deleted depending on the use of the sequence, as for example, expression of the sequence as part of a larger sequence which is soluble, or linked to a solid support.

[0350] “Substitutional variants” when referring to proteins are those that have at least one amino acid residue in a native or starting sequence removed and a different amino acid inserted in its place at the same position. The substitutions may be single, where only one amino acid in the molecule has been substituted, or they may be multiple, where two or more amino acids have been substituted in the same molecule.

[0351] As used herein the term “conservative amino acid substitution” refers to the substitution of an amino acid that is normally present in the sequence with a different amino acid of similar size, charge, or polarity. Examples of conservative substitutions include the substitution of a non-polar (hydropholic) residue such as isoleucine, valine, and leucine for another non-polar residue. Likewise, examples of conservative substitutions include the substitution of one polar (hydrophilic) residue for another such as between arginine and lysine, between glutamme and asparagine, and between glycine and serine. Additionally, the substitution of a basic residue such as lysine, arginine, or histidine for another, or the substitution of one acidic residue such as aspartic acid or glutamic acid for another acidic residue are additional examples of conservative substitutions. Examples of non-conservative substitutions include the substitution of a non-polar (hydrophobic) amino acid residue such as isoleucine, valine, leucine, alanine, methionine for a polar (hydrophilic) residue such as cysteine, glutamine, glutamic acid or lysine and/or a polar residue for a non-polar residue.

[0352] “Insertional variants” when referring to proteins are those with one or more amino acids inserted immediately adjacent to an amino acid at a particular position in a native or starting sequence. “Immediately adjacent” to an amino acid means connected to either the alpha-carboxy or alpha-amino functional group of the amino acid.

[0353] “Deletional variants” when referring to proteins, are those with one or more amino acids in the native or starting amino acid, sequence removed. Ordinarily, deletional variants will have one or more amino acids deleted in a particular region of the molecule.

[0354] As used herein, the term “derivative” is used synonymously with the term “variant” and refers to a molecule that has been modified or changed in any way relative to a reference molecule or starting molecule. In some embodiments, derivatives include native or starting proteins that have been modified with an organic proteinaceous or non-proteinaceous derivatizing agent, and post-translational modifications. Covalent modifications are traditionally introduced by reacting targeted amino acid residues of the protein with an organic derivatizing agent that is capable of reacting with selected side-chains or terminal residues, or by harnessing mechanisms of post-translational modifications that function in selected recombinant host cells. The resultant covalent derivatives are useful in programs directed at identifying residues important for biological activity, for immunoassays, or for the preparation of anti-protein antibodies for immunoaffinity purification of the recombinant glycoprotein. Such modifications are within the ordinary skill in the art and are performed without undue experimentation.

[0355] Certain posi-translational modifications are the result of the action of recombinant host cells on the expressed polypeptide. Glutaminyl and asparaginyl residues are frequently post-translationally deamidated to the corresponding glutamyl and aspartyl residues. Alternatively, these residues are deamidated under mildly acidic conditions. Either form of these residues may be present in the proteins used in accordance with the present invention.

[0356] Other post-txanslational modifications include hydroxylation of proline and lysine, phosphorylation of hydroxyl groups of seryl or threonyl residues, methylation of the alpha-amino groups of lysine, arginine, and histidine side chains (T. E. Creighton, Proteins: Structure and Molecular Properties, W. H. Freeman & Co., San Francisco, pp. 79-86 (1983)).

[0357] “Features” when referring to proteins are defined as distinct amino acid sequence-based components of a molecule. Features of the proteins of the present invention include surface manifestations, local conformational shape, folds, loops, half-loops, domains, half-domains, sites, termini or any combination thereof.

[0358] As used herein when referring to proteins the term “surface manifestation” refers to a polypeptide based component of a protein appearing on an outermost surface.

[0359] As used herein when referring to proteins the term “local conformational shape” means a polypeptide based structural manifestation of a protein which is located within a definable space of the protein.

[0360] As used herein when referring to proteins the term “fold” means the resultant conformation of an amino acid sequence upon energy minimization. A fold may occur at the secondary or tertiary level of the folding process. Examples of secondary level folds include beta sheets and alpha helices. Examples of tertiary folds include domains and regions formed due to aggregation or separation of energetic forces. Regions formed in this way include hydrophobic and hydrophilic pockets, and the like.

[0361] As used herein the term “turn” as it relates to protein conformation means a bend which alters the direction of the backbone of a peptide or polypeptide and may involve one, two, three or more amino acid residues.

[0362] As used, herein when referring to proteins the term “loop” refers to a structural feature of a peptide or polypeptide which reverses the direction of the backbone of a peptide or polypeptide and comprises four or more amino acid residues. Oliva et al. have identified at least 5 classes of protein loops (J. Mol Biol 266 (4): 814-830; 1997).

[0363] As used herein when referring to proteins the term “half-loop” refers to a portion of an identified loop having at least half the number of amino acid residues as the loop from which it is derived. It is understood that, loops may not always contain an even number of amino acid residues. Therefore, in those cases where a loop contains or is identified to comprise an odd number of amino acids, a half-loop of the odd-numbered loop will comprise the whole number portion or next whole number portion of the loop (number of amino acids of the loop/2+/−0.5 amino acids). For example, a loop identified as a 7-animo acid loop could produce half-loops of 3 amino acids or 4 amino acids (7/2=3.5+/−0.5 being 3 or 4).

[0364] As used, herein when referring to proteins the term “domain” refers to a motif of a polypeptide having one or more identifiable structural or functional characteristics or properties (e.g., binding capacity, serving as a site for protein-protein interactions).

[0365] As used herein when referring to proteins the term “half-domain” means portion of an identified domain having at least half the number of amino acid residues as the domain from which it is derived. It is understood that domains may not always contain an even number of amino acid residues. Therefore, in those cases where a domain contains or is identified to comprise an odd number of amino acids, a half-domain of the odd-numbered domain will comprise the whole number portion or next whole number portion of the domain (number of amino acids of the domain/2+/−0.5 amino acids). For example, a domain identified as a 7-amino acid domain could produce half-domains of 3 amino acids or 4 amino acids (7/2=3.5+/−0.5 being 3 or 4). It is also understood that sub-domains may be identified within domains or half-domains, these subdomains possessing less than all of the structural or functional properties identified in the domains or half domains from which they were derived. It is also understood that the amino acids that comprise any of the domain types herein need not be contiguous along the backbone of the polypeptide (i.e., nonadjacent amino acids may fold structurally to produce a domain, half-domain or subdomam).

[0366] As used herein when referring to proteins the terms “site” as it pertains to amino acid based embodiments is used synonymous with “amino acid residue” and “amino acid side chain”. A site represents a position within a peptide or poly peptide that may be modified, manipulated, altered, derivatized or varied within the polypeptide based molecules of the present invention.

[0367] As used herein the terms “termini or terminus” when referring to proteins refers to an extremity of a peptide or polypeptide. Such extremity is not limited only to the first or final site of the peptide or polypeptide but may include additional amino acids in the terminal regions. The polypeptide based molecules of the present invention may be characterized as having both an N-terminus (terminated by an amino acid, with a free amino group (NH2)) and a C-terminus (terminated by an amino acid with a free carboxyl group (COOH)). Proteins of the invention are in some cases made up of multiple polypeptide chains brought together by disulfide bonds or by non-covalent forces (multimers, oligomers). These sorts of proteins will have multiple N- and C-termini. Alternatively, the termini of the polypeptides may be modified such that they begin or end, as the case may be, with a non-poly peptide based moiety such as an organic conjugate.

[0368] Once any of the features have been identified or defined as a component of a molecule of the invention, any of several manipulations and/or modifications of these features may be performed by moving, swapping, inverting, deleting, randomizing, or duplicating. Furthermore, it is understood that manipulation of features may result in the same outcome as a modification to the molecules of the invention. For example, a manipulation which involves deleting a domain would result in the alteration of the length of a molecule just as modification of a nucleic acid to encode less than a full-length molecule would.

[0369] Modifications and manipulations can be accomplished by methods known in the art such as site directed mutagenesis. The resulting modified molecules may then be tested for activity using in vitro or in vivo assays such as those described herein or any other suitable screening assay known in the art.

### AAV Production

[0370] The present invention provides methods for the generation of parvoviral particles, e.g. AAV particles, by viral genome replication in a viral replication cell.

[0371] In accordance with the invention, the viral genome comprising a payload region encoding an antibody, an antibody-based composition or fragment thereof, will be incorporated into the AAV particle produced in the viral replication cell. Methods of making AAV particles are well known in the art and are described in e.g., U.S. Pat. Nos. 6,204,059, 5,756,283, 6,258,595, 6,261,551, 6,270,996, 6,281,010, 6,365,394, 6,475,769, 6,482,634, 6,485,966, 6,943,019, 6,953,690, 7,022,519, 7,238,526, 7,291,498 and 7,491,508, 5,064,764, 6,194,191, 6,566,118, 8,137,948, or International Publication Nos. WO 1996039530, WO 1998010088, WO1999014354, WO1999015685, WO 1999047691, WO2000055342, WO2000075353, and WO2001023597; Methods In Molecular Biology, ed. Richard, Humana Press, N.J. (1995); O'Reilly et al., Baculovirus Expression Vectors, A Laboratory Manual, Oxford Univ. Press (1994); Samulski et al., J. Vir.63:3822-8 (1989); Kajigaya et al., Proc Nat'l. Acad. Sci. USA 88: 4646-50 (1991); Ruffing et al., J. Vir. 66:6922-30 (1992); Kimbauer et al., Vir., 219:37-44 (1996); Zhao et al., Vir.272:382-93 (2000); the contents of each of which are herein incorporated by reference in their entirety. In one embodiment, the AAV particles are made using the methods described in WO2015191508, the contents of which are herein incorporated by reference in their entirety.

[0372] Viral replication cells commonly used for production of recombinant AAV viral vectors include but are not limited to 293 cells, COS cells, HeLa cells, KB cells, and other mammalian cell lines as described in U.S. Pat. Nos. 6,156,303, 5,387,484, 5,741,683, 5, 691,176, and 5,688,676, U.S. patent publication No. 2002/0081721, and International Patent Publication Nos. WO 00/47757, WO 00/24916, and WO 96/17947, the contents of each of which are herein incorporated by reference in their entireties.

[0373] In some embodiments, the present invention provides a method for producing an AAV particle having enhanced (increased, improved) transduction efficiency comprising the steps of: 1) co-transfecting competent bacterial cells with a bacmid vector and either a viral construct vector and/or AAV payload construct vector, 2) isolating the resultant viral construct expression vector and AAV payload construct expression vector and separately transfectmg viral replication cells, 3) isolating and purifying resultant payload and viral construct particles comprising viral construct expression vector or AAV payload construct expression vector, 4) co-infecting a viral replication cell with both the AAV payload and viral construct particles comprising viral construct expression vector or AAV payload construct expression vector, and 5) harvesting and purifying the AAV particle comprising a viral genome.

[0374] In some embodiments, the present invention provides a method for producing an AAV particle comprising the steps of 1) simultaneously co-transfecting mammalian cells, such as, but not limited to HEK293 cells, with a payload region, a construct expressing rep and cap genes and a helper construct, and 2) harvesting and purifying the AAV particle comprising a viral genome.

[0375] In some embodiments, the viral genome of the AAV particle of the invention optionally encodes a, selectable marker. The selectable marker may comprise a cell-surface marker, such as any protein expressed on the surface of the cell including, but not limited to receptors, CD markers, lectins, integrins, or truncated versions thereof.

[0376] In some embodiments, selectable marker reporter genes are selected from those described in International Application No. WO 96/23810; Heim et al., Current Biology 2:178-182 (1996); Heim et al., Proc. Natl. Acad. Sci. USA (1995); or Heim et al., Science 373:663-664 (1995 ), WO 96/30540, the contents of each of which are incorporated herein by reference in their entireties).

### II. FORMULATION AND DELIVERY

### Pharmaceutical Compositions

[0377] According to the present invention the AAV particles may be prepared as pharmaceutical compositions. It will be understood, that such compositions necessarily comprise one or more active ingredients and, most often, a pharmaceutically acceptable excipient.

[0378] Relative amounts of the active ingredient (e.g. AAV particle), a pharmaceutically acceptable excipient, and/or any additional ingredients in a pharmaceutical composition in accordance with the present disclosure may vary, depending upon the identity, size, and/or condition of the subject being treated and further depending upon the route by which the composition is to be administered. For example, the composition may comprise between 0.1% and 99% (w/w) of the active ingredient. By way of example, the composition may comprise between 0.1% and 100%, e.g., between 0.5 and 50%, between 1-30%), between 5-80%, at least 80% (w/w) active ingredient.

[0379] In some embodiments, the AAV particle pharmaceutical compositions described herein may comprise at least one payload. As a non-limiting example, the pharmaceutical compositions may contain an AAV particle with 1, 2, 3, 4 or 5 payloads. In one embodiment, the pharmaceutical composition may contain a nucleic acid encoding a payload construct encoding proteins selected from antibodies and/or antibody-based compositions.

[0380] Although the descriptions of pharmaceutical compositions provided herem are principally directed to pharmaceutical compositions which are suitable for administration to humans, it will be understood by the skilled artisan that such compositions are generally suitable for administration to any other animal, e.g., to non-human animals, e.g. non-human mammals. Modification of pharmaceutical compositions suitable for administration to humans in order to render the compositions suitable for administration to various animals is well understood, and the ordinarily skilled veterinary pharmacologist can design and/or perform such modification with merely ordinary, if any, experimentation. Subjects to which administration of the pharmaceutical compositions is contemplated include, but are not limited to, humans and/or other primates; mammals, including commercially relevant mammals such as cattle, pigs, horses, sheep, cats, dogs, mice, rats, birds, including commercially relevant birds such as poultry, chickens, ducks, geese, and/or turkeys.

[0381] In some embodiments, compositions are administered to humans, human patients, or subjects.

### Formulations

[0382] The AAV particles of the invention can be formulated using one or more excipients to: (1) increase stability; (2) increase cell transfeetion or transduction; (3) permit the sustained or delayed expression of the payload; (4) alter the biodistribution (e.g., target the viral particle to specific tissues or cell types); (5) increase the translation of encoded protein; (6) alter the release profile of encoded protein; and/or (7) allow for regulatable expression of the payload.

[0383] Formulations of the present invention can include, without limitation, saline, liposomes, lipid nanoparticles, polymers, peptides, proteins, cells transfected with viral vectors (e.g., for transfer or transplantation into a subject) and combinations thereof.

[0384] Formulations of the pharmaceutical compositions described herein may be prepared by any method known or hereafter developed in the art of pharmacology. As used herein the term “pharmaceutical composition” refers to compositions comprising at least one active ingredient and optionally one or more pharmaceutieally acceptable excipients.

[0385] In general, such preparatory methods include the step of associating the active ingredient with an excipient and/or one or more other accessory ingredients. As used herein, the phrase “active ingredient” generally refers either to an AAV particle carrying a payload region encoding the polypeptides of the invention or to the antibody or antibody-based composition encoded by a viral genome of by an AAV particle as described herein.

[0386] Formulations of the AAV particles and pharmaceutical compositions described herein may be prepared by any method known or hereafter developed in the art of pharmacology. In general, such preparatory methods include the step of bringing the active ingredient into association with an excipient and/or one or more other accessory ingredients, and then, if necessary and/or desirable, dividing, shaping and/or packaging the product into a desired single-or multi-dose unit.

[0387] A pharmaceutical composition in accordance with the present disclosure may be prepared, packaged, and/or sold, in bulk, as a single unit dose, and/or as a plurality of single unit doses. As used herein, a “unit dose” refers to a discrete amount of the pharmaceutical composition comprising a predetermined amount of the active ingredient. The amount of the active ingredient is generally equal to the dosage of the active ingredient which would be administered to a subject and/or a convenient fraction of such a dosage such as, for example, one-half or one-third of such a dosage.

[0388] In one embodiment, the AAV particles of the invention may be formulated in PBS with 0.001% of pluronic acid (F-68) at a pH of about 7.0.

[0389] Relative amounts of the active ingredient (e.g. AAV particle), the pharmaceutieally acceptable excipient, and/or any additional ingredients in a pharmaceutical composition in accordance with the present disclosure may vary, depending upon the identity, size, and/or condition of the subject being treated and further depending upon the route by which the composition is to be administered. For example, the composition may comprise between 0.1% and 99% (w/w) of the active ingredient. By way of example, the composition may comprise between 0.1% and 1.00%, e.g., between 0.5 and 50%, between 1-30%, between 5-80%, or at least 80% (w/w) active ingredient.

[0390] In some embodiments, the AAV formulations described herein may contain sufficient AAV particles for expression of at least one expressed functional antibody or antibody-based composition. As anon-limiting example, the AAV particles may contain viral genomes encoding 1, 2, 3, 4, or 5 functional antibodies.

[0391] According to the present invention AAV particles may be formulated for CNS delivery. Agents that cross the brain blood barrier may be used. For example, some cell penetrating peptides that can target molecules to the brain blood barrier endothelium may be used for formulation (e.g., Mathupala, Expert Opin Ther Pat., 2009, 19, 137-140; the content of which is incorporated herein by reference in its entirety).

### Excipients and Diluents

[0392] The AAV particles of the invention can be formulated using one or more excipients or diluents to (1) increase stability; (2) increase cell transfection or transduction; (3) permit the sustained or delayed release; (4) alter the biodistribution (e.g., target the viral particle to specific tissues or cell types); (5) increase the translation of encoded protein in vivo; (6) alter the release profile of encoded protein in vivo; and/or (7) allow for regulatable expression of the polypeptides of the invention.

[0393] In some embodiments, a pharmaceutically acceptable excipient may be at least 95%, at least 96%, at least 97%, at least 98%, at least 99%, or 100% pure. In some embodiments, an excipient is approved for use for humans and for veterinary use. In some embodiments, an excipient may be approved by United States Food and Drug Administration. In some embodiments, an excipient may be of pharmaceutical grade. In some embodiments, an excipient may meet the standards of the United States Pharmacopoeia (USP), the European Pharmacopoeia (EP), the British Pharmacopoeia, and/or the International Pharmacopoeia.

[0394] Excipients, as used herein, include, but are not limited to, any and all solvents, dispersion media, diluents, or other liquid vehicles, dispersion or suspension aids, surface active agents, isotonic agents, thickening or emulsifying agents, preservatives, and the like, as suited to the particular dosage form desired. Various excipients for formulating pharmaceutical compositions and techniques for preparing the composition are known in the art (see Remington: The Science and Practice of Pharmacy, 21st Edition, A. R. Gennaro, Lippincott, Williams & Wilkins, Baltimore, Md. 2006; incorporated herein by reference in its entirety). The use of a conventional excipient medium may be contemplated within the scope of the present disclosure, except insofar as any conventional excipient medium may be incompatible with a substance or its derivatives, such as by producing any undesirable biological effect or otherwise interacting in a deleterious manner with any other component(s) of the pharmaceutical composition.

[0395] Exemplary diluents include, but are not limited to, calcium carbonate, sodium carbonate, calcium phosphate, dicalcium phosphate, calcium sulfate, calcium hydrogen phosphate, sodium phosphate lactose, sucrose, cellulose, microcrystallme cellulose, kaolin, manntol sorbitol, inositol, sodium chloride, dry starch, cornstarch, powdered sugar, etc., and/or combinations thereof.

### Inactive Ingredients

[0396] In some embodiments, AAV particle formulations may comprise at least one inactive ingredient. As used herein, the term “inactive ingredient” refers to one or more agents that do not contribute to the activity of the active ingredient of the pharmaceutical composition included in formulations. In some embodiments, all, none or some of the inactive ingredients which may be used in the formulations of the present invention may be approved by the US Food and Drug Administration (FDA).

[0397] In one embodiment, the AAV particle pharmaceutical compositions comprise at least one inactive ingredient such as, but not limited to, 1,2,6-Hexanetnol, 1,2-Dimynstoyl-Sn-Glycero-3-(Phospho-S-(1-Glycerol)); 1,2-Dimyristoyl-Sn-Glycero-3-PhosphochoIine; 1,2-Dioleoyl-Sn-Giycero-3-Phosphocholine: 1,2-Dipalmitoyl-Sn-Glycero˜3-(Phospho-Rac-(1-Glycerol)); 1,2-Distearoyl-Sn-Glycero-3-(Phospho-Rac-(1-Glycerol)); 1,2-Distearoyl-Sn-Glycero-3-Phosphocholine; 1-O-Tolylbiguanide; 2-Ethyl-1,6-Hexanediol; Acetic Acid; Acetic Acid, Glacial; Acetic Anhydride; Acetone; Acetone Sodium Bisulfite; Acetylated Lanolin Alcohols; Acetylated Monoglycerides; Acetylcysteine; Acetyltryptophan, DL-; Acrylates Copolymer; Acrylic Acid-Isoctyl Acrylate Copolymer; Acrylic Adhesive 788; Activated Charcoal; Adcote 72A103; Adhesive Tape; Adipic Acid; Aerotex Resin 3730; Alanine; Albumin Aggregated; Albumin Colloidal; Albumin Human; Alcohol; Alcohol, Dehydrated; Alcohol, Denatured; Alcohol, Diluted; Alfadex, Alginic Acid; Alkyl Ammonium Sulfonic Acid Betaine; Alkyl Aryl Sodium Sulfonate; Allantoin; Allyl. Alpha.-Ionone; Almond Oil; Alpha-Terpineol; Alpha-Tocopherol; Alpha-Tocopherol Acetate, D1-; Alpha-Tocopherol, D1-; Aluminum Acetate; Aluminum Chlorhydroxy Allantoinate; Aluminum Hydroxide; Aluminum Hydroxide-Sucrose, Hydrated; Aluminum Hydroxide Gel; Aluminum Hydroxide Gel F 500; Aluminum Hydroxide Gel F 5000; Aluminum Monostearate, Aluminum Oxide; Aluminum Polyester; Aluminum Silicate; Aluminum Starch Octenylsuccinate; Aluminum Stearate; Aluminum Subacetate; Aluminum Sulfate Anhydrous, Amerchol C; Amerchol-Cab; Aminomethylpropanol; Ammonia; Ammonia Solution; Ammonia Solution, Strong; Ammonium Acetate; Ammonium Hydroxide; Ammonium Laurvl Sulfate; Ammonium Nonoxynol-4 Sulfate; Ammonium Salt Of C-12-C-15 Linear Primary Alcohol Ethoxylate; Ammonium Sulfate; Ammonyx; Amphoteric-2; Amphoteric-9; Anethole; Anhydrous Citric Acid; Anhydrous Dextrose, Anhydrous Lactose, Anhydrous Trisodium Citrate, Aniseed Oil; Anoxid Sbn; Antifoam; Antipyrine; Apaflurane; Apricot Kernel Oil Peg-6 Esters; Aquaphor; Arginine; Arlacel; Ascorbic Acid; Ascorbyl Palmitate; Aspartic Acid; Balsam Peru; Barium Sulfate; Beeswax, Beeswax, Synthetic; Beheneth-10; Bentonite; Benzalkonium Chloride; Benzenesulfonic Acid; Benzethonium Chloride; Benzododecinium Bromide; Benzoic Acid; Benzyl Alcohol; Benzyl Benzoate; Benzyl Chloride, Betadex; Bibapcitide; Bismuth Subgallate; Boric Acid, Brocrinat; Butane, Butyl Alcohol; Butyl Ester Of Vinyl Methyl Ether/Maleic Anhydride Copolymer (125000 Mw); Butyl Stearate; Butylated Hydroxyanisole; Butylated Hydroxytoluene; Butylene Glycol; Butylparaben; Butyric Acid; C20-40 Pareth-24; Caffeine, Calcium; Calcium Carbonate; Calcium Chloride; Calcium Gluceptate; Calcium Hydroxide; Calcium Lactate; Calcobutrol; Caldiamide Sodium, Caloxetate Trisodium; Calteridol Calcium; Canada Balsam; Caprylic/Capric Triglyceride; Caprylic/Capric/Stearic Triglyceride; Captan; Captisol; Caramel; Carbomer 1342; Carbomer 1382, Carbomer 934, Carbomer 934p, Carbomer 940; Carbomer 941; Carbomer 980; Carbomer 981; Carbomer Homopolymer Type B (Allyl Pentaerythritol Crosslinked); Carbomer Homopolymer Type C (Allyl Pentaerythritol Crosslinked); Carbon Dioxide; Carboxy Vinyl (Copolymer; CarboxymethylcelIulose; Carboxymethylcellulose Sodium; Carboxypolymethylene; Carrageenan; Carrageenan Salt; Castor Oil; Cedar Leaf Oil; Cellulose; Cellulose, Microcrystalline; Cerasynt-Se; Ceresin; Ceteareth-12; Ceteareth-L5; Ceteareth-30; Cetearyl Alcohol/Ceteareth-20; Cetearyl Ethylhexanoate; Ceteth-10; Ceteth-2; Ceteth-20; Ceteth-23; Cetostearyl Alcohol; Cetrimonium Chloride, Cetyl Alcohol; Cetyl Esters Wax; Cetyl Palmitate; Cetylpyridinium Chloride; Chlorobutanol; Chlorobutanol Hemihydrate; Chlorobutanol, Anhydrous; Chlorocresol; Chloroxylenol; Cholesterol; Choleth; Choleth-24; Citrate; Citric Acid; Citric Acid Monohydrate; Citric Acid, Hydrous, Cocamide Ether Sulfate; Cocamine Oxide, Coco Betaine; Coco Diethanolamide; Coco Monoethanolamide, Cocoa Butter; Coco-Glvcerides; Coconut Oil; Coconut Oil, Hydrogenated; Coconut Oil/Palm Kernel Oil Glycerides, Hydrogenated; Cocoyl Capiylocaprate; Cola Nitida Seed Extract; Collagen; Coloring Suspension, Com Oil; Cottonseed Oil; Cream Base; Creatine; Creatinine; Cresol; Croscarmellose Sodium; Crospovidone; Cupric Sulfate, Cupric Sulfate Anhydrous; Cyclomethicone; Cyclomethicone/Dimethicone Copolyol; Cysteine; Cysteine Hydrochloride; Cysteine Hydrochloride Anhydrous; Cysteine, D1-; D&C Red No. 28; D&C Red No. 33; D&C Red No. 36; D&C Red No. 39, D&C Yellow No. 10; Daltampridine; Daubert 1-5 Pestr (Matte) 164z; Decyl Methyl Sulfoxide; Dehydag Wax Sx; Dehydroacetic Acid; Dehymuls E; Denatonium Benzoate; Deoxycholic Acid; Dextran; Dextran 40; Dextrin; Dextrose; Dextrose Monohydrate, Dextrose Solution; Diatrizoic Acid; Diazolidinyl Urea; Dichlorohenzyl Alcohol; Dichlorodifluoromethane; Dichlorotetrafluoroethane; Diethanolamine; Diethyl Pyrocarbonate; Diethyl Sebacate; Diethylene Glycol Monoethyl Ether; Diethylhexyl Phthalate, Dihydroxyaluminum Aminoacetate; Diisopropanolamine; Diisopropyl Adipate; Diisopropyl Dilinoleate; Dimethicone 350; Dimethicone Copoiyol; Dimethicone Mdx4-4210; Dimethicone Medical Fluid 360; Dimethyl Isosorbide: Dimethyl Sulfoxide; Dimethylaminoethyl Methacrylate-Butyl Methacrylate-Methyl Methacrylate Copolymer; Dimethyidioctadecylammonium Bentonite; Dimethylsiloxane/Methylvinylsiloxane Copolymer; Dinoseb Ammonium Salt: Dipalnitoylphosphatidylglycerol, D1-; Dipropylene Glycol; Disodium Cocoamphodiacetate; Disodium Laureth Sulfosuccinate; Disodium Lauryl Sulfosuccinate; Disodium Sulfosalicylate; Disofenin; Divinylbenzene Styrene Copolymer; Dindm Hydantoin; Docosanol; Docusate Sodium; Duro-Tak 280-2516; Duro-Tak 387-2516; Duro-Tak 80-1196; Duro-Tak 87-2070; Duro-Tak 87-2194; Duro-Tak 87-2287; Duro-Tak 87-2296; Duro-Tak 87-2888; Duro-Tak 87-2979, Edetate Calcium Disodium, Edetate Disodium; Edetate Disodium Anhydrous; Edetate Sodium; Edetic Acid; Egg Phospholipids; Entsufon; Entsufon Sodium: Epilactose; Epitetracycline Hydrochloride: Essence Bouquet 9200; Ethanolamine Hydrochloride; Ethyl Acetate; Ethyl Oleate; Ethylcelluloses; Ethylene Glycol; Ethylene Vinyl Acetate Copolymer; Ethylenediamine; Ethylenediamine Dihydrochloride; Ethylene-Propylene Copolymer; Ethylene-Vinyl Acetate Copolymer (28% Vinyl Acetate); Ethylene-Vinyl Acetate Copolymer (9% Vinylacetate); Ethylhexyl Hydroxystearate; Ethylparaben; Eucalyptol; Exametazime; Fat, Edible; Fat, Hard, Fatty Acid Esters, Fatty Acid Pentaerythriol Ester; Fatty Acids; Fatty Alcohol Citrate; Fatty Alcohols; Fd&C Blue No. 1; Fd&C Green No. 3; Fd&C Red No. 4; Fd&C Red No. 40; Fd&C Yellow No. 10 (Delisted); Fd&C Yellow No. 5; Fd&C Yellow No. 6; Ferric Chloride; Ferric Oxide; Flavor 89-186; Flavor 89-259; Flavor Df-119; Flavor Df-1530; Flavor Enhancer; Flavor Fig 827118; Flavor Raspberry Pfc-8407; Flavor Rhodia Pharmaceutical No. Rf 451; Fluorochlorohydrocarbons; Formaldehyde; Formaldehyde Solution; Fractionated Coconut Oil; Fragrance 3949-5; Fragrance 520a; Fragrance 6.007; Fragrance 91-122; Fragrance 9128-Y; Fragrance 93498g; Fragrance Balsam Pine No. 5124; Fragrance Bouquet 10328; Fragrance Chemoderm 6401-B; Fragrance Chentoderm 6411, Fragrance Cream No. 7345 7, Fragrance Cs-28197; Fragrance Felton 066m; Fragrance Firmenich 47373; Fragrance Givaudan Ess 9090/1c; Fragrance H-6540; Fragrance Herbal 10396, Fragrance Nj-1085; Fragrance P O F1-147, Fragrance Pa 52805; Fragrance Pera Derm D; Fragrance Rbd-9819; Fragrance Shaw Mudge U-7776; Fragrance Tf 044078; Fragrance Ungerer Honeysuckle K. 2771; Fragrance Ungerer N5195; Fructose; Gadolinium Oxide; Galactose: Gamma Cyclodextrin; Gelatin; Gelatin, Crosslinked; Gelfoam Sponge: Gellan Gum (Low Acyl): Gelva 737; Gentisic Acid; Gentisic Acid Ethanolamide, Gluceptate Sodium; Gluceptate Sodium Dihydrate; Gluconolactone, Glucuronic Acid: Glutamic Acid, D1-; Glutathione; Glycerin; Glycerol Ester Of Hydrogenated Rosin; Glyceryl Citrate; Glyceryl Isostearate; Glyceryl Laurate; Glyceryl Monostearate; Glyceryl Oleate; Glyceryl Oleate/Propylene Glycol: Glyceryl Palmitate; Glyceryl Ricinoleate; Glyceryl Stearate; Glyceryl Stearate-Laureth-23; Glyceryl Stearate/Peg Stearate; Glyceryl Stearate/Peg-100 Stearate; Glyceryl Stearate/Peg-40 Stearate; Glyceryl Stearate-Stearamidoethyl Diethylamine; Glyceryl Trioleate; Glycine; Glycine Hydrochloride; Glycol Distearate; Glycol Stearate; Guanidine Hydrochloride; Guar Gum; Hair Conditioner (18n95-1m); Heptane; Hetastarch, Hexylene Glycol; High Density Polyethylene, Histidine; Human Albumin Microspheres; Hyaluronate Sodium: Hydrocarbon, Hydrocarbon Gel, Plasticized; Hydrochloric Acid; Hydrochloric Acid, Diluted; Hydrocortisone; Hydrogel Polymer: Hydrogen Peroxide; Hydrogenated Castor Oil; Hydrogenated Palm Oil; Hydrogenated Palm/Palm Kernel Oil Peg-6 Esters; Hydrogenated Polybutene 635-690; Hydroxide Son; Hydroxyethyl Cellulose; Hydroxyethylpiperazine Ethane Sulfonic Acid; Hydroxymethyl Cellulose; Hydroxyoctacosanyl Hydroxystearate; Hydroxypropyl Cellulose; Hydroxypropyl Methylcellulose 2906; Hydroxypropyl-Beta-cyclodextrin; Hypromellose 2208 (15000 Mp·S); Hypromellose 2910 (15000 Mpa·S); Hypromelloses; Imidurea; Iodine; Todoxamic Acid; Iofetamine Hydrochloride; Irish Moss Extract; Isobutane; Isoceteth-20; Isoleucine: Isooctyl Acrylate; Isopropyl Alcohol; Isopropyl Isostearate; Isopropyl Myristate; Isopropyl Myristate—Myristyl Alcohol; Isopropyl Palmitate; Isopropyl Stearate; Isostearic Acid, Isostearyl Alcohol; Isotonic Sodium Chloride Solution; Jelene, Kaolin; Kathon Cg; Kathon Cg II; Lactate; Lactic Acid; Lactic Acid, D1-; Lactic Acid, L-; Lactobionic Acid; Lactose; Lactose Monohydrate; Lactose, Hydrous; Laneth; Lanolin, Lanolin Alcohol—Mineral Oil; Lanolin Alcohols; Lanolin Anhydrous; Lanolin Cholesterols; Lanolin Nonionic Derivatives; Lanolin, Ethoxylated; Lanolin, Hydrogenated; Lauralkonium Chloride; Laurarmine Oxide: Laurdimonium Hydrolyzed Animal Collagen; Laureth Sulfate; Laureth-2: Laureth-23; Laureth-4; Laurie Diethanolamide; Laurie Myristic Diethanolamide, Lauroyl Sarcosine; Lauryi Lactate; Lauryl Sulfate; Lavandula Angustifolia Flowering Top; Lecithin; Lecithin Unbleached; Lecithin, Egg; Lecithin, Hydrogenated; Lecithin, Hydrogenated Soy; Lecithin, Soybean; Lemon Oil; Leucine; Levulinic Acid: Lidofenin; Light Mineral Oil; Light Mineral Oil (85 Ssu); Limonene, (+/−)-; Lipocol Sc-15; Lysine, Lysine Acetate; Lysine Monohydrate, Magnesium Aluminum Silicate, Magnesium Aluminum Silicate Hydrate; Magnesium Chloride; Magnesium Nitrate; Magnesium Stearate; Maleic Acid; Mannitol; Maprofix; Mebrofemn; Medical Adhesive Modified S-15; Medical Antiform A-F Emulsion; Medronate Disodium; Medronic Acid, Meglumine; Menthol; Metacresol; Metaphosphoric Acid; Methanesulfonic Acid, Methionine; Methyl Alcohol; Methyl Gluceth-10; Methyl Gluceth-20; Methyl Gluceth-20 Sesquistearate; Methyl Glucose Sesquistearate; Methyl Laurate; Methyl Pyrrolidine; Methyl Salicylate, Methyl Stearate; Methylboronic Acid; Methylcellulose (4000 Mpa·S); Methylcelluloses; Methychloroisothiazoinone; Methylene Blue; Methylisothiazolinone; Methylparaben; Microcrystalline Wax; Mineral Oil: Mono and Diglyceride: Monostearyl Citrate; Monothioglycerol; Multisterol Extract; Myristyl Alcohol; Myristyl Lactate; Myristyl-Gamma.-Picolinium Chloride; N-Carbamoyl-Methoxy Peg-40)-1,2-Distearoyl-Cephalin Sodium; N,N-Dimethylacetamide; Niacinamide; Nioxime; Nitric Acid; Nitrogen; Nonoxynol Iodine; Nonoxynol-15; Nonoxynol-9; Norflurane; Oatmeal; Octadecene-1/Maleic Acid Copolymer; Octanoic Acid; Octisalate; Octoxynol-1;Octoxynol-40; Octoxynol-9; Octyldodecanol; Octylphenol Polymethylene; Oleic Acid; Oleth-10/Oleth-5; OIeth-2; Oleth-20; Oleyl Alcohol; Oleyl Oleate; Olive Oil; Oxidronate Disodium; Oxyquinoline; Palm Kernel Oil; Palmitamine Oxide; Parabens: Paraffin; Paraffin, White Soft, Parfum Creme 45/3; Peanut Oil; Peanut Oil, Refined, Pectin; Peg 6-32 Stearate/Glycol Stearate; Peg Vegetable Oil; Peg-100 Stearate; Peg-12 Glyceryl Laurate; Peg-120 Glyceryl Stearate; Peg-120 Methyl Glucose Dioleate; Peg-15 Cocamine; Peg-150 Distearate; Peg-2 Stearate, Peg-20 Sorbitan Isostearate; Peg-22 Methyl Ether/Dodecyl Glycol Copolymer; Peg-25 Propylene Glycol Stearate; Peg-4 Dilaurate; Peg-4 Laurate; Peg-40 Castor Oil; Peg-40 Sorbitan Diisostearate; Peg-45/Dodecyl Glycol Copolymer; Peg-5 Oleate; Peg-50 Stearate; Peg-54 Hydrogenated Castor Oil; Peg-6 Isostearate; Peg-60 Castor Oil; Peg-60 Hydrogenated Castor Oil; Peg-7 Methyl Ether, Peg-75 Lanolin; Peg-8 Laurate; Peg-8 Stearate, Pegoxol 7 Stearate; Pentadecalactone; Pentaerythritol Cocoate; Pentasodium Pentetate; Pentetate Calcium Trisodium; Pentetic Acid; Peppermint Oil; Perflutren; Perfume 25677; Perfume Bouquet, Perfume E-1991; Perfume Gd 5604; Perfume Tana 90/42 Scba; Perfume W-1952-1, Petrolatum; Petrolatum, Wiite; Petroleum Distillates; Phenol; Phenol, Liquefied; Phenonip; Phenoxyethanol; Phenylalanine; Phenylethyl Alcohol; Phenylmercuric Acetate; Phenylmercuric Nitrate; Phosphatidyl Glycerol, Egg; Phospholipid; Phospholipid, Egg; Phospholipon 90g; Phosphoric Acid, Pine Needle Oil (Pmus Sylvestris); Piperazine Hexahydrate; Plastibase-50w; Polacrilin; Polidronium Chloride; Poloxamer 124; Poloxamer 181; Poloxamer 182; Poloxamer 188; Poloxamer 237; Poloxamer 407; Poly(Bis(P-Carboxyphenoxy)Propane Anhy dride): Sebacic Acid; Poly(Dimethylsiloxane/Methylvinylsiloxane/Methylhydrogensiloxane) Dimethylvinyl Or Dimethylhydroxy Or Trimethyl Endblocked; Poly(D1-Lactic-Co-GIycolic Acid), (50:50; Poly(D1-Lactic-Co-Glycolic Acid), Ethyl Ester Terminated, (50:50; Polyacrylic Acid (250000Mw); Polybutene (1400 Mw); Polycarbophil; Polyester; Polyester Polyamine Copolymer; Polyester Rayon, Polyethylene Glycol 1000; Polyethylene Glycol 1450; Polyethylene Glycol 1500; Polyethylene Glycol 1540: Polyethylene Glycol 200; Polyethylene Glycol 300; Polyethylene Glycol 300-1600, Polyethylene Glycol 3350; Polyethylene Glycol 400; Polyethylene Glycol 4000; Polyethylene Glycol 540; Polyethylene Glycol 600; Polyethylene Glycol 6000; Polyethylene Glycol 8000; Polyethylene Glycol 900; Polyethylene High Density Containing Ferric Oxide Black (<1%); Polyethylene Low Density Containing Barium Sulfate (20-24%); Polyethylene T; Polyethylene Terephthalates; Polyglactin; Polyglyceryl-3 Oleate; Polyglyceryl-4 Oleate; Polyhydroxyethyl Methacrylate; Polyisobutylene; Polyisobutylene (1100000 Mw); Polyisobutylene (35000 Mw); Polyisobutylene 178-236; Polyisobutylene 241-294; Polyisobutylene 35-39, Polyisobutylene Low Molecular Weight; Polyisobutylene Medium Molecular Weight; Polyisobutylene/Polybutene Adhesive: Polylactide; Polyols; Polyoxyethylene—Polyoxypropylene 1800; Polyoxyethylene Alcohols; Polyoxyethylene Fatty Acid Esters; Polyoxyethylene Propylene: Polyoxyl 20 Cetostearyl Ether; Polyoxyl 35 Castor Oil; Polyoxyl 40 Hydrogenated Castor Oil; Polyoxyl 40 Stearate; Polyoxyl 400 Stearate; Polyoxyl 6 And Polyoxyl 32 Palmitostearate: Polyoxyl Distearate; Polyoxyl Glyceryl Stearate; Polyoxyl Lanolin; Polyoxyl Palmitate; Polyoxyl Stearate; Polypropylene; Polypropylene Glycol; Polyquaternium-10; Polyquaternium-7 (70/30 Acrylanride/Dadmac; Polvsiloxane; Polysorbate 20; Polysorbate 40; Polysorbate 60; Polysorbate 65; Polysorbate 80; Polyurethane; Polyvinyl Acetate; Polyvinyl Alcohol; Polyvinyl Chloride; Polyvinyl Chloride-Polyvinyl Acetate Copolymer; Polyvinylpyridine; Poppy Seed Oil; Potash; Potassium Acetate; Potassium Alum; Potassium Bicarbonate; Potassium Bisulfite; Potassium Chloride; Potassium Citrate, Potassium Hydroxide; Potassium Metabisulfite; Potassium Phosphate, Dibasic; Potassium Phosphate, Monobasic; Potassium Soap; Potassium Sorbate; Povidone Acxylate Copolymer; Povidone Hydrogel; Povidone K17; Povidone K25; Povidone K29/32, Povidone K30; Povidone K90; Povidone K90f; Povidone/Eicosene Copolymer; Povidones; Ppg-12/Smdi Copolymer; Ppg-15 Stearyl Ether; Ppg-20 Methyl Glucose Ether Distearate; Ppg-26 Oleate; Product Wat; Proline; Promulgen D; Promulgen G; Propane; Propellant A-46; Propyl Gallate; Propylene Carbonate; Propylene Glycol; Propylene Glycol Diacetate; Propylene Glycol Dicaprylate, Propylene Glycol Monolaurate; Propylene Glycol Monopalmitostearate; Propylene Glycol Palmitostearate; Propylene Glycol Ricinoleate; Propylene Glycol/Diazolidinyl Urea/Methylparaben/Propylparben; Propylparaben; Protamine Sulfate; Protein Hydrolysate; Pvm/Ma Copolymer; Quatemium-15; Quatemium-15 Cis-Form; Quatemium-52; Ra-2397; Ra-3011; Saccharin; Saccharin Sodium; Saccharin Sodium Anhydrous; Saffiower Oil; Sd Alcohol 3a, Sd Alcohol 40, Sd Alcohol 40-2, Sd Alcohol 40b, Sepineo P 600: Serine; Sesame Oil; Shea Butter, Silastic Brand Medical Grade Tubing; Silastic Medical Adhesive,Silicone Type A; Silica, Dental; Silicon; Silicon Dioxide; Silicon Dioxide, Colloidal; Silicone; Silicone Adhesive 4102; Silicone Adhesive 4502, Silicone Adhesive Bio-Psa Q7-4201; Silicone Adhesive Bio-Psa Q7-4301; Silicone Emulsion; Silicone/Polyester Film Strip; Simethicone; Simethicone Emulsion; Sipon Ls 20np; Soda Ash; Sodium Acetate; Sodium Acetate Anhydrous; Sodium Alkyl Sulfate: Sodium Ascorbate; Sodium Benzoate; Sodium Bicarbonate, Sodium Bisulfate; Sodium Bisulfite; Sodium Borate: Sodium Borate Decahydrate; Sodium Carbonate: Sodium Carbonate Decahydrate; Sodium Carbonate Monohydrate; Sodium Cetostearyl Sulfate; Sodium Chlorate; Sodium Chloride; Sodium Chloride Injection, Sodium Chloride Injection, Bacteriostatic, Sodium Cholesteryl Sulfate, Sodium Citrate, Sodium Cocoyl Sarcosinate; Sodium Desoxycholate; Sodium Dithionite; Sodium Dodecylbenzenesulfonate; Sodium Formaldehyde Sulfoxylate; Sodium Gluconate; Sodium Hydroxide; Sodium Hypochlorite; Sodium Iodide: Sodium Lactate; Sodium Lactate, L-; Sodium Laureth-2 Sulfate, Sodium Laureth-3 Sulfate; Sodium Laureth-5 Sulfate; Sodium Lauroyl Sarcosinate; Sodium Lauryl Sulfate; Sodium Lauryl Sulfoacetate; Sodium Metabisulfite; Sodium Nitrate; Sodium Phosphate; Sodium Phosphate Dihydrate; Sodium Phosphate, Dibasic; Sodium Phosphate, Dibasic, Anhydrous; Sodium Phosphate, Dibasic, Dihydrate; Sodium Phosphate, Dibasic, Dodecahydrate; Sodium Phosphate, Dibasic, Heptahydrate; Sodium Phosphate, Monobasic: Sodium Phosphate, Monobasic, Anhydrous; Sodium Phosphate, Monobasic, Dihydrate; Sodium Phosphate, Monobasic, Monohydrate; Sodium Polyacrylate (2500000 Mw); Sodium Pyrophosphate; Sodium Pyrrolidone Carboxylate, Sodium Starch Glycolate; Sodium Succinate Hexahydrate; Sodium Sulfate; Sodium Sulfate Anhydrous; Sodium Sulfate Decahydrate; Sodium Sulfite; Sodium Sulfosuccinated Undecyclenic Monoalkylolamide; Sodium Tartrate; Sodium Thioglycolate; Sodium Thiomalate, Sodium Thiosulfate; Sodium Thiosulfate Anhydrous: Sodium Trimetaphosphate; Sodium Xylenesulfonate; Somay 44; Sorbic Acid; Sorbitan; Sorbitan Isostearate; Sorbitan Monolaurate; Sorbitan Monooleate; Sorbitan Monopalmitate; Sorbitan Monostearate; Sorbitan Sesquioieate; Sorbitan Trioleate, Sorbitan Tristearate; Sorbitol; Sorbitol Solution; Soybean Flour; Soybean Oil; Spearmint Oil, Spermaceti; Squalane; Stabilized Oxychloro Complex; Stannous 2-Ethylhexanoate; Stannous Chloride: Stannous Chloride Anhydrous; Stannous Fluoride; Stannous Tartrate; Starch; Starch 1500, Pregelatimzed; Starch, Corn; Stearalkomum Chloride, Stearalkonium Hectorite/Propylene Carbonate; Stearamidoethyl Diethylamine; Steareth-10, Steareth-100; Steareth-2; Steareth-20; Steareth-21; Steareth-40; Stearic Acid; Stearic Diethanolamide; Stearoxytrimethylsilane; Steartrimonium Hydrolyzed/nimal Collagen; Steaiyl Alcohol; Sterile Water For Inhalation; Styrene/Isoprene/Styrene Block Copolymer; Succimer; Succinic Acid; Sueralose; Sucrose; Sucrose Distearate; Sucrose Polyesters; Sulfacetamide Sodium, Sulfobutylether Beta-Cyclodextrin; Sulfur Dioxide, Sulfuric Acid; Sulfurous Acid; Surfactol Qs; Tagatose, D-; Talc; Tall Oil, Tallow Glycerides; Tartaric Acid; Tartaric Acid, D1-; Tenox; Tenox-2; Tert-Butyl Alcohol; Tert-Butyl Hydroperoxide; Tert-Butylhydroquinone; Tetrakis(2-Methoxisobutylisocyanide)Copper(I) Tetrafluoroborate; Tetrapropyl Orthosilicate; Tetrofosmin; Theophylline, Thimerosal; Threonine, Thymol; Tin, Titanium Dioxide; Tocopherol; Tocophersolan; Total parenteral nutrition, lipid emulsion; Triacetin; Tricaprylin; Trichloromonofluoromethane; Trideceth-10; Triethanolamine Lauryl Sulfate; Trifluoroacetic Acid; Triglycerides, Medium Cham, Trihydroxystearin; Trilaneth-4 Phosphate, Trilaureth-4 Phosphate, Trisodrum Citrate Dihydrate; Trisodium Hedta; Triton 720; Triton X-200; Trolamine; Tromantadine; Tromethamine (TRIS): Tryptophan; Tyloxapol; Tyrosine; Undecylenic Acid; Union 76 Amsco-Res 6038; Urea; Valine; Vegetable Oil; Vegetable Oil Glyceride, Hydrogenated; Vegetable Oil, Hydrogenated; Versetamide; Viscarin; Viscose/Cotton, Vitamin E; Wax, Emulsifying; Wecobee Fs; White Ceresin Wax; White Wax; Xanthan Gum; Zinc; Zinc Acetate; Zinc Carbonate; Zinc Chloride; and Zinc Oxide.

[0398] Pharmaceutical composition formulations of AAV particles disclosed herein may include cations or anions. In one embodiment, the formulations include metal cations such as, but not limited to, Zn2+, Ca2+, Cu2+, Mn2+, Mg+ and combinations thereof. As a non-limiting example, formulations may include polymers and complexes with a metal cation (See e.g., U.S. Pat. Nos. 6,265,389 and 6,555,525, each of which is herein incorporated by reference in its entirety).

[0399] Formulations of the invention may also include one or more pharmaceutically acceptable salts. As used herein, “pharmaceutically acceptable salts” refers to derivatives of the disclosed compounds wherein the parent compound is modified by converting an existing acid or base moiety to its salt form (e.g., by reacting the free base group with a suitable organic acid). Examples of pharmaceutically acceptable salts include, but are not limited to, mineral or organic acid salts of basic residues such as amines; alkali or organic salts of acidic residues such as carboxylic acids; and the like. Representative acid addition salts include acetate, acetic acid, adipate, alginate, ascorbate, aspartate, benzenesulfonate, benzene sulfonic acid, benzoate, bisulfate, borate, butyrate, camphorate, camphorsulfonate, citrate, cyclopentanepropionate, digluconate, dodecylsulfate, ethanesulfonate, fumarate, glucoheptonate, glycerophosphate, bemisulfate, heptonate, hexanoate, hydrobromide, hydrochloride, hydroiodide, 2-hydroxy-ethanesulfonate, lactobionate, lactate, laurate, lauryl sulfate, malate, maleate, malonate, methanesulfonate, 2-naphthaenesulfonate, nicotinate, nitrate, oleate, oxalate, palmitate, pamoate, pectinate, persulfate, 3-phenylpropionate, phosphate, picrate, pivalate, propionate, stearate, succinate, sulfate, tartrate, thiocyanate, toluenesulfonate, undecanoate, valerate salts, and the like. Representative alkali or alkaline earth metal salts include sodium, lithium, potassium, calcium, magnesium, and the like, as well as nontoxic ammonium, quaternary ammonium, and amine cations, including, but not limited to ammonium, tetramethylammonium, tetraethylammonium, methylamine, dimethylamine, trimethylamine, triethylamme, ethylamine, and the like. The pharmaceutieally acceptable salts of the present disclosure include the conventional non-toxic salts of the parent compound formed, for example, from non-toxic inorganic or organic acids.

[0400] Solvates may be prepared by crystallization, recrystallization, or precipitation from a solution that includes organic solvents, water, or a mixture thereof. Examples of suitable solvents are ethanol, water (for example, mono-, di-, and tri-hydrates), N-methylpyrrolidinone (NMP), dimethyl sulfoxide (DMSO), N,N′-dimethylformamide (DMF), N,N′-dimethylacetamide (DMAC), 1,3-dimethyl-2-imidazolidinone (DMEU), 1,3-dimethyl-3,4,5,6-tetrahydro-2-(1H)-pyrimidinone (DMPU), acetonitriie (ACN), propylene glycol, ethyl acetate, benzyl alcohol, 2-pyrrolidone, benzyl benzoate, and the like. When water is the solvent, the solvate is referred to as a “hydrate.”

### III. ADMINISTRATION AND DOSING

### Administration

[0401] The AAV particles of the present invention may be administered by any delivery route which results in a therapeutically effective outcome. These include, but are not limited to, enteral (into the intestine), gastroenteral, epidural (into the dura mater), oral (by way of the mouth), transdermal, intracerebral (into the cerebrum), intracerebroventricular (into the cerebral ventricles), epicutaneous (application onto the skin), intradermal (into the skin itself), subcutaneous (under the skin), nasal administration (through the nose), intravenous (into a vein), intravenous bolus, intravenous drip, intra-arterial (into an artery), intramuscular (into a muscle), intracardiac (into the heart), intraosseous infusion (into the bone marrow), intrathecal (into the spinal canal), intraparenchymal (into brain tissue), intraperitoneal (infusion or injection into the peritoneum), intravesical infusion, intravitreal (through the eye), intracavemous injection (into a pathologic cavity) intracavitary (into the base of the penis), intravaginal administration, intrauterine, extra-amniotic administration, transdermal (diffusion through the intact skin for systemic distribution), transmucosal (diffusion through a mucous membrane), transvaginal, insufflation (snorting), sublingual, sublabial, enema, eye drops (onto the conjunctiva), ear drops, auricular (in or by way of the ear), buccal (directed toward the cheek), conjunctival, cutaneous, dental (to a tooth or teeth), electro-osmosis, endocervical, endosinusial, endotracheal, extracorporeal hemodialysis, infiltration, interstitial intra-abdominal, intra-amniotic, intra-articular, intrabiliary, intrabronchial, intrabursal, intracartilaginous (within a cartilage), intracaudal (within the cauda equine), intracisternal (within the cisterna magna cerebellomedularis), intracomeal (within th cornea), dental intracoronal, intracoronary (within the coronary arteries), intracorporus cavemosum (within the dilatable spaces of the corporus cavernosa of the penis), intradiscal (within a disc), intraductal (within a duct of a gland), intraduodenal (within the duodenum), intradural (within or beneath the dura), intraepidermal (to the epidermis), intraesophageal (to the esophagus), intragastric (within the stomach), intragingival (within the gingivae), intraileal (within the distal portion of the small intestine), intralesional (within or introduced directly to a localized lesion), intraluminal (within a lumen of a tube), intralymphatic (within the lymph), intramedullary (within the marrow cavity of a bone), intrameningeal (within the meninges), intramyocardial (within the myocardium), intraocular (within the eye), intraovarian (within the ovary), intrapericardial (within the pericardium), intrapleural (within the pleura), intraprostatic (within the prostate gland), intrapulmonary (within the lungs or its bronchi), intrasinal (within the nasal or periorbital sinuses), intraspinal (within the vertebral column), intrasynovial (within the synovial cavity of a joint), intratendinous (within a tendon), intratesticular (within the testicle), intrathecal (within the cerebrospinal fluid at any level of the cerebrospinal axis), intrathoracic (within the thorax), intratubular (within the tubules of an organ), intratumor (within a tumor), intratympanic (within the aurus media), intravascular (within a vessel or vessels), intraventricular (within a ventricle), iontophoresis (by means of electric current where ions of soluble salts migrate into the tissues of the body), irrigation (to bathe or flush open wounds or body cavities), laryngeal (directly upon the larynx), nasogastric (through the nose and into the stomach), occlusive dressing technique (topical route administration which is then covered by a dressing which occludes the area), ophthalmic (to the external eye), oropharyngeal (directly to the mouth and pharynx), parenteral, percutaneous, periarticular, peridural, perineural, periodontal, rectal, respiratory (within the respiratory tract by inhaling orally or nasally for local or systemic effect), retrobulbar (behind the pons or behind the eyeball), soft tissue, subarachnoid, subconjunctival, submucosal, topical, transplacental (through or across the placenta), transtracheal (through the wall of the trachea), transtympanic (across or through the tympanic cavity), ureteral (to the ureter), urethral (to the urethra), vaginal caudal block, diagnostic, nerve block, biliary perfusion, cardiac perfusion, photopheresis, and spinal

[0402] In some embodiments, compositions may be administered in a way which allows them to cross the blood-brain barrier, vascular barrier, or other epithelial barrier. The AAV particles of the present invention may be administered in any suitable form, either as a liquid solution or suspension, as a solid form suitable for liquid solution or suspension in a liquid solution. The AAV particles may be formulated with any appropriate and pharmaceutically acceptable excipient.

[0403] In one embodiment, the AAV particles of the present invention may be delivered to a subject via a single route administration.

[0404] In one embodiment, the AAV particles of the present invention may be delivered to a subject via a multi-site route of administration. A subject may be administered at 2, 3, 4, 5, or more than 5 sites.

[0405] In one embodiment, a subject may be administered the AAV particles of the present invention using a bolus infusion.

[0406] In one embodiment, a subject may be administered the AAV particles of the present invention using sustained delivery over a period of minutes, hours, or days. The infusion rate may be changed depending on the subject distribution, formulation or another delivery parameter.

[0407] In one embodiment, the AAV particles of the present invention may be delivered by intramuscular delivery route. (See. e.g., U. S. Pat. No. 6,506,379; the content of which is incorporated herein by reference in its entirety). Non-limiting examples of intramuscular administration include an intravenous injection or a subcutaneous injection.

[0408] In one embodiment, the AAV particles of the present invention may be delivered by oral administration. Non-limiting examples of oral administration include a digestive tract administration and a buccal administration,

[0409] In one embodiment, the AAV particles of the present invention may be delivered by intraocular delivery route. A non-limiting example of intraocular administration include an intravitreal injection.

[0410] In one embodiment, the AAV particles of the present invention may be delivered by intranasal delivery route. Non-limiting examples of intranasal delivery include administration of nasal drops or nasal sprays.

[0411] In some embodiments, the AAV particles that may be administered to a subject by peripheral injections. Non-limiting examples of peripheral injections include intraperitoneal, intramuscular, intravenous, conjunctival, or joint injection. It was disclosed in the art that the peripheral administration of AAV vectors can be transported to the central nervous system, for example, to the motor neurons (e.g., U. S. Patent Publication Nos. US20100240739 and US20100130594: the content of each of which is incorporated herein by reference in their entirety).

[0412] In one embodiment, the AAV particles may be delivered by injection into the CSF pathway. Non-limiting examples of delivery to the CSF pathway include intrathecal and intracerebroventricular administration.

[0413] In one embodiment, the AAV particles may be delivered by systemic delivery. As a non-limiting example, the systemic delivery may be by intravascular administration.

[0414] In one embodiment, the AAV particles of the present invention may be administered to a subject by intracranial delivery (See, e.g., U.S. Pat. No. 8,119,611; the content of which is incorporated herein by reference in its entirety).

[0415] In one embodiment, the AAV particles of the present invention may be administered to a subject by intraparenchymal administration.

[0416] In one embodiment, the AAV particles of the present invention may be administered to a subject by intramuscular administration.

[0417] In one embodiment, the AAV particles of the present invention are administered to a. subject and transduce muscle of a subject. As a non-limiting example, the AAV particles are administered by intramuscular administration.

[0418] In one embodiment, the AAV particles of the present invention may be administered to a subject by intravenous administration.

[0419] In one embodiment, the AAV particles of the present invention may be administered to a subject by subcutaneous administration.

[0420] In one embodiment, the AAV particles of the present invention may be administered to a subject by topical administration,

[0421] In one embodiment, the AAV particles may be delivered by direct injection into the brain. As a non-limiting example, the brain delivery may be by intrastriatal administration.

[0422] In one embodiment, the AAV particles may be delivered by more than one route of administration. As non-limiting examples of combination administrations, AAV particles may be delivered by intrathecal and intracerebroventricular, or by intravenous and intraparenchymal administration.

### Parenteral and Injectable Administration

[0423] In some embodiments, pharmaceutical compositions, AAV particles of the present invention may be administered parenterally. Liquid dosage forms for oral and parenteral administration include, but are not limited to, pharmaceutical acceptable emulsions, microemulsions, solutions, suspensions, syrups, and/or elixirs. In addition to active ingredients, liquid dosage forms may comprise inert diluents commonly used in the art such as, for example, water or other solvents, solubilizing agents and emulsiliers such as ethyl alcohol, isopropyl alcohol, ethyl carbonate, ethyl acetate, benzyl alcohol, benzyl benzoate, propylene glycol, 1,3-butylene glycol, dimethylformamide, oils (in particular, cottonseed, groundnut, corn, germ, olive, castor, and sesame oils), glycerol, tetrahydrofurfuryl alcohol polyethylene glycols and fatty acid esters of sorbitan, and mixtures thereof. Besides inert diluents, oral compositions can include adjuvants such as wetting agents, emulsifying and suspending agents, sweetening, flavoring, and/or perfuming agents. In certain embodiments for parenteral administration, compositions are mixed with solubiiizmg agents such as CREMOPHOR®, alcohols, oils, modified oils, glycols, poiysorbates, cyclodextrins, polymers, and/or combinations thereof. In other embodiments, surfactants are included such as hydroxypropylcellulose.

[0424] Injectable preparations, for example, sterile injectable aqueous or oleaginous suspensions may be formulated according to the known art using suitable dispersing agents, wetting agents, and/or suspending agents. Sterile injectable preparations may be sterile injectable solutions, suspensions, and/or emulsions in nontoxic parenteral acceptable diluents and/or solvents, for example, as a solution in 1,3-butanediol. Among the acceptable vehicles and solvents that may be employed are water. Ringer's solution, U.S.P., and isotonic sodium chloride solution. Sterile, fixed oils are conventionally employed as a solvent or suspending medium. For this purpose, any bland fixed oil can be employed, including synthetic mono- or diglycerides, Fatty acids such as oleic acid can be used in the preparation of injectables.

[0425] Injectable formulations may be sterilized, for example, by filtration through a bacterial-retaining filter, and/or by incorporating sterilizing agents in the form of sterile solid compositions which can be dissolved, or dispersed in sterile water or other sterile injectable medium prior to use.

[0426] In order to prolong the effect of active ingredients, it is often desirable to slow the absorption of active ingredients from subcutaneous or intramuscular injections. This may be accomplished by the use of liquid suspensions of crystalline or amorphous material with poor water solubility. The rate of absorption of active ingredients depends upon the rate of dissolution which, in turn, may depend upon crystal size find crystalline form. Alternatively, delayed absorption of a parenteral administered drug form is accomplished by dissolving or suspending the drug in an oil vehicle. Injectable depot forms are made by forming microencapsule matrices of the drug in biodegradable polymers such as polylactide-polyglycolide. Depending upon the ratio of drug to polymer and the nature of the particular polymer employed, the rate of drug release can be controlled. Examples of other biodegradable polymers include poly(orthoesters) and poly(anhydrides). Depot injectable formulations are prepared by entrapping the drug in liposomes or microemulsions which are compatible with body tissues.

### Rectal and Vaginal Administration

[0427] In some embodiments, pharmaceutical compositions, AAV particles of the present invention may be administered rectally and/or vaginally. Compositions for rectal or vaginal administration are typically suppositories which can be prepared by mixing compositions with suitable non-irritating excipients such as cocoa butter, polyethylene glycol or a suppository wax which are solid at ambient temperature but liquid at body temperature and therefore melt in the rectum or vaginal cavity and release the active ingredient.

### Oral Administration

[0428] In some embodiments, pharmaceutical compositions, AAV particles of the present invention may be administered orally. Solid dosage forms for oral administration include capsules, tablets, pills, powders, and granules. In such solid dosage forms, an active ingredient is mixed with at least one inert, pharmaceutically acceptable excipient such as sodium citrate or dicalcium phosphate and/or fillers or extenders (e.g. starches, lactose, sucrose, glucose, mannitol, and silicic acid), binders (e.g. carboxymethylcellulose, alginates, gelatin, polyvinylpyrrolidinone, sucrose, and acacia), humectants (e.g. glycerol), disintegrating agents (e.g. agar, calcium carbonate, potato or tapioca starch, alginic acid, certain silicates, and sodium carbonate), solution retarding agents (e.g. paraffin), absorption accelerators (e.g. quaternary ammonium compounds), wetting agents (e.g. cetyl alcohol and glycerol monostearate), absorbents (e.g. kaolin and bentonite clay), and lubricants (e.g. talc, calcium stearate, magnesium stearate, solid polyethylene glycols, sodium lauryl sulfate), and mixtures thereof. In the case of capsules, tablets and pills, the dosage form may comprise buffering agents.

### Topical or Transdermal Administration

[0429] As described herein, pharmaceutical compositions, AAV particles of the present invention may be formulated for administration topically. The skin may be an ideal target site for delivery as it is readily accessible. Three routes are commonly considered to deliver pharmaceutical compositions, AAV particles of the present invention to the skin: (i) topical application (e.g. for local/regional treatment and/or cosmetic applications); (ii) intradermal injection (e.g. for local/regional treatment and/or cosmetic applications); and (iii) systemic delivery (e.g. for treatment of dermatologic diseases that affect both cutaneous and extracutaneous regions). Pharmaceutical compositions, AAV particles of the present invention can be delivered to the skin by several different approaches known in the art.

[0430] In some embodiments, the invention provides for a variety of dressings (e.g., wound dressings) or bandages (e.g., adhesive bandages) for conveniently and/or effectively carrying out methods of the present invention. Typically dressing or bandages may comprise sufficient amounts of pharmaceutical compositions, AAV particles of the present invention described herein to allow users to perform multiple treatments.

[0431] Dosage forms for topical and/or transdermal administration may include ointments, pastes, creams, lotions, gels, powders, solutions, sprays, inhalants and/or patches. Generally, active ingredients are admixed under sterile conditions with pharmaceutical acceptable excipients and/or any needed preservatives and/or buffers. Additionally, the present invention contemplates the use of transdermal patches, which often have the added advantage of providing controlled delivery of pharmaceutical compositions, AAV particles of the present invention to the body. Such dosage forms may be prepared, for example, by dissolving and/or dispensing pharmaceutical compositions, AAV particles in the proper medium. Alternatively, or additionally, rates may be controlled by either providing rate controlling membranes and/or by dispersing pharmaceutical compositions, AAV particles in a polymer matrix and/or gel.

[0432] Formulations suitable for topical administration include, but are not limited to, liquid and/or semi liquid preparations such as liniments, lotions, oil in water and/or water in oil emulsions such as creams, ointments and/or pastes, and/or solutions and/or suspensions.

[0433] Topicaliy-administrable formulations may, for example, comprise from about 1% to about 10% (w/w) active ingredient, although the concentration of active ingredient may be as high as the solubility limit of the active ingredient in the solvent. Formulations for topical administration may further comprise one or more of the additional ingredients described herein.

### Depot Administration

[0434] As described herein, in some embodiments, pharmaceutical compositions, AAV particles of the present invention are formulated in depots for extended release. Generally, specific organs or tissues (“target tissues”) are targeted for administration.

[0435] In some aspects of the invention, pharmaceutical compositions, AAV particles of the present invention are spatially retained within or proximal to target tissues. Provided are methods of providing pharmaceutical compositions, AAV particles, to target tissues of mammalian subjects by contacting target tissues (which comprise one or more target cells) with pharmaceutical compositions, AAV particles, under conditions such that they are substantially retained in target tissues, meaning that at least 10, 20, 30, 40, 50, 60, 70, 80, 85, 90. 95, 96, 97, 98. 99, 99.9, 99.99 or greater than 99.99% of the composition is retained in the target tissues. Advantageously, retention is determined by measuring the amount of pharmaceutical compositions, AAV particles, that enter one or more target cells. For example, at least 1%, 5%, 10%, 20%, 30%, 40%, 50%, 60%, 70%, 80%, 85%, 90%, 95%, 96%, 97%, 98%, 99%, 99.9%, 99.99%, or greater than 99.99% of pharmaceutical compositions, AAV particles, administered to subjects are present intracellularly at a period of time following administration. For example, intramuscular injection to mammalian subjects may be performed using aqueous compositions comprising pharmaceutical compositions, AAV particles of the present invention and one or more transfection reagents, and retention is determined by measuring the amount of pharmaceutical compositions, AAV particles, present in muscle cells.

[0436] Certain aspects of the invention are directed to methods of providing pharmaceutical compositions, AAV particles of the present invention to a target tissues of mammalian subjects, by contacting target tissues (comprising one or more target cells) with pharmaceutical compositions, AAV particles under conditions such that they are substantially retained in such target tissues. Pharmaceutical compositions, AAV particles comprise enough active ingredient such that the effect of interest is produced in at least one target cell. In some embodiments, pharmaceutical compositions, AAV particles generally comprise one or more cell penetration agents, although “naked” formulations (such as without cell penetration agents or other agents) are also contemplated, with or without pharmaceutieally acceptable carriers.

### Pulmonary Administration

[0437] In some embodiments, pharmaceutical compositions, AAV particles of the present invention may be prepared, packaged, and/or sold in formulations suitable for pulmonary administration. In some embodiments, such administration is via the buccal cavity. In some embodiments, formulations may comprise dry particles comprising active ingredients. In such embodiments, dry particles may have a. diameter in the range from about 0.5 nm to about 7 nm or from, about 1 nm to about 6 nm. In some embodiments, formulations may be in the form of dry powders for administration using devices comprising dry powder reservoirs to which streams of propellant may be directed to disperse such powder. In some embodiments, self-propelling solvent/powder dispensing containers may be used. In such embodiments, active ingredients may be dissolved and/or suspended in low-boiling propellant in sealed containers. Such powders may comprise particles wherein at least 98% of the particles by weight have diameters greater than 0.5 nm find at least 95% of the particles by number have diameters less than 7 nm. Alternatively, at least 95% of the particles by weight have a diameter greater than 1 nm and at least 90% of the particles by number have a diameter less than 6 nm. Dry powder compositions may include a solid fine powder diluent such as sugar and are conveniently provided in a unit dose form.

[0438] Low boiling propellants generally include liquid propellants having a boiling point of below 65° F. at atmospheric pressure. Generally, propellants may constitute 50% to 99.9% (w/w) of the composition, and active ingredient may constitute 0.1% to 20% (w/w) of the composition. Propellants may further comprise additional ingredients such as liquid non-ionic and/or solid anionic surfactant and/or solid diluent (which may have particle sizes of the same order as particles comprising active ingredients).

[0439] Pharmaceutical compositions formulated for pulmonary delivery may provide active ingredients in the form of droplets of solution and/or suspension. Such formulations may be prepared, packaged, and/or sold as aqueous and/or dilute alcoholic solutions and/or suspensions, optionally sterile, comprising active ingredients, and may conveniently be administered using any nebulization and/or atomization device. Such formulations may further comprise one or more additional ingredients including, but not limited to, a flavoring agent such as saccharin sodium, a volatile oil, a buffering agent, a surface active agent, and/or a preservative such as methyihydroxybenzoate. Droplets provided by this route of administration may have an average diameter in the range from about 0.1 nm to about 200 nm.

### Intranasal, Nasal and Buccal Administration

[0440] In some embodiments, pharmaceutical compositions, AAV particles of the present invention may be administered nasally and/or intranasal. In some embodiments, formulations described herein useful for pulmonary delivery may also be useful for intranasal delivery. In some embodiments, formulations for intranasal administration comprise a coarse powder comprising the active ingredient and having an average particle from about 0.2 μm to 500 μm. Such formulations are administered in the manner in which snuff is taken, i.e. by rapid inhalation through the nasal passage from a container of the powder held close to the nose.

[0441] Formulations suitable for nasal administration may, for example, comprise from about as little as 0.1% (w/w) and as much as 100% (w/w) of active ingredient, and may comprise one or more of the additional ingredients described herein. A pharmaceutical composition may be prepared, packaged, and/or sold in a formulation suitable for buccal administration. Such formulations may, for example, be in the form of tablets and/or lozenges made using conventional methods, and may, for example, 0.1% to 20% (w/w) active ingredient, the balance comprising an orally dissolvable and/or degradable composition and. optionally, one or more of the additional ingredients described herein. Alternately, formulations suitable for buccal administration may comprise powders and/or an aerosolized and/or atomized solutions and/or suspensions comprising active ingredients. Such powdered, aerosolized, and/or aerosolized formulations, when dispersed, may comprise average particle and/or droplet sizes in the range of from about 0.1 nm to about 200 nm, and may further comprise one or more of any additional ingredients described herein.

### Ophthalmic or Otic Administration

[0442] In some embodiments, pharmaceutical compositions, AAV particles of the present invention may be prepared, packaged, and/or sold in formulations suitable for ophthalmic and/or otic administration. Such formulations may, for example, be in the form of eye and/or ear drops including, for example, a 0.1/1.0% (w/w) solution and/or suspension of the active ingredient in aqueous and/or oily liquid excipients. Such drops may further comprise buffering agents, salts, and/or one or more other of any additional ingredients described herein. Other ophthalmically-admimstrable formulations which are useful include those which comprise active ingredients in microcrystalline form and/or in liposomal preparations. Subretinal inserts may also be used as forms of administration.

### Delivery

[0443] In one embodiment, the AAV particles or pharmaceutical compositions of the present invention may be administered or delivered using the methods for treatment of disease described in U.S. Pat. No. 8,999,948, or International Publication No. WO2014178863, the contents of which are herein incorporated by reference in their entirety.

[0444] In one embodiment, the AAV particles or pharmaceutical compositions of the present invention may be administered or delivered using the methods for delivering gene therapy in Alzheimer's Disease or other neurodegenerative conditions as described, in US Application No. 20150126590, the contents of which are herein incorporated by reference in their entirety.

[0445] In one embodiment, the AAV particles or pharmaceutical compositions of the present invention may be administered or delivered using the methods for delivery of a CNS gene therapy as described in U.S. Pat. Nos. 6,436,708, and 8,946,152, and International Publication No. WO2015168666, the contents of which are herein incorporated by reference in their entirety.

[0446] In one embodiment, the AAV particle or pharmaceutical compositions of the present, invention may be administered or delivered using the methods for delivering proteins using AAV vectors described in European Patent Application No. EP2678433, the contents of which are herein incorporated by reference in their entirety.

[0447] In one embodiment, the AAV particle or pharmaceutical compositions of the present invention may be administered or delivered using the methods for delivering DNA to the bloodstream described in U.S. Pat. No. 6,211,163, the contents of which are herein incorporated by reference in their entirety.

[0448] In one embodiment, the AAV particle or pharmaceutical compositions of the present invention may be administered or delivered using the methods for delivering a payload to the central nervous system described in U.S. Pat. No. 7,588,757, the contents of which are herein incorporated by reference in their entirety.

[0449] In one embodiment, the AAV particle or pharmaceutical compositions of the present invention may be administered or delivered using the methods for delivering a payload described in U.S. Pat. No. 8,283,151, the contents of which are herein incorporated by reference in their entirety.

[0450] In one embodiment, the AAV particle or pharmaceutical compositions of the present invention may be administered or delivered using the methods for delivering a payload using a glutamic acid decarboxylase (GAD) delivery vector described in International Patent Publication No. WO2001089583, the contents of which are herein incorporated by reference in their entirety.

[0451] In one embodiment, the AAV particle or pharmaceutical compositions of the present invention may be administered or delivered using the methods for delivering a payload to neural cells described in International Patent Publication No. WO2012057363, the contents of which are herein incorporated by reference in their entirety.

### Delivery to Cells

[0452] The present disclosure provides a method of delivering to a cell or tissue any of the above-described AAV particles, comprising contacting the cell or tissue with said AAV particle or contacting the cell or tissue with a, formulation comprising said AAV particle, or contacting the cell or tissue with any of the described compositions, including pharmaceutical compositions. The method of delivering the AAV particle to a cell or tissue can be accomplished in vitro, ex vivo, or in vivo.

### Delivery to Subjects

[0453] The present disclosure additionally provides a method of delivering to a subject, including a mammalian subject, any of the above-described AAV particles comprising administering to the subject said AAV particle, or administering to the subject a formulation comprising said AAV particle, or administering to the subject any of the described compositions, including pharmaceutical compositions.

### Dose and Regimen

[0454] The present invention provides methods of administering AAV particles in accordance with the invention to a subject in need thereof. The pharmaceutical, diagnostic, or prophylactic AAV particles and compositions of the present invention may be administered to a subject using any amount and any route of administration effective for preventing, treating, managing, or diagnosing diseases, disorders and/or conditions. The exact amount required will vary from subject to subject, depending on the species, age, and general condition of the subject, the severity of the disease, the particular composition, its mode of administration, its mode of activity, and the like. The subject may be a human, a mammal, or an animal. Compositions in accordance with the invention are typically formulated in unit dosage form for ease of administration and uniformity of dosage. It will be understood, however, that the total daily usage of the compositions of the present invention may be decided by the attending physician within the scope of sound medical judgment. The specific therapeutically effective, prophylactically effective, or appropriate diagnostic dose level for any particular individual will depend upon a variety of factors including the disorder being treated and the severity of the disorder; the activity of the specific payload employed; the specific composition employed; the age, body weight, general health, sex and diet of the patient; the time of administration, route of administration, and rate of excretion of the specific AAV particle employed, the duration of the treatment; drugs used in combination or coincidental with the specific AAV particle employed; and like factors well known in the medical arts.

[0455] In certain embodiments, AAV particle pharmaceutical compositions in accordance with the present invention may be administered at dosage levels sufficient to deliver from about 0.0001 mg/kg to about 100 mg/kg, from about 0.001 mg/kg to about 0.05 mg/kg, from about 0.005 mg/kg to about 0.05 mg/kg, from about 0.001 mg/kg to about 0.005 mg/kg, from about 0.0.5 mg/kg to about 0.5 mg/kg, from about 0.01 mg/kg to about 50 mg/kg, from about 0.1 mg/kg to about 40 mg/kg, from about 0.5 mg/kg to about 30 mg/kg, from about 0.01 mg/kg to about 10 mg/kg, from about 0.1 mg/kg to about 10 mg/kg, or from about 1 mg/kg to about 25 mg/kg, of subject body weight per day, one or more times a day, to obtain the desired therapeutic, diagnostic, or prophylactic, effect. It will be understood that the above dosing concentrations may be converted to vg or viral genomes per kg or into total viral genomes administered by one of skill in the art.

[0456] In certain embodiments, AAV particle pharmaceutical compositions in accordance with the present disclosure may be administered at about 10 to about 600 μl/site, 50 to about 500 μl/site, 100 to about 400 μl/site, 120 to about 300 μl/site, 140 to about 200 μl/site, about 160 μl/site. As non-limiting examples, AAV particles may be administered at 50 μl/site and/or 150 μl/site.

[0457] The desired dosage of the AAV particles of the present invention may be delivered only once, three times a day, two times a day, once a day, every other day, every third day, every week, every two weeks, every three weeks, or every four weeks. In certain embodiments, the desired dosage may be delivered using multiple administrations (e.g., two, three, four, five, six, seven, eight, nine, ten, eleven, twelve, thirteen, fourteen, or more administrations). When multiple administrations are employed, split dosing regimens such as those described herein may be used. As used herein, a “split dose” is the division of “single unit dose” or total daily dose into two or more doses, e.g., two or more administrations of the “single unit dose”. As used herein, a “single unit dose” is a dose of any therapeutic administered in one dose/at one time/single route/single point of contact, i.e., single administration event.

[0458] The desired dosage of the AAV particles of the present invention may be administered as “pulse dose” or as a “continuous flow”. As used herein, a “pulse dose” is a series of single unit doses of any therapeutic administered with a set frequency over a period of time. As used herein, a “continuous flow” is a dose of therapeutic administered continuously for a period of time in a single route/single point of contact, i.e., continuous administration event. A total daily dose, an amount given or prescribed in 24-hour period, may be administered by any of these methods, or as a combination of these methods, or by any other methods suitable for a pharmaceutical administration.

[0459] In one embodiment, delivery of the AAV particles of the present invention to a subject provides neutralizing activity to a subject. The neutralizing activity can be for at least 1 month, 2 months, 3 months, 4 months, 5 months, 6 months, 7 months, 8 months, 9 months, 10 months, 11months, 1 year, 13 months, 14 months, 15 months, 16 months, 17 months, 18 months, 19 months, 20 months, 20 months, 21 months, 22 months, 23 months, 2 years, 3 years, 4 years, 5 years, 6 years, 7 years, 8 years, 9 years, 10 years or more than 10 years,

[0460] In one embodiment, delivery of the AAV particles of the present invention results in minimal serious adverse events (SAEs) as a result of the delivery of the AAV particles.

[0461] In one embodiment, delivery of AAV particles to cells of the central nervous system (e.g., parenchyma) may comprise a total dose between about 1×10⁶ VG and about 1×10¹⁶ VG. In some embodiments, delivery may comprise a total dose of about 1×10⁶, 2×10⁶, 3×10⁶, 4×10⁶, 5×10⁶, 6×10⁶, 7×10⁶, 8×10⁶, 9×10⁶, 1×10⁷, 2×⁷, 3×10⁷, 4×10⁷, 4×10⁷, 5×10⁷, 6×10⁷, 7×10⁷, 8×10⁷, 9×10⁷, 1×10⁸, 2×10⁸, 3×10⁸, 4×10⁸, 5×10⁸, 5×10⁸, 6×10⁸, 7×10⁸, 8×10⁸, 9×10⁸, 1×10⁹, 2×10⁹, 3×10⁹, 4×10⁹, 5×10⁹, 6×10⁹, 7×10⁹, 8×10⁹, 9×10⁹, 1×10¹⁰, 1.9×10¹⁰, 2×10¹⁰, 3×10¹⁰, 3.73×10¹⁰, 4×10¹⁰, 5×10¹⁰, 6×10¹⁰, 7×10¹⁰, 8×10¹⁰, 9×10¹¹, 1×10¹¹, 2×10¹¹, 2.5×10¹¹, 3×10¹¹, 4×10¹¹, 5×10¹¹, 6×10¹¹, 7×10¹¹, 8×10¹¹, 9×10¹¹, 1×10¹², 2×10¹², 3×10¹², 4×10¹², 5×10¹², 6×10¹², 7×10¹², 8×10¹², 9×10¹², 1×10¹³, 2×10¹³, 3×10¹³, 4×10¹³, 5×10¹³, 6×10¹³, 7×10¹³, 8×10¹³, 9×10¹³, 1×10¹⁴, 2×10¹⁴, 3×10¹⁴, 4×10¹⁴, 5×10¹⁴, 6×10¹⁴, 7×10¹⁴, 8×10¹⁴, 9×10¹⁴, 1×10¹⁵, 2×10¹⁵, 3×10¹⁵, 4×10¹⁵, 5×10¹⁵, 6×10¹⁵, 7×10¹⁵, 8×10¹⁵, 9×10¹⁵, or 1×10¹⁶ VG. As a non-limiting example, the total dose is 1×10¹⁵ VG. As another non-limiting example, the total dose is 2.1×10¹² VG.

[0462] In one embodiment, delivery of AAV particles to cells of the central nervous system (e.g., parenchyma) may comprise a composition concentration between about 1×10⁶ VG/mL and about 1×10¹⁶ VG/mL. In some embodiments, delivery may comprise a composition concentration of about VG mL. 1×10 ⁶, 2×10⁶, 3×10⁶, 4×10⁶, 5×10⁶, 6×10⁶, 7×10⁶, 8×10⁶, 9×10⁶, 1×10⁷, 2×10⁷, 3×10⁷, 4×10⁷, 5×10⁷, 6×10⁷, 7×10⁷, 8×10⁷, 9×10⁷, 1×10⁸, 2×10⁸, 3×10⁸, 4×10⁸, 5×10⁸, 6×10⁸, 7×10⁸, 8×10⁸, 9×10⁸, 1×10⁹, 2×10⁹, 3×10⁹, 4×10⁹, 5×10⁹, 6×10⁹, 7×10⁹, 8×10⁹, 9×10⁹, 1×10¹⁰, 2×10¹⁰, 3×10¹⁰, 4×10¹⁰, 5×10¹⁰, 6×10¹⁰, 7×10¹⁰, 8×10¹⁰, 9×10¹⁰, 1×10¹¹, 2×10¹¹, 3×10¹¹, 4×10¹¹, 5×10¹¹, 6×10¹¹, 7×10¹¹, 8×10¹¹, 9×10¹¹, 1×10¹², 2×10¹², 3×10¹², 4×10¹², 5×10¹², 6×10¹², 7×10¹², 8×10¹², 9×10¹², 1×10¹³, 2×10¹³, 3×10¹³, 4×10¹³, 5×10¹³, 6×10¹³, 7×10¹³, 8×10¹³, 9×10¹³, 1×10¹⁴, 2×10¹⁴, 3×10¹⁴, 4×10¹⁴, 5×10¹⁴, 6×10¹⁴, 7×10¹⁴, 8×10¹⁴, 9×10¹⁴, 1×10¹⁵, 2×10¹⁵, 3×10¹⁵, 4×10¹⁵, 5×10¹⁵, 6×10¹⁵, 7×10¹⁵, 8×10¹⁵, 9×10¹⁵, or 1×10¹⁶ VG/mL. In one embodiment, the delivery comprises a composition concentration of 1×10¹³ VG/mL. In one embodiment, the delivery comprises a composition concentration of 2.1×1012 VG/mL.

### Combinations

[0463] The AAV particles may be used in combination with one or more other therapeutic, prophylactic, research or diagnostic agents. By “in combination with,” it is not intended to imply that the agents must be administered at the same time and/or formulated for delivery together, although these methods of delivery are within the scope of the present invention. Compositions can be administered concurrently with, prior to, or subsequent to, one or more other desired therapeutics or medical procedures. In general, each agent will be administered at a dose and/or on a time schedule determined for that agent. In some embodiments, the present disclosure encompasses the delivery of pharmaceutical, prophylactic, research, or diagnostic compositions in combination with agents that may improve their bioavailability, reduce and/or modify their metabolism, inhibit their excretion, and/or modify their distribution within the body.

### Measurement of Expression

[0464] Expression of pay loads from viral genomes may be determined using various methods known in the art such as, but not limited to immunochemistry (e.g., 1HC), in situ hybridization (ISH), enzyme-linked immunosorbent assay (ELISA), affinity ELISA, ELISPOT, flow cytometry, immunocytology, surface plasmon resonance analysis, kinetic exclusion assay, liquid chromatography-mass spectrometry (LCMS), high-performance liquid chromatography (HPLC), BCA assay, immunoelectrophoresis, Western blot, SDS-PAGE, protein immunoprecipitation, and/or PCR.

### Bioavailability

[0465] The AAV particles, when formulated into a composition with a delivery agent as described herein, can exhibit an increase in bioavailability as compared to a composition lacking a delivery agent as described herein. As used herein, the term “bioavailability” refers to the systemic availability of a given amount of AAV particle or expressed payload administered to a mammal. Bioavailability can be assessed by measuring the area under the curve (AUC) or the maximum serum or plasma concentration (Cₘₐₓ) of the composition following. AUC is a determination of the area under the curve plotting the serum or plasma concentration of a compound (e.g., AAV particles or expressed payloads) along the ordinate (Y-axis) against time along the abscissa (X-axis). Generally, the AUC for a particular compound can be calculated using methods known to those of ordinary skill in the art and as described in G. S. Banker, Modern Pharmaceutics, Drugs and the Pharmaceutical Sciences, v. 72, Marcel Dekker, New York, Inc., 1996, the contents of which are herein incorporated by reference in its entirety.

[0466] The Cₘₐₓ value is the maximum concentration of the AAV particle or expressed payload achieved in the serum or plasma of a mammal following administration of the AAV particle to the mammal. The Cₘₐₓ value of can be measured using methods known to those of ordinary skill in the art. The phrases “increasing bioavailability” or “improving the pharmacokinetics,” as used herein mean that the systemic availability of a first AAV particle or expressed payload, measured as AUC, Cₘₐₓ, or Cₘᵢₙ in a mammal is greater, when co-administered with a delivery- agent as described herein, than when such co-administration does not take place. In some embodiments, the bioavailability can increase by at least about 2%, at least about 5%, at least about 10%, at least about 15%, at least about 20%, at least about 25%, at least about 30%, at least about 35%, at least about 40%, at least about 45%, at least about 50%, at least about 55%, at least about 60%, at least about 65%, at least about 70%, at least about 75%, at least about 80%, at least about 85%, at least about 90%, at least about 95%, or about 100%.

### Therapeutic Window

[0467] As used herein “therapeutic window” refers to the range of plasma concentrations, or the range of levels of therapeutically active substance at the site of action, with a high probability of eliciting a therapeutic effect. In some embodiments, the therapeutic window of the AAV particle as described herein can increase by at least about 2%, at least about 5%, at least about 10%, at least about 15%, at least about 20%, at least about 25%, at least about 30%, at least about 35%, at least about 40%, at least about 45%, at least about 50%, at least about 55%, at least about 60%, at least about 65%, at least about 70%, at least about 75%, at least about 80%, at least about 85%, at least about 90%, at least about 95%, or about 100%.

### Volume of Distribution

[0468] As used herein, the term “volume of distribution” refers to the fluid volume that would be required to contain the total amount of the drug in the body at the same concentration as in the blood or plasma: V_{dist} equals the amount of drug in the body/concentration of drug in blood or plasma. For example, for a 10 mg dose and a plasma concentration of 10 mg/L, the volume of distribution would be 1 liter. The volume of distribution reflects the extent to which the drug is present in the extravascular tissue. A large volume of distribution reflects the tendency of a compound to bind to the tissue components compared with plasma protein binding. In a clinical setting, V_{dist} can be used to determine a loading dose to achieve a steady state concentration. In some embodiments, the volume of distribution of the AAV particles as described herein can decrease at least about 2%, at least about 5%, at least about 10%, at least about 15%, at least about 20%, at least about 25%, at least about 30%, at least about 35%, at least about 40%, at least, about 45%, at least about 50%, at least about 55%, at least about 60%, at least about 65%, at least about 70%.

### Biological Effect

[0469] In one embodiment, the biological effect of the AAV particles delivered to the animals may be categorized by analyzing the payload expression in the animals. The payload expression may be determined from analyzing a biological sample collected from a mammal administered the AAV particles of the present invention. For example, a protein expression of 50-200 pg/ml for the protein encoded by the AAV particles delivered to the mammal may be seen as a therapeutically effective amount of protein in the mammal.

### IV. METHODS AND USES OF THE COMPOSITIONS OF THE INVENTION

[0470] The present disclosure provides a method for treating a disease, disorder and/or condition in a mammalian subject, including a human subject, comprising administering to the subject any of the AAV particles described herein or administering to the subject any of the described compositions, including pharmaceutical compositions, described herein.

[0471] In one embodiment, the AAV particles of the present invention are administered to a subject prophylacticaliy.

[0472] In one embodiment, the AAV particles of the present invention are administered to a subject having at least one of the diseases described herein.

[0473] In one embodiment, the AAV particles of the present invention are administered to a subject to treat a disease or disorder described herein. The subject may have the disease or disorder or may be at-risk to developing the disease or disorder.

[0474] In one embodiment, the AAV particles of the present invention are part of an active immunization strategy to protect against diseases and disorders, in an active immunization strategy, a vaccine or AAV particles are administered to a subject to prevent an infectious disease by activating the subject's production of antibodies that can light off invading bacteria or viruses.

[0475] In one embodiment, the AAV particles of the present invention are part of a passive immunization strategy. In a passive immunization strategy, antibodies against a particular infectious agent are given directly to the subject.

[0476] In one embodiment, the AAV particles of the present invention may be used for passive immunotherapy of tauopathy, (e.g. Alzheimer Disease or Frontotemporal Dementia), as described in Liu et al, the contents of which are herein incorporated by reference in their entirety (Liu, W et al., 2016 J Neurosci 36(49):12425-12435). As a non-limiting example, the AAV particles of the present invention may encode a PHF1 antibody. Heavy and light chains of the PHFi antibody may be linked by a Tav2A and/or Furin 2A linker sequence. Antibody expression may be under the control of a CAG promoter. The AAV particle may comprise, as a non-limiting example, an AAVrh.10 serotype capsid. Further, these PHF1 encoding AAV particles may be administered by bilateral intraparenchymal delivery directly to the hippocampus. Such treatment with AAV-PHF1 may result in a 50-fold increase in antibody levels in the hippocampus as compared to antibody levels subsequent to systemic administration. Neuropathological tau species in the hippocampus may be reduced as much as 80-90% and hippocampal atrophy may be fully rescued alter treatment with AAV particles of the present invention.

[0477] In one embodiment, the AAV particles of the present invention may be used to treat tauopathy as described in Ising et al, the contents of which are herein incorporated by reference in their entirety (Ising. C et al., 2017 J Exp Med April 17, Epub ahead of print). As a non-limiting example, the AAV particles of the present invention may encode an HJ8.5, HJ8.7, or Tau5 antibody or a single chain variable fragment (scFv) derived therefrom. Heavy and light chains of the HJ8.5 antibody or scFv may be linked by variable length linker sequences and may be flexible glycine and/or serine linkers. The AAV particle may comprise, as anon-limiting example, an AAV2/8 serotype. Further, these HJ8.5, HJ8.7 or Tau5 encoding AAV particles may be administered by bilateral intracerebroventricular delivery. Such treatment with HJ8.5, HJ8.7 or Tau5 encoding AAV particles may result in a significant reduction in neuropathological tau species in the hippocampus.

### Diseases and Toxins

[0478] Various infectious diseases may be treated with pharmaceutical compositions. AAV particles, of the present invention. As used herein, the term “infectious disease” refers to any disorders caused by organisms such as bacteria, viruses, fungi or parasites. As a non-limiting example, the infectious disease may be Acute bacterial rhinosinusitis, 14-day measles. Acne, Acrodermatitis chronica atrophicans (ACA)-(Iate skin manifestation of latent Lyme disease), Acute hemorrhagic conjunctivitis, Acute hemorrhagic cystitis. Acute rhinosinusitis, Adult T-cell Leukemia-Lymphoma ( ATLL), African Sleeping Sickness, AIDS (Acquired Immunodeficiency Sydrome), Alveolarhydatid. Amebiasis, Amebic meningoencephalitis, Anaplasmosis, Anthrax, Arboviral or parainfectious, Ascariasis—(Roundworm infections), Aseptic meningitis. Athlete's foot (Tinea pedis), Australian tick typhus, Avian Influenza, Babesiosis, Bacillary angiomatosis, Bacterial meningitis, Bacterial vaginosis, Balanitis, Balantidiasis, Bang's disease, Barmah Forest vims infection, Bartonellosis (Verruga peruana; Carrion's disease; Oroya fever), Bat Lyssavirus Infection, Bay sore (Chiclero's ulcer), Baylisascaris infection (Racoon roundworm infection), Beaver fever, Beef tapeworm, Bejel (endemic syphilis), Biphasic meningoencephalitis, Black Bane, Black death. Black piedra, Blackwater Fever, Blastomycosis, Blennorrhea of the newborn, Blepharitis, Boils, Bomholm disease (pleurodynia), Borrelia miyamotoi Disease, Botulism, Boutonneuse fever, Brazilian purpuric fever, Break Bone fever, Brill, Bronchiolitis, Bronchitis, Brucellosis (Bang's disease ), Bubonic plague, Bullous impetigo, Burkholderia mallei (Glanders), Burkholderia pseudomallei (Melioidosis), Buruli ulcers (also Mycoburuli ulcers), Busse, Busse-Buschke disease (Cryptococcosis), California group encephalitis, Campylobacteriosis, Candidiasis, Canefield fever (Canicola fever; 7-day fever; Weil's disease; leptospirosis; canefield fever), Canicola fever, Capillariasis, Carate, Carbapenem-resi stant Enterobacteriaceae (CRE), Carbuncle, Carrion's disease, Cat Scratch fever, Cave disease, Central Asian hemorrhagic fever, Central European tick, Cervical cancer, Chagas disease. Chancroid (Soft chancre), Chicago disease, Chickenpox (Varicella), Chiclero's ulcer, Chikungunya fever, Chlamydial infection, Cholera, Chromoblastomycosis, Ciguatera, Clap, Clonorchiasis (Liver fluke infection), (Clostridium Difficile Infection, ClostriDium Perfringens (Epsilon Toxin), Coccidioidomycosis fungal infection (Valley fever; desert rheumatism), Coenurosis, Colorado tick fever, Condyloma accuminata, Condyloma accuminata (Warts), Condyloma lata, Congo fever, Congo hemorrhagic fever virus, Conjunctivitis, cowpox, Crabs, Crimean, Croup, Cryptococcosis, Cryptosporidiosis (Crypto), (Cutaneous Larval Migrans, Cyclosporiasis, (Cystic hydatid, Cysticercosis, Cystitis, Czechoslovak tick, D68 (EV-D68), Dacryocytitis, Dandy fever. Darling's Disease, Deer fly fever, Dengue fever (1, 2, 3, and 4), Desert rheumatism. Devil's grip, Diphasic milk fever, Diphtheria, Disseminated Intravascular Coagulation, Dog tapeworm, Donovanosis, Donovanosis (Granuloma inguinale), Dracontiasis, Dracunculosis, Duke's disease. Dum Dum Disease, Durand-Nicholas-Favre disease, Dwarf tapeworm, E. Coli infection (E.Coli), Eastern equine encephalitis, Ebola Hemorrhagic Fever (Ebola vims disease EVD), Ectothrix, Ehrlichiosis (Sennetsu fever), Encephalitis, Endemic Relapsing fever, Endemic syphilis, Endophthalmitis, Endothrix, Enterobiasis (Pinwonn infection), Enterotoxin—B Poisoning (Staph Food Poisoning), Enterovirus Infection, Epidemic Keratoconjunctivitis, Epidemic Relapsing fever, Epidemic typhus, Epiglottitis, Erysipelis, Erysipeloid (Erysipelothricosis), Erythema chronicum migrans, Erythema infectiosum, Erythema marginatum, Erythema multiforme, Erythema nodosum, Erythema nodosum leprosum, Erythrasma, Espundia, Eumycotic mycetoma, European blastomycosis, Exanthem subitum (Sixth disease), Eyevvorm, Far Eastern tick, Fascioliasis, Fievre boutonneuse (Tick typhus), Fifth Disease (erythema infectiosum), Filatow—Dukes' Disease (Scalded Skin Syndrome; Ritter's Disease), Fish tapeworm, Fitz-Hugh-Curtis syndrome—Perihepatitis, Flinders Island Spotted Fever, Flu (Influenza), Folliculitis, Four Corners Disease, Four Corners Disease (Human Pulmonary Syndrome (HPS)), Frambesia, Francis disease, Furunculosis, Gas gangrene, Gastroenteritis, Genital Herpes, Genital Warts, German measles, Gerstmann-Straussler-Scheinker (GSS), Giardiasis, Gilclirist's disease, Gingivitis, Gingivostomatitis, Glanders, Glandular fever (infectious mononucleosis), Gnatbostomiasis, Gonococcal Infection (Gonorrhea), Gonorrhea, Granuloma inguinale (Donovanosis), Guinea Worm, Haemophilus Influenza disease, Hamburger disease, Hansen's disease—leprosy, Hantaan disease, Hantaan-Korean hemorrhagic fever, Hantavirus Pulmonary Syndrome, Hantavirus Pulmonary Syndrome (HPS), Hard chancre, Hard measles, Haverhill fever—Rat bite fever, Head and Body Lice, Heartland fever, Helicobacterosis, Hemolytic Uremic Syndrome (HUS), Hepatitis A, Hepatitis B, Hepatitis C, Hepatitis D, Hepatitis E, Herpangina, Herpes—genital, Herpes labialis, Herpes—neonatal, Hidradenitis, Histoplasmosis, Histoplasmosis infection (Histoplasmosis), His-Werner disease, HIV infection, Hookworm infections, Hordeola, Hordeola (Stye), HTLV, HTLV—associated myelopathy (HAM), Human granulocytic ehrlichiosis, Human monocytic ehrlichiosis, Human Papillomanvus (HPV), Hitman Pulmonary Syndrome, Hydatid cyst, Hydrophobia, Impetigo, Including congenital (German Measles), Inclusion conjunctivitis, Inclusion conjunctivitis—Swimming Pool conjunctivitis—Pannus, Infantile diarrhea, Infectious Mononucleosis, Infectious myocarditis, Infectious pericarditis, Influenza, Isosporiasis, Israeli spotted fever, Japanese Encephalitis, Jock itch, Jorge Lobo disease—lobomycosis, Jungle yellow fever, Junin Argentinian hemorrhagic fever, Kala Azar, Kaposi's sarcoma, Keloidal blastomycosis, Keratoconjunctivitis, Kuru, Kyasanur forest disease, LaCrosse encephalitis, Lassa hemorrhagic fever, Legionellosis (Legionnaires Disease), Legionnaire's pneumonia, Lemierre's Syndrome (Postanginal septicemia), Lemming fever, Leprosy, Leptospirosis (Nanukayami fever; Weil's disease). Listeriosis (Listeria), Liver fluke infection, Lobo's mycosis, Lockjaw, Loiasis, Louping III, Ludwig's angina, Lung fluke infection, Lung fluke infection (Paragonimiasis), Lyme disease, Lymphogranuloma venereum infection (LGV), Machupo Bolivian hemorrhagic fever, Madura foot, Mal del pinto. Malaria, Malignant pustule, Malta fever, Marburg hemorrhagic fever, Masters disease, Maternal Sepsis (Puerperal fever), Measles, Mediterannean spotted fever, Melioidosis (Whitraore's disease), Meningitis, Meningococcal Disease, MERS, Milker's nodule, Molluscum contagiosum, Moniliasis, monkeypox, Mononucleosis, Mononucleosis-like syndrome, Montezuma's Revenge, Morbilli, MRSA (xnethicillin-resistant Staphylococcus aureus) infection, Mucormycosis-Zvgomycosis, Multiple Organ Dysfunction Syndrome or MODS, Multiple-system atrophy (MSA), Mumps, Murine typhus, Murray Valley Encephalitis(MVE), Mycoburuli ulcers, Mycoburuli ulcers—Buruli ulcers, Mycotic vulvovaginitis, Myositis, Nanukayami fever, Necrotizing fasciitis, Necrotizing fasciitis- Type 1, Necrotizing fasciitis—Type 2. Negislu, New world spotted fever, Nocardiosis, Nongonococcal urethritis, Non-Polio (Non-Polio Enterovirus), Norovirus infection, North American blastomycosis, North Asian tick typhus, Norwalk virus infection, Norwegian itch, O'Hara disease, Omsk hemorrhagic fever, Onchoceriasis, Onychomycosis, Opisthorchiasis, Opthalmia neonatorum, Oral hairy leukoplakia, Orf, Oriental Sore, Oriental Spotted Fever, Ornithosis (Parrot fever; Psittacosis), Oroya fever, Otitis externa, Otitis media, Pannus, Paracoccidioidomycosis, Paragonimiasis, Paralytic Shellfish Poisoning (Paralytic Shellfish Poisoning), Paronychia (Whitlow), Parotitis, PCP pneumonia, Pediculosis, Peliosis hepatica, Pelvic Inflammatory Disease, Pertussis (also called Whooping cough), Phaeobyphomycosis, Pliaryngocojunctival fever, Piedra (White Piedra), Piedra(Black Piedra), Pigbel, Pink eye conjunctivitis, Pinta, Pinworm infection, Pitted Keratolysis, Pityriasis versicolor (Tinea versicolor), Plague; Bubonic, Pleurodynia, Pneumococcal Disease, Pneumocystosis, Pneumonia, Pneumonic (Plague), Polio or Poliomyelitis. Polycystic hydatid, Pontiac fever, Pork tapeworm, Posada-Wernicke disease, Postangmal septicemia, Powassan, Progressive multifocal leukencephalopashy, Progressive Rubella Panencephalitis, Prostatitis, Pseudomembranous colitis, Psittacosis, Puerperal fever, Pustular Rash diseases (Small pox). Pyelonephritis, Pylephlebitis, Q-Fever, Quinsy, Quintana fever (5-day fever), Rabbit fever, Rabies, Racoon roundworm infection, Rat bite fever, Rat tapeworm, Reiter Syndrome, Relapsing fever, Respiratory syncytial virus (RSV) infection, Rheumatic fever, Rhodotorulosis, Ricin Poisoning, Rickettsialpox, Rickettsiosis, Rift Valley Fever, Ringworm, Ritter's Disease, River Blindness, Rocky Mountain spotted fever, Rose Handler's disease (Sporotrichosis), Rose rash of infants, Roseola, Ross River fever, Rotavirus infection, Roundworm infections, Rubella, Rubeola, Russian spring, Salmonellosis gastroenteritis, San Joaquin Valley fever, Sao Paulo Encephalitis, Sao Paulo fever, SARS, Scabies Infestation (Scabies) (Norwegian itch), Scalded Skin Syndrome, Scarlet fever (Scarlatina), Schistosomiasis, Scombroid, Scrub typhus, Sennetsu fever, Sepsis (Septic shock), Severe Acute Respiratory Syndrome, Severe Acute Respiratory Syndrome (SARS), Shiga Toxigenic Escherichia coli (STEC/VTEC), Shigellosis gastroenteritis (Shigella), Shinbone fever, Shingles, Shipping fever, Siberian tick typhus, Sinusitis, Sixth disease, Slapped cheek disease, Sleeping sickness, Smallpox (Variola), Snail Fever, Soft chancre, Southern tick associated rash illness, Sparganosis, Spelunker's disease, Sporadic typhus, Sporotrichosis, Spotted fever, Spring, St. Louis encephalitis, Staphylococcal Food Poisoning, Staphylococcal infection, Strep throat, Streptococcal Disease, Streptococcal Toxic-Shock Syndrome, Strongyloieiasis, Stye, Subacute Sclerosing Panencephalitis, Subacute Sclerosing Panencephalitis (SSPE), Sudden Acute Respiratory Syndrome, Sudden Rash, Swimmer's ear, Swimmer's Itch, Swimming Pool conjunctivitis, Sylvatic yellow fever, Syphilis, Systemic Inflammatory Response Syndrome (SIRS), Tabes dorsalis (tertiary syphilis), Taeniasis, Taiga encephalitis, Tanner's disease, Tapeworm infections, Temporal lobe encephalitis, Temporal lobe encephalitis, tetani (Lock jaw), Tetanus Infection, Threadworm infections, Thrush, Tick, Tick typhus, Tinea, barbae, Tinea capitis, Tinea corporis. Tinea cruris, Tinea manuum, Tinea nigra, Tmea pedis, Tinea unguium, Tinea versicolor, Torulopsosis, Torulosis, Toxic Shock Syndrome, Toxoplasmosis, transmissible spongioform (CJD), Traveler's diarrhea, Trench fever 5, Trichinellosis, Trichomoniasis, Trichomycosis axillaris, Trichuriasis, Tropical Spastic Paraparesis (TSP), Trypanosomiasis, Tuberculosis (TB), Tuberculousis, Tularemia, Typhoid Fever, Typhus fever, Ulcus molle, Undulant fever, Urban yellow fever, Urethritis, Vaginitis, Vaginosis, Vancomycin Intermediate (VISA), Vancomycin Resistant (VRSA), Varicella, Venezuelan Equine encephalitis, Verruga peruana, Vibrio cholerae (Cholera), Vibriosis (Vibrio), Vincent's disease or Trench mouth, Viral conjunctivitis, Viral Meningitis, Viral meningoencephalitis, Viral rash, Visceral Larval Migrans, Vomito negro, Vulvovaginitis, Warts, Waterhouse, Weil's disease, West Nile Fever, Western equine encephalitis, Whipple's disease, Whipworm infection, White Piedra, Whitlow, Whitmore's disease, Winter diarrhea, Wolhynia fever, Wool sorters' disease, Yaws, Yellow Fever, Yersinosis, Yersinosis (Yersinia), Zahorsky's disease, Zika virus disease. Zoster, Zygomycosis, John Cunningham Virus (JCV), Human immunodeficiency virus (HIV), Influenza virus, Hepatitis B, Hepatitis C, Hepatitis D, Respiratory syncytial virus (RSV), Herpes simplex virus 1 and 2, Human Cytomegalovirus, Epstein-Barr virus, Varicella zoster virus, Coronaviruses, Poxviruses, Enterovirus 71, Rubella virus, Human papilloma virus, Streptococcus pneumoniae, Streptococcus viridaris, Staphylococcus aureus (S. aureus), Methicillin-resistant Staphylococcus aureus (MRSA), Vancomycin-intermediate Staphylococcus aureus (VISA), Vancomycin-resistant Staphylococcus aureus (VRSA), Staphylococcus epidermidis (S. epidermidis), Clostridium Tetani, Bordetella pertussis, Bordetella paratussis, Mycobacterium, Francisella Tidarertsis, Toxoplasma gondii, Candida (C. albicans, C. glabrata, C. parapsilosis, C. tropicalis, C. krusei and C. lusitaniae), and/or any other infectious diseases, disorders, or syndromes.

[0479] Various toxins may be treated with the pharmaceutical compositions, AAV particles, of the present invention. Non-limited examples of toxins include Ricin, Bacillus anthracis, Shiga toxin and Shiga-like toxin, Botulinum toxins.

[0480] Various tropical diseases may be treated with pharmaceutical compositions, AAV particles, of the present invention. Non-limited examples of tropical diseases include Chikungunya fever, Dengue fever, Chagas disease, Rabies, Malaria, Ebola virus, Marburg virus, West Nile Virus, Yellow Fever, Japanese encephalitis virus, and St. Louis encephalitis virus.

[0481] Various foodbome illnesses and gastroenteritis may be treated with pharmaceutical compositions, AAV particles, of the present invention. Non-limited examples of foodbome illnesses and gastroenteritis include Rotavirus, Norwalk virus (Noro virus), Campylobacter jejuni, Clostridium difficile, Entamoeba histolytica, Helicobacter pyroli, Enterotoxin B of Staphylococcus aureus, Hepatitis A virus (HAV), Hepatitis E. Listeria monocytogenes, Salmonella, Clostridium perfringens, and Salmonella.

[0482] Various infectious agents may be treated with pharmaceutical compositions, AAV particles, of the present invention. Non-limited examples of infectious agents include adenoviruses, Anaplasma phagocytophilium, Ascaris lumbricoides, Bacillus anthracis, Bacillus cereus, Bacterlodes sp, Barmah Forest virus, Bartonella bacilliformis, Bartonella henselae, Bartonella quintam, beta-toxin of Clostridium perfringens, Bordetella pertussis, Bordetella parapertussis, Borrelia burgdorferi, Borrelia miyamotoi, Borrelia recurrentis, Borrelia sp., Botulinum toxin, Brucella sp., Burkholderia pseudomallei, California encephalitis virus, Campylobacter, Candida albicans, chikungunya virus, Chlamydiapsittaci, Chlamydia trachomatis, Clonorchis sinensis, Clostridium difficile bacteria, Clostridium tetani, Colorado tick fever virus, Corynebacterium diphtheriae, Corynebacterium minutissimum, Coxiella burneni, coxsackie A, coxsackie B, Crimean-Congo hemorrhagic fever virus, cytomegalovirus, dengue virus, Eastern Equine encephalitis virus, Ebola viruses, echovirus, Ehrlichia chaffeensis, Ehrlichia equi., Ehrlichia sp., Entamoeba histolytica, Enterobacter sp., Enterococcus feacalis, Enterovirus 71, Epstein-Barr virus (EBV), Erysipelothrix rhusiopathiae, Escherichia coli, Flavivirus, Fusobacterium necrophorum. Gardnerella vaginalis, Group B streptococcus, Haemophilus aegyptius, Haemophilus ducreyi, Haemophilus influenzae, hantavirus, Helicobacter pylori, Hepatitis A, Hepatitis B, Hepatitis C, Hepatitis D, Hepatitis E, herpes simplex virus 1 and 2, human herpes virus 6, human herpes Virus 8, human immunodeficiency virus 1 and 2, human T-cell leukemia viruses I and II, influenza viruses (A, B, C), Jamestown Canyon virus, Japanese encephalitis antigenic, Japanese encephalitis virus, John Cunningham virus, juninvirus, Kaposi's Sarcoma-associated Herpes Virus (KSHV), Klebsiella granuloniatis, Klebsiella sp., Kyasanur Forest Disease virus, La Crosse virus, Lassaviras, Legionella pneumophila, Leptospira interrogans, Listeria monocytogenes, lymphocytic choriomeningitis virus, lyssavirus, Machupovirus, Marburg virus, measles virus, MERS coronavirus (MERS-CoV) Micrococcus sedentarius, Mobiluncus sp., Molluscipoxvirus, Moraxella catarrhalis, Morbilli-Rubeola virus, Mumpsvirus, Mycobacterium leprae, Mycobacterium, tuberculosis, Mycobacterium ulcerans, Mycoplasma genitalium, Mycoplasma sp, Nairovirus, Neisseria gonorrhoeae, Neisseria meningitidis, Nocardia, Norwalk virus, norovirus, Omsk hemorrhagic fever virus, papillomavirus, parainfluenza viruses 1-3, parapoxvirus, parvovirus B19, Peptostreptococccus sp., Plasmodium sp., polioviruses types I, II, and III, Proteus sp., Pseudomonas aeruginosa, Pseudotnonas pseudomallei, Pseudomonas sp., rabies virus, respiratory syncytial virus, ricin toxin, Rickettsia australis, Rickettsia conori, Rickettsia honei, Rickettsia prowazekii, Ross River Virus, rotavirus, rubellavirus, Saint Louis encephalitis, Salmonella Typhi, Sarcoptes scabiei, SARS-associated coronavirus (SARS-CoV), Serratia sp., Shiga toxin and Shiga-like toxin, Shigella sp., Sin Nombre Virus, Snowshoe hare virus, Staphylococcus aureus, Staphylococcus epidermidis, Streptobacillus moniliformis, Streptoccoccus pneumoniae, Streptococcus agalactiae, Streptococcus agalactiae, Streptococcus group A-H, Streptococcus pneumoniae, Streptococcus pyogenes, Treponema pallidum subsp. Pallidum, Treponema pallidum var. carateum, Treponema pallidum var. endemicum, Tropheryma whippelii, Ureaplasma urealyticim, Varicella-Zoster virus, variola virus, Vibrio cholerae, West Nile virus, yellow fever virus, Yersinia enterocolitica, Yersinia pestis, and Zika virus.

[0483] Various rare diseases may be treated with pharmaceutical compositions, AAV particles, of the present invention. As used herein, the term “rare disease” refers to any disease that affects a small percentage of the population. As a non-limiting example, the rare disease may be Acrocephalosyndactylia, Acrodermatitis, Addison Disease, Adie Syndrome, Alagille Syndrome, Amylose, Amyotrophic Lateral Sclerosis, Angelraan Syndrome, Angiolymphoid Hyperplasia with Fosinophilia, Arnold-Chiari Malformation, Arthritis, Juvenile Rheumatoid, Asperger Syndrome, Bardet-Biedl Syndrome, Barrett Esophagus, Beckwith-Wiedemann Syndrome, Behcet Syndrome, Bloom Syndrome, Bowen's Disease, Brachial Plexus Neuropathies, Brown-Sequard Syndrome, Budd-Chiari Syndrome, Burkitt Lymphoma, Carcinoma 256, Walker, Caroli Disease, Charcot-Marie-Tooth Disease, Chediak-Higashi Syndrome, Chiari-Frommel Syndrome, Chondrodysplasia Punctata, Colonic Pseudo-Obstruction, Colorectal Neoplasms, Hereditary Nonpolyposis, Craniofacial Dysostosis, Creutzfeldt-Jakob Syndrome, Crohn Disease, Cushing Syndrome, Cystic Fibrosis, Dandy-Walker Syndrome, De Lange Syndrome, Dementia, Vascular, Dermatitis Herpetiformis, DiGeorge Syndrome, Diffuse Cerebral Sclerosis of Schilder, Duane Retraction Syndrome, Dupuytren Contracture, Ebstein Anomaly, Eisenmenger Complex, Ellis-Van Creveld Syndrome, Encephalitis, Enchondromatosis, Epidermal Necrolysis, Toxic. Facial Hemiatrophy, Factor XII Deficiency, Fanconi Anemia, Felty's Syndrome, Fibrous Dysplasia, Polyostotic, Fox-Fordyce Disease, Friedreich Ataxia, Fusobacterium, Gardner Syndrome, Gaucher Disease, Gerstmann Syndrome, Giant Lymph Node Hyperplasia, Glycogen Storage Disease Type I, Glycogen Storage Disease Type II, Glycogen Storage Disease Type IV, Glycogen Storage Disease Type V, Glycogen Storage Disease Type VII, Goldenhar Syndrome, Guillain-Barre Syndrome, Hallermann's Syndrome, Hamartoma Syndrome, Multiple, Hartnup Disease, Hepatolenticular Degeneration, Hepatolenticular Degeneration, Hereditary Sensory and Motor Neuropathy, Hirschsprung Disease, Histiocytic Necrotizing Lymphadenitis, Histiocytosis, Langerhans-Cell, Hodgkin Disease, Horner Syndrome, Huntington Disease, Hyperaldosteronism, Hyperhidrosis, Hyperostosis, Diffuse Idiopathic Skeletal, Hypopituitarism, Inappropriate ADH Syndrome, Intestinal Polyps, Isaacs Syndrome, Kartagener Syndrome. Kearns-Sayre Syndrome, Klippel-Feil Syndrome, Klippel-Trenaunay-Weber Syndrome, Kluver-Bucy Syndrome, Korsakoff Syndrome, Lafora Disease, Lambert-Eaton Myasthenic Syndrome, Landau-Kleffner Syndrome, Langer-Giedion Syndrome, Leigh Disease, Lesch-Nyhan Syndrome, Leukodystrophy, Globoid Cell, Li-Fraumeni Syndrome, Long QT Syndrome, Machado-Joseph Disease, Mallory-Weiss Syndrome. Marek Disease, Marfan Syndrome, Meckel Diverticulum, Meige Syndrome, Melkersson-Rosenthal Syndrome, Meniere Disease, Mikulicz' Disease, Miller Fisher Syndrome, Mobius Syndrome, Moyamoya Disease, Mucocutaneous Lymph Node Syndrome, Mucopolysaccharidosis I, Mucopolysaccharidosis II, Mucopolysaccharidosis III, Mucopolysaccharidosis IV, Mucopolysaccharidosis VI, Multiple Endocrine Neoplasia Type 1, Munchausen Syndrome by Proxy, Muscular Atrophy, Spinal, Narcolepsy, Neuroaxonal Dystrophies. Neuromyelitis Optica, Neuronal Ceroid-Lipofuscinoses, Niemann-Pick Diseases, Noonan Syndrome, Optic Atrophies, Hereditary, Osteitis Deformans, Osteochondritis, Osteochondrodysplasias, Osteolysis, Essential, Paget Disease Extramammaiy, Paget's Disease, Mammary, Panniculitis, Nodular Nonsuppurative, Papillon-Lefevre Disease, Paralysis, Pelizaeus-Merzbacher Disease, Pemphigus, Benign Familial, Penile Induration, Pericarditis, Constrictive, Peroxisomal Disorders, Peutz-Jeghers Syndrome, Pick Disease of the Brain, Pierre Robin Syndrome, Pigmentation Disorders, Pityriasis Lichenoides, Polycystic Ovary Syndrome, Polyendocrinopathies, Autoimmune, Prader-Willi Syndrome, Pupil Disorders, Rett Syndrome, Raye Syndrome, Rubinstein-Taybi Syndrome, Sandhoff Disease, Sarcoma, Ewing's, Schnitzler Syndrome, Sjogren's Syndrome, Sjogren-Larsson Syndrome, Smith-Lemli-Opitz Syndrome, Spinal Muscular Atrophies of Childhood, Sturge-Weber Syndrome, Sweating, Gustatory, Takayasu Arteritis, Tangier Disease, Tay-Sachs Disease, Thromboangiitis Obliterans, Thyroiditis, Autoimmune, Tietze's Syndrome, Togaviridae Infections, Tolosa-Hunt Syndrome, Tourette Syndrome, Uveomeningoencephalitic Syndrome, Waardenburg's Syndrome, Wegener Granulomatosis, Weil Disease, Werner Syndrome, Williams Syndrome, Wilms Tumor, Wolff-Parkinson-White Syndrome, Wolfram Syndrome, Wolraan Disease, Zellweger Syndrome, ZoIlinger-EIlison Syndrome, and von Willebrand Diseases.

[0484] Various autoimmune diseases and autoimmune-related diseases may be treated with pharmaceutical compositions, AAV particles, of the present invention. As used herein, the term “autoimmune disease” refers to a disease in which the body produces antibodies that attack its own tissues. As a non-limiting example, the autoimmune disease may be Acute Disseminated Encephalomyelitis (ADEM), Acute necrotizing hemorrhagic leukoencephalitis, Addison's disease. Agammaglobulinemia, Alopecia areata, Amyloidosis, Ankylosing spondylitis, Anti-GBM/Anti-TBM nephritis, Antiphospholipid syndrome (APS), Autoimmune angioedema, Autoimmune aplastic anemia, Autoimmune dysautonomia, Autoimmune hepatitis, Autoimmune hyperlipidemia, Autoimmune immunodeficiency, Autoimmune inner ear disease (AIED), Autoimmune myocarditis, Autoimmune oophoritis, Autoimmune pancreatitis, Autoimmune retinopathy, Autoimmune thrombocytopenic purpura (ATP), Autoimmune thyroid disease, Autoimmune urticaria, Axonal & neuronal neuropathies, Balo disease, Behcet's disease, Bullous pemphigoid, Cardiomyopathy, Castleraan disease, Celiac disease, Chagas disease. Chronic fatigue syndrome**, Chronic inflammatory demyelinating polyneuropathy (CIDP), Chronic recurrent multifocal ostomyelitis (CRMO), Churg-Strauss syndrome, Cicatricial pemphigoid/benign mucosal pemphigoid, Crohn's disease, Cogans syndrome, Cold agglutinin disease, Congenital heart block, Coxsackie myocarditis, CREST disease, Essential mixed cryoglobulinemia, Demyelinating neuropathies, Dermatitis herpetiformis, Derrnatomyositis, Devic's disease (neuromyelitis optica), Discoid lupus, Dressler's syndrome, Endometriosis, Eosinophilic esophagitis, Eosinophilic fasciitis, Erytherna nodosum, Experimental allergic encephalomyelitis, Evans syndrome, Fibromyalgia**, Fibrosing alveolitis, Giant cell arteritis (temporal arteritis), Giant cell myocarditis, Glomerulonephritis, Goodpasture's syndrome, Granulomatosis with Polyangiitis (GPA) (formerly called Wegener's Granulomatosis), Graves' disease, Guillain-Barre syndrome, Hashimoto's encephalitis, Hashimoto's thyroiditis, Hemolytic anemia, Henoch-Schonlein purpura, Herpes gestations, Hypogammaglobulinernia, Idiopathic thrombocytopenic purpura (ITP), IgA nephropathy, IgG4-related sclerosing disease, Tmmunoregulaioiy lipoproteins, Inclusion body myositis, Interstitial cystitis, Juvenile arthritis, Juvenile diabetes (Type 1 diabetes), Juvenile myositis, Kawasaki syndrome, Lambert-Eaton syndrome, Leukocytoclastic vasculitis, Lichen planus, Lichen sclerosus, Ligneous conjunctivitis, Linear IgA disease (LAD), Lupus (SLE), Lyme disease, chronic, Meniere's disease, Microscopic polyangiitis, Mixed connective tissue disease (MOD), Mooren's ulcer, Mucha-Habermann disease, Multiple sclerosis, Myasthenia gravis. Myositis, Narcolepsy, Neuromyelitis optica (Devic's), Neutropenia, Ocular cicatricial pemphigoid, Optic neuritis, Palindromic rheumatism, PANDAS (Pediatric Autoimmune Neuropsychiatric Disorders Associated with Streptococcus), Paraneoplastic cerebellar degeneration, Paroxysmal nocturnal hemoglobinuria (PNH), Parry Romberg syndrome, Parsonnage-Turner syndrome, Pars planitis (peripheral uveitis). Pemphigus, Peripheral neuropathy, Perivenous encephalomyelitis, Pernicious anemia, POEMS syndrome, Polyarteritis nodosa, Type I, II, & III autoimmune polyglandular syndromes, Polymyalgia rheumatica, Polymyositis, Postmyocardial infarction syndrome, Postpericardiotomy syndrome, Progesterone dermatitis, Primary biliary cirrhosis, Primary sclerosing cholangitis, Psoriasis, Psoriatic arthritis, Idiopathic pulmonary fibrosis, Pyoderma gangrenosum, Pure red cell aplasia, Raynauds phenomenon, Reactive Arthritis, Reflex sympathetic dystrophy, Reiter's syndrome, Relapsing polychondritis, Restless legs syndrome, Retroperitoneal fibrosis, Rheumatic fever, Rheumatoid arthritis, Sarcoidosis, Schmidt syndrome, Scleritis, Scleroderma, Sjogren's syndrome, Sperm & testicular autoimmunity, Stiff person syndrome, Subacute bacterial endocarditis (SBE), Susac's syndrome, Sympathetic ophthalmia, Takayasu's arteritis, Temporal arteritis/Giant cell arteritis, Thrombocy topenic purpura (TTP), Tolosa-Hurvt syndrome, Transverse myelitis, Ulcerative colitis, Undifferentiated connective tissue disease (UCTD), Uveitis, Vasculitis, Vesiculobullous dermatosis, Vitiligo, and Wegener's granulomatosis (now termed Granulomatosis with Polyangiitis (GPA).

[0485] Various kidney diseases may be treated with pharmaceutical compositions, AAV particles, of the present invention. As a non-limiting example, the kidney disease Abderhalden-Kaufmann-Lignac syndrome (Nephropathic Cystmosis), Abdominal Compartment Syndrome, Acute Kidney Failure/Acute Kidney Injury, Acute Lobar Nephroma, Acute Phosphate Nephropathy, Acute Tubular Necrosis, Adenine Phosphoribosyltransferase Deficiency, Adenovirus Nephritis, Alport Syndrome, Amyloidosis, ANCA Vasculitis Related to Endocarditis and Other Infections, Angiomyolipoma, Analgesic Nephropathy, Anorexia Nervosa and Kidney Disease, Angiotensin Antibodies and Focal Segmental Glomerulosclerosis, Antiphospholipid Syndrome, Anti-TNF-α Therapy-related Glomerulonephritis, APOL1 Mutations, Apparent Mineralocorticoid Excess Syndrome, Aristolochic Acid Nephropathy, Chinese Herbal Nephropathy, Balkan Endemic Nephropathy, Bartter Syndrome, Beeturia, β-Thalassernia Renal Disease, Bile Cast Nephropathy, BK Polyoma Virus Nephropathy in the Native Kidney, Bladder Rupture, Bladder Sphincter Dyssynergia, Bladder Tamponade, Border-Crossers' Nephropathy, Bourbon Virus and Acute Kidney Injury, Burnt Sugarcane Harvesting and Acute Renal Dysfunction, Byetta and Renal Failure, Clq Nephropathy, Cannabinoid Hyperemesis Acute Renal Failure, Cardiorenal syndrome, Carfilzomib-Indiced Renal Injury, CFHR5 nephropathy, Charcot-Marie-Tooth Disease with Glomerulopathy, Cherry Concentrate and Acute Kidney Injury, Cholesterol Emboli, Churg-Strauss syndrome, Chyluria, Colistin Nephrotoxicity, Collagenofibrotic Glomerulopathy, Collapsing Glomerulopathy, Collapsing Glomerulopathy Related to CMV, (Congenital Nephrotic Syndrome, Conorenal syndrome (Mainzer-Saldino Syndrome or Saldino-Mainzer Disease), Contrast Nephropathy, Copper Sulpfate Intoxication, Cortical Necrosis, Crizotinib-related Acute Kidney injury, Cryogiobuinemia, Crystalglobulin-Induced Nephropathy, Crystal-Induced Acute Kidney injury, Cystic Kidney Disease, Acquired, Cystinuria, Dasatinib-Induced Nephrotic-Range Proteinuria, Dense Deposit Disease (MPGN Type 2), Dent Disease (X-linked Recessive Nephrolithiasis), Dialysis Disequilibrium Syndrome, Diabetes and Diabetic Kidney Disease, Diabetes Insipidus, Dietary Supplements and Renal Failure, Drugs of Abuse and Kidney Disease, Duplicated Ureter, EAST syndrome, Ebola and the Kidney, Ectopic Kidney, Ectopic Ureter, Edema, Swelling, Erdheim-Chester Disease, Fabry's Disease, Familial Hypocalciuric Hypercalcemia, Fanconi Syndrome. Fraser syndrome, Fibronectin Glomerulopathy, Fibrillary Glomerulonephritis and Immunotactoid Glomerulopathy, Fraley syndrome, Focal Segmental Glomerulosclerosis, Focal Sclerosis, Focal Glomerulosclerosis, Galloway Mowaf syndrome, Giant Cell (Temporal) Arteritis with Kidney Involvement, Gestational Hypertension, Gitelman Syndrome, Glomerular Diseases, Glomerular Tubular Reflux, Glycosuria, Goodpasture Syndrome, Hair Dye Ingestion and Acute Kidney Injury. Hantavirus Infection Podocytopaihy, Hernaturia (Blood in Urine), Hemolytic Uremic Syndrome (HUS), Atypical Hemolytic Uremic Syndrome (aHUS), Hemophagocytic Syndrome, Hemorrhagic Cystitis, Hemorrhagic Fever with Renal Syndrome (HFRS, Hantavirus Renal Disease, Korean Hemorrhagic Fever, Epidemic Hemorrhagic Fever, Nephropathis Epidemica), Hemosiderosis related to Paroxysmal Nocturnal Hemoglobinuria and Hemolytic Anemia, Hepatic Glomerulopathy, Hepatic Veno-Occlusive Disease, Sinusoidal Obstruction Syndrome, Hepatitis C-Associated Renal Disease, Hepatorenal Syndrome, Herbal Supplements and Kidney Disease, High Blood Pressure and Kidney Disease, HIV-Associated Nephropathy (HIVAN), Horseshoe Kidney (Renal Fusion), Hunner's Ulcer, Hyperaldosteronism, Hypercalcernia, Hyperkalemia, Hypermagnesemia, Hypernatrenna, Hyperoxaluria, Hyperphosphatemia, Hypocalcemia, Hypokalemia, Hypokalemia-induced renal dysfunction, Hypokalemic Periodic Paralysis, Hypomagnesemia, Hyponatremia, Hypophosphatemia, IgA Nephropathy, IgG4Nephropathy, Interstitial Cystitis, Painful Bladder Syndrome (Questionnaire), Interstitial Nephritis, Ivemark's syndrome. Ketamine-Associated Bladder Dysfunction, Kidney Stones, Nephrolithiasis, Kombucha Tea Toxicity, Lead Nephropathy and Lead-Related Nephrotoxicity, Leptospirosis Renal Disease, Light Chain Deposition Disease, Monoclonal Immunoglobulin Deposition Disease, Liddle Syndrome, Lightwood-Albright Syndrome, Lipoprotein Glomerulopathy, Lithium Nephrotoxicity, LMX1B Mutations Cause Hereditary FSGS, Loin Pain Hematuria, Lupus, Systemic Lupus Erythematosis, Lupus Kidney Disease, Lupus Nephritis, Lupus Nephritis with Antieutrophil Cytoplasmic Antibody Seropositivity, Lyme Disease-Associated Glomerulonephritis, Malarial Nephropathy, Malignancy-Associated Renal Disease, Malignant Hypertension, Malakoplakia, Meatal Stenosis, Medullary Cystic Kidney Disease, Medullary Sponge Kidney, Megaureter, Melamine Toxicity and the Kidney. Membranoproliferative Glomerulonephritis, Membranous Nephropathy, MesoAmerican Nephropathy, Metabolic Acidosis, Metabolic Alkalosis, Methotrexate-related Renal Failure, Microscopic Polyangiitis, Milk-alkalai syndrome, Minimal Change Disease, MDMA (Molly; Ecstacy; 3,4-Methylenedioxymethamphetamine) and Kidney Failure, Multicystic dysplastic kidney, Multiple Myeloma, Myeloproliferative Neoplasms and Glomerulopathy, Nail-patella Syndrome, Nephrocalcinosis, Nephrogenic Systemic Fibrosis, Nephroptosis (Floating Kidney, Renal Ptosis), Nephrotic Syndrome, Neurogenic Bladder, Nodular Glomerulosclerosis, Non-Gonococcal Urethritis, Nutcracker syndrome, Orofaciodigital Syndrome, Orotic Aciduria, Orthostatic Hypotension, Orthostatic Proteinuria, Osmotic Diuresis, Ovarian Hyperstimulation Syndrome, Page Kidney, Papillary Necrosis, Papiliorenal Syndrome (Renal-Coloboma Syndrome, Isolated Renal Hypoplasia), Parvovirus B19 and the Kidney, The Peritoneal-Renal Syndrome, Posterior Urethral Valve, Post-infectious Glomerulonephritis, Post-streptococcal Glomerulonephritis, Polyarteritis Nodosa, Polycystic Kidney Disease, Posterior Urethral Valves, Preeclampsia, Propofol infusion syndrome, Proliferative Glomerulonephritis with Monoclonal IgG Deposits (Nasr Disease), Propolis (Honeybee Resin) Related Renal Failure, Proteinuria (Protein in Urine), Pseudohyperaldosteronism, Pseudohypobicarbonatemia, Pseudohypoparathyroidism, Pulmonary-Renal Syndrome, Pyelonephritis (Kidney infection), Pyonephrosis, Radiation Nephropathy, Ranolazine and the Kidney. Refeeding syndrome, Reflux Nephropathy, Rapidly Progressive Glomerulonephritis, Renal Abscess, Peripnephric Abscess, Renal Agenesis, Renal Arcuate Vein Microthrombi-Associated Acute Kidney Injury, Renal Artery Aneurysm, Renal Artery Stenosis, Renal Cell Cancer, Renal Cyst, Renal Hypouricemia with Exercise-induced Acute Renal Failure, Renal Infarction, Renal Osteodystrophy, Renal Tubular Acidosis, Renin Secreting Tumors (Juxtaglomerular Cell Tumor), Reset Osmostat, Retrocaval Ureter, Retroperitoneal Fibrosis, Rhabdomyolysis, Rhabdomyolysis related to Bariatric Sugery, Rheumatoid Arthritis-Associated Renal Disease, Sarcoidosis Renal Disease, Salt Wasting, Renal and Cerebral, Schistosomiasis and Glomerular Disease, Schimke immuno-osseous dysplasia, Scleroderma Renal Crisis, Serpentine Fibula-Poly cystic Kidney Syndrome, Exner Syndrome, Sickle Cell Nephropathy, Silica Exposure and Chronic Kidney Disease, Sri Lankan Farmers' Kidney Disease, Sjögren's Syndrome and Renal Disease, Synthetic Cannabinoid Use and Acute Kidney Injury, Kidney Disease Following Hematopoietic Cell Transplantation, Kidney Disease Related to Stem Cell Transplantation, Thin Basement Membrane Disease, Benign Familial Hematuria, Trigonitis, Tuberculosis, Genitourinary, Tuberous Sclerosis, Tubular Dysgenesis, Immune Complex Tubulointerstitial Nephritis Due to Autoantibodies to the Proximal Tubule Brush Border, Tumor Lysis Syndrome, Uremia, Uremic Optic Neuropathy, Ureteritis Cystica, Ureterocele, Urethral Caruncle, Urethral Stricture, Urinary Incontinence, Urinary Tract Infection, Urinary Tract Obstruction, Vesicointestinal Fistula, Vesicoureteral Reflux, Volatile Anesthetics and Acute Kidney Injury, Von Hippel-Lindau Disease, Waldenstrom's Macroglobulmemic Glomerulonephritis, Warfarin-Related Nephropathy, Wasp Stings and Acute Kidney Injury, Wegener's Granulomatosis, Granulomatosis with Polyangiitis, West Nile Virus and Chronic Kidney Disease, and Wunderlich syndrome.

[0486] Various cardiovascular diseases may be treated with pharmaceutical compositions, AAV particles, of the present invention. As a non-limiting example, the cardiovascular disease may be Ischemic heart disease also known as coronary artery disease, cerebrovascular disease (Stroke), Peripheral vascular disease, Heart failure, Rheumatic heart disease, and Congenital heart disease.

[0487] Various antibody deficiencies may be treated with pharmaceutical compositions, AAV particles, of the present invention. As a non-limiting example, the antibody deficiencies may be X-Lmked Agammaglobulinemia (XLA), Autosomal Recessive Agammaglobulinemia (ARA), Common Variable Immune Deficiency (CVID), IgG (IgG1, IgG2, IgG3 and IgG4) Subclass Deficiency, Selective IgA Deficiency, Specific Antibody Deficiency (SAD), Transient Hypogammaglobulinemia of Infancy, Antibody Deficiency with Normal or Elevated Immunoglobulins, Selective IgM Deficiency, Immunodeficiency with Thymoma (Good's Syndrome), Transcobalamin II Deficiency, Warts, Hypogammaglobulinemia, Infection, Myelokathexis (WHIM) Syndrome, Drug-Induced Antibody Deficiency, Kappa Chain Deficiency. Heavy Chain Deficiencies, Post-Meiotic Segregation (PMS2) Disorder, and Unspecified Hypogammaglobulinemia.

[0488] Various ocular diseases may be treated with pharmaceutical compositions, i.e. AAV particles, of the present invention. As a non-limiting example, the ocular disease may be thyroid eye disease (TED), Graves' disease (GD) and orbitopathy, Retina Degeneration, Cataract, optic atrophy, macular degeneration, Leber congenital amaurosis, retinal degeneration, cone-rod dystrophy, Usher syndrome, leopard syndrome, photophobia, and photoaversion.

[0489] Various neurological diseases may be treated with pharmaceutical compositions, AAV particles, of the present invention. As a non-limiting example, the neurological disease may be Absence of the Septum Pellucidum, Acid Lipase Disease, Acid Maltase Deficiency, Acquired Epileptiform Aphasia, Acute Disseminated Encephalomyelitis, Attention Deficit-Hyperactivity Disorder (ADHD), Adie's Pupil, Adie's Syndrome, Adrenoleukodystrophy, Agenesis of the Corpus Callosum, Agnosia, Aicardi Syndrome, Aicardi-Goutieres Syndrome Disorder, AIDS—Neurological Complications, Alexander Disease, Alpers' Disease, Alternating Hemiplegia, Alzheimer's Disease, Amyotrophic Lateral Sclerosis (ALS), Anencephaly, Aneurysm, Angelman Syndrome, Angiomatosis, Anoxia, Antiphospholipid Syndrome, Aphasia, Apraxia, Arachnoid Cysts, Arachnoiditis, Arnold-Chiari Malformation, Arteriovenous Malformation, Asperger Syndrome, Ataxia, Ataxia Telangiectasia, Ataxias and Cerebellar or Spinocerebellar Degeneration, Atrial Fibrillation and Stroke, Attention Deficit-Hyperactivity Disorder, Autism Spectrum Disorder, Autonomic Dysfunction, Back Pain, Barth Syndrome, Batten Disease, Becker's Myotonia, Behcet's Disease, Bell's Palsy, Benign Essential Blepharospasm, Benign Focal Amyotrophy, Benign Intracranial Hypertension, Bernhardt-Roth Syndrome, Binswanger's Disease, Blepharospasm, Bloch-Sulzberger Syndrome, Brachial Plexus Birth injuries, Brachial Plexus Injuries, Bradbury-Eggleston Syndrome, Brain and Spinal Tumors, Brain Aneurysm, Brain Injury, Brown-Sequard Syndrome, Bulbospinal Muscular Atrophy, Cerebral Autosomal Dominant Arteriopathy with Sub-cortical Infarcts and Leukoencephalopathy (CADASIL), Canavan Disease, Carpal Tunnel Syndrome, Causalgia, Cavenomas, Cavernous Angioma, Cavernous Malformation, Central Cervical Cord Syndrome, Central Cord Syndrome, Central Pain Syndrome, Central Pontine Myelinolysis, Cephalic Disorders, Ceramidase Deficiency, Cerebellar Degeneration, Cerebellar Hypoplasia, Cerebral Aneurysms, Cerebral Arteriosclerosis, Cerebral Atrophy, Cerebral Beriberi, Cerebral Cavernous Malformation, Cerebral Gigantism, Cerebral Hypoxia, Cerebral Palsy, Cerebro-Oculo-Facio-Skeletal Syndrome (COFS), Charcot-Mane-Tooth Disease, Chiari Malformation, Cholesterol Ester Storage Disease, (Chorea, Choreoacanthocytosis, Chronic Inflammatory Demyelinating Polyneuropathy (CIDP), Chronic Orthostatic Intolerance, Chronic Pain, Cockayne Syndrome Type II, Coffin Lowry Syndrome, Colpocephaly, Coma, Complex Regional Pain Syndrome, Congenital Facial Diplegia, Congenital Myasthenia, Congenital Myopathy, Congenital Vascular Cavernous Malformations, Corticobasal Degeneration, Cranial Arteritis, Craniosynostosis, Cree encephalitis, Creutzfeldt-Jakob Disease, Cumulative Trauma Disorders, Cushing's Syndrome, Cytomegalic Inclusion Body Disease, Cytomegalovirus Infection, Dancing Eyes-Dancing Feet Syndrome, Dandy-Walker Syndrome, Dawson Disease, De Morsier's Syndrome, Dejerine-Klumpke Palsy, Dementia, Dementia-Multi-Infarct, Dementia—Semantic, Dementia—Subcortical, Dementia With Lewy Bodies, Dentate Cerebellar Ataxia, Dentatorubral Atrophy, Dermatomyositis, Developmental Dyspraxia, Devic's Syndrome, Diabetic Neuropathy, Diffuse Sclerosis, Dravet Syndrome, Dysautonomia, Dysgraphia, Dyslexia, Dysphagia, Dyspraxia, Dyssvnergia Cerebellaris Myoclonica, Dyssvnergia Cerebellaris Progressiva, Dystonias, Early Infantile Epileptic Encephalopathy, Empty Sella Syndrome, Encephalitis, Encephalitis Lethargica, Encephaloceles, Encephalopathy, Encephalopathy (familial infantile), Encephalotrigeminal Angiomatosis, Epilepsy, Epileptic Hemiplegia, Erb's Palsy, Erb-Duchenne and Dejerine-Klumpke Palsies, Essential Tremor, Extrapontine Myelinoiysis, Fabry Disease, Fahr's Syndrome, Fainting, Familial Dysautonomia, Familial Hemangioma, Familial Idiopathic Basal Ganglia Calcification, Familial Periodic Paralyses, Familial Spastic Paralysis, Farber's Disease, Febrile Seizures, Fibromuscular Dysplasia, Fisher Syndrome, Floppy Infant Syndrome, Foot Drop, Friedreich's Ataxia, Frontotemporai Dementia, Gaucher Disease, Generalized Gangliosidoses, Gerstmann's Syndrome, Gerstmann-Straussler-Scheinker Disease, Giant Axonal Neuropathy, Giant Cell Arteritis, Giant Cell Inclusion Disease, Globoid Cell Leukodystrophy, Glossopharyngeal Neuralgia, Glycogen Storage Disease, Guiliain-Barré Syndrome, Hallervorden-Spatz Disease, Head Injury, Headache, Hemicrania Continua, Hemifacial Spasm, Hemiplegia Alterans, Hereditary Neuropathies, Hereditary Spastic Paraplegia, Heredopatlua Atactica Polyneuritiformis, Herpes Zoster, Herpes Zoster Oticus, Hirayama Syndrome. Holmes-Adie syndrome, Holoprosencephaly, HTLV-1 Associated Myelopathy, Hughes Syndrome, Huntington's Disease, Hydranencephaly, Hydrocephalus, Hydrocephalus—Normal Pressure, Hydromyelia, Hypercortisolism, Hypersomnia, Hypertonia, Hypotonia, Hypoxia, Immune-Mediated Encephalomyelitis, Inclusion Body Myositis, incontinentia Pigmenti, Infantile Hypotonia, Infantile Neuroaxonal Dystrophy, Infantile Phytanic Acid Storage Disease, Infantile Refsurn Disease, Infantile Spasms, Inflammatory Myopathies, Iniencephaly, Intestinal Lipodystrophy, Intracranial Cysts, Intracranial Hypertension, Isaacs' Syndrome, Joubert Syndrome, Kearns-Sayre Syndrome, Kennedy's Disease, Kinsbourae syndrome, Kleine-Levin Syndrome, Klippel-Feil Syndrome, Klippel-Trenaunay Syndrome (KTS), Kluver-Bucy Syndrome, Korsakoff's Amnesic Syndrome, Krabbe Disease, Kugelberg-Weiander Disease, Kuru, Lambert-Eaton Myasthenic Syndrome, Landau-Kleffher Syndrome, Lateral Femoral Cutaneous Nerve Entrapment, Lateral Medullary Syndrome, Learning Disabilities, Leigh's Disease, Lennox-Gastaut Syndrome, Lesch-Nyhan Syndrome, Leukodystrophy, Levine-Critchley Syndrome, Lewy Body Dementia, Lipid Storage Diseases, Lipoid Proteinosis, Lissencephaly, Locked-In Syndrome, Lou Gehrig's Disease, Lupus—Neurological Sequelae, Lyme Disease—Neurological Complications, Machado-Joseph Disease, Macrencephaly, Megalencephaly, Melkersson-Rosenthal Syndrome, Meningitis, Meningitis and Encephalitis, Menkes Disease, Meralgia Paresthetica, Metachromatic Leukodystrophy, Microcephaly, Migraine, Miller Fisher Syndrome, Mini Stroke, Mitochondrial Myopathy, Moebius Syndrome, Monomelic Amyotrophy, Motor Neuron Diseases, Moyamoya Disease, Mucolipidoses, Mucopolysaccharidoses, Multi-Infarct Dementia, Multifocal Motor Neuropathy, Multiple Sclerosis, Multiple System Atrophy, Multiple System Atrophy with Orthostatic Hypotension, Muscular Dystrophy, Myasthenia—Congenital, Myasthenia Gravis, Myeiinoclastic Diffuse Sclerosis, Myoclonic Encephalopathy of Infants, Myoclonus, Myopathy, Myopathy—Congenital, Myopathy—Thyrotoxic, Myotonia, Myotonia Congenita, Narcolepsy, Neuroacanthocytosis, Neurodegeneration with Brain Iron Accumulation, Neurofibromatosis, Neuroleptic Malignant Syndrome, Neurological Complications of AIDS, Neurological Complications of Lyme Disease, Neurological Consequences of Cytomegalovirus Infection, Neurological Manifestations of Pompe Disease, Neurological Sequelae Of Lupus, Neuromyelitis Optica, Neuromyotoma, Neuronal Ceroid Lipofuscinosis, Neuronal Migration Disorders, Neuropathy—Hereditary, Neurosarcoidosis, Neurosyphilis, Neurotoxicity, Nevus Cavemosus, Niemann-Pick Disease, O'Sullivan-McLeod Syndrome, Occipital Neuralgia, Ohtahara Syndrome, Olivopontocerebellar Atrophy, Opsoclonus Myoclonus, Orthostatic Hypotension, Overuse Syndrome, Pain—Chronic, Pantothenate Kinase-Associated Neurodegeneration, Paraneoplastic Syndromes, Paresthesia, Parkinson's Disease, Paroxysmal Choreoathetosis, Paroxysmal Hemicrania, Parry-Romberg, Pelizaeus-Merzbacher Disease, Pena Shokeir II Syndrome, Perineural Cysts, Periodic Paralyses, Peripheral Neuropathy, Periventricular Leukomalacia, Persistent Vegetative State, Pervasive Developmental Disorders, Phytanic Acid Storage Disease, Pick's Disease, Pinched Nerve, Piriformis Syndrome, Pituitary Tumors, Polymyositis, Pompe Disease, Porencephaly, Post-Polio Syndrome, Postherpetic Neuralgia, Postinfectious Encephalomyelitis, Postural Hypotension, Postural Orthostatic Tachycardia Syndrome, Postural Tachycardia Syndrome, Primary Dentatum Atrophy, Primary Lateral Sclerosis, Primary Progressive Aphasia, Prion Diseases, Progressive Hemifacial Atrophy, Progressive Locomotor Ataxia, Progressive Multifocal Leukoencephalopathy, Progressive Sclerosing Poliodystrophy, Progressive Supranuclear Palsy, Prosopagnosia, Pseudo-Torch syndrome, Pseudotoxoplasmosis syndrome, Pseudotumor Cerebri, Psychogenic Movement, Ramsay Hunt Syndrome I, Ramsay Hunt Syndrome II, Rasraussen's Encephalitis, Reflex Sympathetic Dystrophy Syndrome, Refsum Disease, Refsum Disease—Infantile, Repetitive Motion Disorders, Repetitive Stress Injuries, Restless Legs Syndrome, Retrovirus-Associated Myelopathy, Rett Syndrome, Reye's Syndrome, Rheumatic Encephalitis, Riley-Day Syndrome, Sacral Nerve Root Cysts, Saint Vitus Dance, Salivary Gland Disease, Sandhoff Disease, Schilder's Disease, Schizencephaly, Seiteiberger Disease, Seizure Disorder, Semantic Dementia, Septo-Optic Dysplasia, Severe Myoclonic Epilepsy of Infancy (SME1), Shaken Baby Syndrome, Shingles, Shy-Drager Syndrome, Sjögren's Syndrome, Sleep Apnea, Sleeping Sickness, Solos Syndrome, Spasticity, Spina Bifida, Spinal Cord infarction, Spinal Cord Injury, Spinal Cord Tumors, Spinal Muscular Atrophy, Spinocerebellar Atrophy, Spinocerebellar Degeneration, Steele-Richardson-Olszewski Syndrome, Stiff-Person Syndrome, Striatonigral Degeneration, Stroke, Sturge-Weber Syndrome, Subacute Sclerosing Panencephalitis, Subcortical Arteriosclerotic Encephalopathy, Short-lasting, Unilateral, Neuralgiform (SUNCT) Headache, Swallowing Disorders, Sydenham Chorea, Syncope, Syphilitic Spinal Sclerosis, Syringohydromyelia, Syringomyelia, Systemic Lupus Erythematosus, Tabes Dorsalis, Tardive Dyskinesia, Tarlov Cysts, Tay-Sachs Disease, Temporal Arteritis, Tethered Spinal Cord Syndrome, Thomson's Myotonia, Thoracic Outlet Syndrome, Thyrotoxic Myopathy, Tic Douloureux, Todd's Paralysis, Tourette Syndrome, Transient Ischemic Attack, Transmissible Spongiform Encephalopathies, Transverse Myelitis, Traumatic Brain Injury, Tremor, Trigeminal Neuralgia, Tropical Spastic Paraparesis, Troyer Syndrome, Tuberous Sclerosis, Vascular Erectile Tumor, Vasculitis Syndromes of the Central and Peripheral Nervous Systems, Von Economo's Disease, Von Hippel-Lindau Disease (VHL), Von Recklinghausen's Disease, Wallenberg's Syndrome, Werdnig-Hoffman Disease, Wernicke-Korsakoff Syndrome, West Syndrome, Whiplash, Whipple's Disease, Williams Syndrome, Wilson Disease, Wolman's Disease, X-Lmked Spinal, and Bulbar Muscular Atrophy,

[0490] Various psychological disorders may be treated with pharmaceutical compositions, AAV particles, of the present invention. As a non-limiting example, the psychological disorders may be Abouha, Absence epilepsy, Acute stress Disorder, Adjustment Disorders, Adverse effects of medication NOS, Age related cognitive decline, Agoraphobia, Alcohol Addiction, Alzheimer's Disease, Amnesia (also known as Amnestic Disorder), Amphetamine Addiction, Anorexia Nervosa, Anterograde amnesia, Antisocial personality disorder (also known as Sociopathy), Anxiety Disorder (Also known as Generalized Anxiety Disorder), Anxiolytic related disorders, Asperger's Syndrome (now part of Autism Spectrum Disorder), Attention Deficit Disorder (Also known as ADD), Attention Deficit Hyperactivity Disorder (Also known as ADHD), Autism Spectrum Disorder (also known as Autism), Autophagia Avoidant Personality Disorder, Barbiturate related disorders, Benzodiazepine related disorders, Bereavement, Bibliomania, Binge Eating Disorder, Bipolar disorder (also known as Manic Depression, includes Bipolar I and Bipolar II), Body Dysmorphic Disorder, Borderline intellectual functioning, Borderline Personality Disorder, Breathing-Related Sleep Disorder, Brief Psychotic Disorder, Bruxism, Bulimia Nervosa, Caffeine Addiction, Cannabis Addiction, Catatonic disorder, Catatonic schizophrenia, Childhood amnesia, Childhood Disintegrative Disorder (now part of Autism Spectrum Disorder), Childhood Onset Fluency Disorder (formerly known as Stuttering), Orcadian Rhythm Disorders, Claustrophobia, Cocaine related disorders, Communication disorder, Conduct Disorder, Conversion Disorder, Cotard delusion, Cyclothymia (also known as Cyclothymic Disorder), Delerium, Delusional Disorder, dementia, Dependent Personality Disorder (also known, as Asthenic Personality Disorder), Depersonalization disorder (now known as Depersonalization/Derealization Disorder), Depression (also known as Major Depressive Disorder), Depressive personality disorder, Derealization disorder (now known as Depersonalization/Derealization Disorder), Dermotillomania, Desynchronosis, Developmental coordination disorder, Diogenes Syndrome, Disorder of written expression, Dispareunia, Dissocial Personality Disorder, Dissociative Amnesia, Dissociative Fugue, Dissociative Identity Disorder (formerly known as Multiple Personality Disorder), Down syndrome, Dyslexia, Dyspareunia, Dysthymia (now known as Persistent Depressive Disorder), Eating disorder NOS, Ekbom's Syndrome (Delusional Parasitosis), Emotionally unstable personality disorder, Encopresis, Enuresis (bedwetting), Erotomania, Exhibitionistic Disorder, Expressive language disorder, Factitious Disorder, Female Sexual Disorders, Fetishistic Disorder, Folie àdeux, Fregoli delusion, Frotteuristic Disorder, Fugue State, Ganser syndrome, Gambling Addiction, Gender Dysphoria (formerly known as Gender Identity Disorder), Generalized Anxiety Disorder, General adaptation syndrome, Grandiose delusions. Hallucinogen Addiction, Haltlose personality disorder, Histrionic Personality Disorder, Primary hypersomnia, Huntington's Disease, Hypoactive sexual desire disorder, Hypochondriasis, Hypomania, Hyperkinetic syndrome, Hypersomnia, Hysteria, Impulse control disorder, Impulse control disorder NOS, Inhalant Addiction, Insomnia, Intellectual Development Disorder, Intermittent Explosive Disorder, Joubert syndrome, Kleptomania, Korsakoff's syndrome, Lacunar amnesia, Language Disorder, Learning Disorders, Major Depression (also known as Major Depressive Disorder), major depressive disorder, Male Sexual Disorders, Malingering, Mathematics disorder, Medication-related disorder, Melancholia, Mental Retardation (now known as Intellectual Development Disorder), Misophobia, Morbid jealousy, Multiple Personality Disorder (now known as Dissociative Identity Disorder), Munchausen Syndrome, Munchausen by Proxy, Narcissistic Personality Disorder, Narcolepsy, Neglect of child, Neurocognitive Disorder (formerly known as Dementia), Neuroleptic-related disorder, Nightmare Disorder, Non Rapid Eye Movement, Obsessive-Compulsive Disorder, Obsessive-Compulsive Personality Disorder (also known as Anankastic Personality Disorder), Oneirophrenia, Onychophagia, Opioid Addiction, Oppositional Defiant Disorder, Orthorexia (ON), Pain disorder, Panic attacks, Panic Disorder, Paranoid Personality Disorder, Parkinson's Disease, Partner relational problem, Passive-aggressive personality disorder, Pathological gambling, Pedoplnlic Disorder, Perfectionism, Persecutory delusion, Persistent Depressive Disorder (also known as Dysthymia), Personality change due to a general medical condition, Personality disorder, Pervasive developmental disorder (PDD), Phencyclidine related disorder, Phobic disorder, Phonological disorder, Physical abuse, Pica, Polysubstance related disorder, Postpartum Depression, Post-traumatic embitterment disorder (PTED), Post Traumatic Stress Disorder, Premature ejaculation, Premenstrual Dysphoric Disorder, Psychogenic amnesia, Psychological factor affecting medical condition, Psychoneurotic personality disorder, Psychotic disorder, not otherwise specified, Pyromania, Reactive Attachment Disorder, Reading disorder, Recurrent brief depression, Relational disorder, REM: Sleep Behavior Disorder, Restless Leg Syndrome, Retrograde amnesia, Retts Disorder (now part of Autism Spectrum Disorder), Rumination syndrome, Sadistic personality disorder, Schizoaffective Disorder, Schizoid Personality Disorder, Schizophrenia, Schizophreniform disorder, Schizotypal Personality Disorder, Seasonal Affective Disorder, Sedative, Hypnotic, or Anxiolytic Addiction, Selective Mutism, Self-defeating personality disorder, Separation Anxiety Disorder, Sexual Disorders Female, Sexual Disorders Male, Sexual Addiction, Sexual Masochism Disorder, Sexual Sadism Disorder, Shared Psychotic Disorder, Sleep Arousal Disorders, Sleep Paralysis, Sleep Terror Disorder (now part of Nightmare Disorder, Social Anxiety Disorder, Somatization Disorder, Specific Phobias, Stendhal syndrome, Stereotypic movement disorder, Stimulant Addiction, Stuttering (now known as Childhood Onset Fluency Disorder), Substance related disorder, Tardive dyskinesia, Tobacco Addiction, Tourettes Syndrome, Transient tic disorder, Transient global amnesia. Transvestic Disorder, Trichotillomania, Undifferentiated Somatoform Disorder, Vaginismus, and Voyeuristic Disorder.

[0491] Various lung diseases may be treated with pharmaceutical compositions, AAV particles, of the present invention. As a non-limiting example, the lung diseases may be Asbestosis, Asthma, Bronchiectasis, Bronchitis, Chronic Cough, Chronic Obstructive Pulmonary Disease (COPD), Croup, Cystic Fibrosis, Hantavirus, Idiopathic Pulmonary Fibrosis, Pertussis, Pleurisy, Pneumonia, Pulmonary Embolism, Pulmonary Hypertension, Sarcoidosis, Sleep Apnea, Spirometry, Sudden Infant Death Syndrome (SIDS), Tuberculosis, Alagille Syndrome, Autoimmune Hepatitis, Biliary Atresia, Cirrhosis, ERCP (Endoscopic Retrograde Cholangiopancreatography), and Hemochromatosis, Nonalcoholic Steatohepatitis, Porphyria, Primary Biliary Cirrhosis, Primary Sclerosing Cholangitis.

[0492] Various bone diseases may be treated with pharmaceutical compositions, AAV particles, of the present invention. As a non-limiting example, the bone diseases may be osteoporosis, neurofibromatosis, osteogenesis imperfecta (O1), rickets, osteosarcoma, achondroplasia, fracture, osteomyelitis, Ewing tumour of bone, osteomalacia, hip dysplasia, Paget disease of bone, marble bone disease, osteochondroma, bone cancer, bone disease, osteochondrosis, osteoma, fibrous dysplasia, cleidocranial dysostosis, osteoclastoma, bone cyst, metabolic bone disease, melorheostosis, callus, Caffey syndrome, and mandibulofacial dysostosis.

[0493] Various blood diseases may be treated with pharmaceutical compositions, AAV particles, of the present invention. As a non-limiting example, the blood diseases may be Anemia and CKD (for health care professionals), Aplastic Anemia and Myelodysplastic Syndromes, Deep Vein Thrombosis, Hemochromatosis, Hemophilia, Henoch-Schönlein Purpura, Idiopathic Thrombocytopenic Purpura, Iron-Deficiency Anemia, Pernicious Anemia, Pulmonary Embolism, Sickle Cell Anemia, Sickle Cell Trait and Other Hemoglobinopathies, Thalassemia, Thrombotic Thrombocytopenic Purpura, and Von Willebrand Disease.

[0494] Various diseases associated with TNF-alpha may be treated with the pharmaceutical compositions. AAV particles, of the present invention. As a non-limiting example, the disease may be respiratory disorder; asthma; allergic and nonallergic asthma; asthma due to infection; asthma due to infection with respiratory syncytial virus (RSV); chronic obstructive pulmonary disease (COPD); a condition involving airway inflammation; eosinophilia; fibrosis and excess mucus production; cystic fibrosis; pulmonary fibrosis; an atopic disorder; atopic dermatitis; urticaria; eczema; allergic rhinitis; allergic enterogastritis; an inflammatory and/or autoimmune condition of the skin; an inflammatory and/or autoimmune condition of gastrointestinal organs; inflammatory bowel diseases (IBD); ulcerative colitis, Crohn's disease; an inflammatory and/or autoimmune condition of the liver; liver cirrhosis; liver fibrosis; liver fibrosis caused by hepatitis B and/or C virus; scleroderma; tumors or cancers; hepatocellular carcinoma; glioblastoma; lymphoma; Hodgkin's lymphoma; a viral infection; a bacterial infection; a parasitic infection; HTLV-1 infection; suppression of expression of protective type 1 immune responses, and suppression of expression of a protective type 1 immune response during vaccination, rheumatoid arthritis, osteoarthritis, juvenile chronic arthritis, septic arthritis, Lyme arthritis, psoriatic arthritis, reactive arthritis, spondyloarthropathy, systemic lupus erythematosus, (Crohn's disease, ulcerative colitis, inflammatory bowel disease, insulin dependent diabetes mellitus, thyroiditis, asthma, allergic diseases, psoriasis, dermatitis scleroderma, graft versus host disease, organ transplant rejection, acute or chronic immune disease associated with organ transplantation, sarcoidosis, atherosclerosis, disseminated intravascular coagulation, Kawasaki's disease, Grave's disease, nephrotic syndrome, chronic fatigue syndrome, Wegener's granulomatosis, Henoch-Schoenlein purpurea, microscopic vasculitis of the kidneys, chronic active hepatitis, uveitis, septic shock, toxic shock syndrome, sepsis syndrome, cachexia, infectious diseases, parasitic diseases, acquired immunodeficiency syndrome, acute transverse myelitis, Huntington's chorea, Parkinson's disease, Alzheimer's disease, stroke, primary biliary cirrhosis, hemolytic anemia, malignancies, heart failure, myocardial infarction, Addison's disease, sporadic, polyglandular deficiency type I and polyglandular deficiency type II, Schmidt's syndrome, adult (acute) respiratory distress syndrome, alopecia, alopecia greata, seronegative arthropathy, arthropathy, Reiter's disease, psoriatic arthropathy, ulcerative colitic arthropathy, enteropathy synovitis, chlamydia, yersinia and salmonella associated arthropathy, spondyloarthropathy, atheromatous disease/arteriosclerosis, atopic allergy, autoimmune bullous disease, pemphigus vulgaris, pemphigus foliaceus, pemphigoid, linear IgA disease, autoimmune haemolytic anaemia, Coombs positive haemolytic anaemia, acquired pernicious anaemia, juvenile pernicious anaemia, myalgic encephalitis/Royal Free Disease, chronic mucocutaneous candidiasis, giant cell arteritis, primary sclerosing hepatitis, cryptogenic autoimmune hepatitis. Acquired Immunodeficiency Disease Syndrome, Acquired Immunodeficiency Related Diseases, hepatitis B, hepatitis C, common varied immunodeficiency (common variable hypogammaglobulinaemia), dilated cardiomyopathy, female infertility, ovarian failure, premature ovarian failure, flbrotic lung disease, cryptogenic fibrosing alveolitis, post-inflammatory interstitial lung disease, interstitial pneumonitis, connective tissue disease associated interstitial lung disease, mixed connective tissue disease associated lung disease, systemic sclerosis associated interstitial lung disease, rheumatoid arthritis associated interstitial lung disease, systemic lupus eiythematosus associated lung disease, dermatoray ositis/polyrayositis associated lung disease, Sjögren's disease associated lung disease, ankylosing spondylitis associated lung disease, vasculitic diffuse lung disease, haernosiderosis associated lung disease, drug-induced interstitial lung disease, fibrosis, radiation fibrosis, bronchiolitis obliterans, chronic eosinophilic pneumonia, lymphocytic infiltrative lung disease, postinfectious interstitial lung disease, gouty arthritis, autoimmune hepatitis, type-1 autoimmune hepatitis (classical autoimmune or lupoid hepatitis), type-2 autoimmune hepatitis (anti-LKM antibody hepatitis), autoimmune mediated hypoglycaemia, type B insulin resistance with acanthosis nigricans, hypoparathyroidism, acute immune disease associated with organ transplantation, chronic immune disease associated with organ transplantation, osteoarthrosis, primary sclerosing cholangitis, psoriasis type 1, psoriasis type 2, idiopathic leucopaenia, autoimmune neutropaema, renal disease NOS, glomerulonephritides, microscopic vasculitis of the kidneys, Lyme disease, discoid lupus erythematosus, male infertility idiopathic or NOS, sperm autoimmunity, multiple sclerosis (all subtypes), sympathetic ophthalmia, pulmonary hypertension secondary to connective tissue disease, Goodpasture's syndrome, pulmonary manifestation of polyarteritis nodosa, acute rheumatic fever, rheumatoid spondylitis, Still's disease, systemic sclerosis, Sjörgren's syndrome, Takayasu's disease/arteritis, autoimmune thrombocytopaenia, idiopathic thrombocytopaenia, autoimmune thyroid disease, hyperthyroidism, goitrous autoimmune hypothyroidism (Hashimoto's disease), atrophic autoimmune hypothyroidism, primary myxoedema, phacogenic uveitis, primary vasculitis, vitiligo acute liver disease, chronic liver diseases, alcoholic cirrhosis, alcohol-induced liver injury, choleostasis, idiosyncratic liver disease, drug-Induced hepatitis, non-alcoholic steatohepatitis, allergy and asthma, group B streptococci (GBS) infection, mental disorders (e.g., depression and schizophrenia), Th2 Type and Th1 Type mediated diseases, acute and chronic pain (different forms of pain), and cancers such as lung, breast, stomach, bladder, colon, pancreas, ovarian, prostate and rectal cancer and hematopoietic malignancies (leukemia and lymphoma) abetalipoproteinemia, acrocyanosis, acute and chronic parasitic or infectious processes, acute leukemia, acute lymphoblastic leukemia (ALL), acute myeloid leukemia (AML), acute or chronic bacterial infection, acute pancreatitis, acute renal failure, adenocarcinomas, aerial ectopic beats, AIDS dementia complex, alcohol-induced hepatitis, allergic conjunctivitis, allergic contact dermatitis, allergic rhinitis, allograft rejection, alpha-1-antitrypsin deficiency, amyotrophic lateral sclerosis, anemia, angina pectoris, anterior horn cell degeneration, anti-CD3 therapy, antiphospholipid syndrome, anti-receptor hypersensitivity reactions, aortic and peripheral aneurysms, aortic dissection, arterial hypertension, arteriosclerosis, arteriovenous fistula, ataxia, atrial fibrillation (sustained or paroxysmal), atrial flutter, atrioventricular block, B cell lymphoma, bone graft rejection, bone marrow transplant (BMT) rejection, bundle branch block, Burkitt's lymphoma, burns, cardiac arrhythmias, cardiac stun syndrome, cardiac tumors, cardiomyopathy, cardiopulmonary bypass inflammation response, cartilage transplant rejection, cerebellar cortical degenerations, cerebellar disorders, chaotic or multifocal atrial tachycardia, chemotherapy associated disorders, chronic myelocytic leukemia (CML), chronic alcoholism, chronic inflammatory pathologies, chronic lymphocytic leukemia (CLL), chronic obstructive pulmonary disease (COPD), chronic salicylate intoxication, colorectal carcinoma, congestive heart failure, conjunctivitis, contact dermatitis, corpulmonale, coronary artery disease, Creutzfeldt-Jakob disease, culture negative sepsis, cystic fibrosis, cytokine therapy associated disorders, dementia pugilistica, demyelinating diseases, dengue hemorrhagic fever, dermatitis, dermatologic conditions, diabetes, diabetes mellitus, diabetic arteriosclerotic disease, Diffuse Lewy body disease, dilated congestive cardiomyopathy, disorders of the basal ganglia, Down's Syndrome in middle age, drug-induced movement disorders induced by drugs which block CNS dopamine receptors, drug sensitivity, eczema, encephalomyelitis, endocarditis, endocrinopathy, epiglottitis, Epstein-Barr virus infection, erythromelalgia, extrapyramidal and cerebellar disorders, familial hemophagocytic lymphohistiocytosis, fetal thymus implant rejection, Friedreich's ataxia, functional peripheral arterial disorders, fungal sepsis, gas gangrene, gastric ulcer, glomerular nephritis, graft rejection of any organ or tissue, gram negative sepsis, gram positive sepsis, granulomas due to intracellular organisms, hairy cell leukemia, Hallervorden-Spatz disease, Hashimoto's thyroiditis, hay fever, heart transplant rejection, hemochromatosis, hemodialysis, hemolytic uremic syndrome/thrombolytic thrombocytopenic purpura, hemorrhage, hepatitis (A), His bundle arrhythmias, HIV infection/HIV neuropathy, Hodgkin's disease, hyperkinetic movement disorders, hypersensitivity reactions, hypersensitivity pneumonitis, hypertension, hypokinetic movement disorders, hypothalamic-pituitary-adrenal axis evaluation, idiopathic Addison's disease, idiopathic pulmonary fibrosis, antibody mediated cytotoxicity, asthenia, infantile spinal muscular atrophy, inflammation of the aorta, influenza a, ionizing radiation exposure, iridocyclitis/uveitis/optic neuritis, ischemia-reperfusion injury, ischemic stroke, juvenile rheumatoid arthritis (JRA), juvenile spinal muscular atrophy, Kaposi's sarcoma, kidney transplant rejection, legionella, leishmaniasis, leprosy, lesions of the corticospinal system, lipedema, liver transplant rejection, lymphedema, malaria, malignant lymphoma, malignant histiocytosis, malignant melanoma, meningitis, meningococcemia, metabolic/idiopathic, migraine headache, mitochondrial multi-system disorder, mixed connective tissue disease, monoclonal gammopathy, multiple myeloma, multiple systems degenerations (Menzel, Dejerine-Thomas, Shy-Drager, and Machado-Joseph), myasthenia gravis, mycobacterium avium intracellulare, mycobacterium tuberculosis,myelodysplastic syndrome, myocardial infarction, myocardial ischemic disorders, nasopharyngeal carcinoma, neonatal chronic lung disease, nephritis, nephrosis, neurodegenerative diseases, neurogenic I muscular atrophies, neutropenic fever, non-Hodgkins lymphoma, occlusion of the abdominal aorta and its branches, occlusive arterial disorders, OKT3® therapy, orchitis/epidydimitis, orchitis/vasectomy reversal procedures, organomegaly, osteoporosis, pancreas transplant rejection, pancreatic carcinoma, paraneoplastic syndrome/hypercalcemia of malignancy, parathyroid transplant resection, pelvic inflammatory disease, perennial rhinitis, pericardial disease, peripheral atherosclerotic disease, peripheral vascular disorders, peritonitis, pernicious anemia, pneumocystis carinii pneumonia pneumonia, POEMS syndrome (polyneuropathy, organomegaly, endocrinopathy, monoclonal gammopathy, and skin changes syndrome), post perfusion syndrome, post pump syndrome, post-MI cardiotomy syndrome, preeclampsia, progressive supranucleo palsy, primary pulmonary hypertension, radiation therapy, Raynaud's phenomenon and disease, Raynaud's disease, Refsum's disease, regular narrow QRS tachycardia, renovascular hypertension, reperfusion injury, restrictive cardiomyopathy, sarcomas, scleroderma, senile chorea, senile dementia of Lewy body type, seronegative arthropathies, shock, sickle cell anemia, skin allograft rejection, skin changes syndrome, small bowel transplant rejection, solid tumors, specific arrhythmias, spinal ataxia, spinocerebellar degenerations, streptococcal myositis, structural lesions of the cerebellum, subacute sclerosing panencephalitis, syncope, syphilis of the cardiovascular system, systemic anaphylaxis, systemic inflammatory response syndrome, systemic onset juvenile rheumatoid arthritis, T-cell or FAB ALL, telangiectasia, thrornboangitis obliterans, thrombocytopenia, toxicity, transplants, trauma/hemorrhage, type III hypersensitivity reactions, type IV hypersensitivity, unstable angina, uremia, urosepsis, urticaria, valvular heart diseases, varicose veins, vasculitis, venous diseases, venous thrombosis, ventricular fibrillation, viral and fungal infections, viral encephalitis/aseptic meningitis, viral-associated hemophagocytic syndrome, Wernicke-Korsakoff syndrome. Wilson's disease, xenograft rejection of any organ or tissue, acute coronary syndromes, acute idiopathic polyneuritis, acute inflammatory demyelinating polyradiculoneuropathy, acute ischemia, adult Still's disease, alopecia greata, anaphylaxis, anti-phospholipid antibody syndrome, aplastic anemia, arteriosclerosis, atopic eczema, atopic dermatitis, autoimmune dermatitis, autoimmune disorder associated with streptococcus infection, autoimmune enteropathy, autoimmune hearing loss, autoimmune lymphoproliferative syndrome (ALPS), autoimmune myocarditis, autoimmune premature ovarian failure, blepharitis, bronchiectasis, bullous pemphigoid, cardiovascular disease, catastrophic antiphospholipid syndrome, celiac disease, cervical spondylosis, chronic ischemia, cicatricial pemphigoid, clinically isolated syndrome (CIS) with risk for multiple sclerosis, conjunctivitis, childhood onset psychiatric disorder, chronic obstructive pulmonary disease (COPE), dacryocystitis, dermatomyositis, diabetic retinopathy, diabetes mellitus, disk herniation, disk prolapse, drug induced immune hemolytic anemia, endocarditis, endometriosis, endophthalmitis, episcleritis, erythema multiforme, erythema multiforme major, gestational pemphigoid, Guillam-Barre syndrome (GBS), hay fever, Hughes syndrome, idiopathic Parkinson's disease, idiopathic interstitial pneumonia, IgE-mediated allergy, immune hemolytic anemia, inclusion body myositis, infectious ocular inflammatory disease, inflammatory demyelinating disease, inflammatory heart disease, inflammatory kidney disease, IPF/UIP, iritis, keratitis, keratojunctivitis sicca, Kussmaul disease or Kussmaul-Meier disease, Landry's paralysis, Langerhan's cell histiocytosis, livedo reticularis, macular degeneration, microscopic polyangiitis, morbus bechterev, motor neuron disorders, mucous membrane pemphigoid, multiple organ failure, myasthenia gravis, myelodysplastic syndrome, myocarditis, nerve root disorders, neuropathy, non-A non-B hepatitis, optic neuritis, osteolysis, ovarian cancer, pauciarticular JRA, peripheral artery occlusive disease (PAOD), peripheral vascular disease (PVD), peripheral artery disease (PAD), phlebitis, polyarteritis nodosa (or periarteritis nodosa), polychondritis, polymyalgia rheumatica, poliosis, polyarticular JRA, polyendocrine deficiency syndrome, polymyositis, polymyalgia rheumatica (PMR), post-pump syndrome, primary Parkinsonism, prostate and rectal cancer and hematopoietic malignancies (leukemia and lymphoma), prostatitis, pure red cell aplasia, primary adrenal insufficiency, recurrent neuromyelitis optica, restenosis, rheumatic heart disease, sapho (synovitis, acne, pustulosis, hyperostosis, and osteitis), scleroderma, secondary amyloidosis, shock lung, scleritis, sciatica, secondary adrenal insufficiency, silicone associated connective tissue disease, Sneddon-Wilkinson dermatosis, spondylitis ankylosans, Stevens-Johnson syndrome (SJS), systemic inflammatory response syndrome, temporal arteritis, toxoplasmic retinitis, toxic epidermal necrolysis, transverse myelitis, TRAPS (tumor necrosis factor receptor associated periodic syndrome), type 1 allergic reaction, type II diabetes, urticaria, usual interstitial pneumonia (UIP), vasculitis, vernal conjunctivitis, viral retinitis, Vogt-Koyanagi-Harada syndrome (VKH syndrome), wet macular degeneration, wound healing, yersinia, or salmonella associated arthropathy.

[0495] Various receptor for advanced glycation endproducts (RAGE) diseases may be treated with the pharmaceutical compositions, AAV particles, of the present invention. As a non-limiting example, the disease may be Amytropic Lateral Sclerosis, Brachial Plexus Injury, Brain Injury, including traumatic brain injury, Cerebral Palsy, Friedrich's Ataxia, Guillain Barre, Leukodystrophies, Multiple Sclerosis, Post Polio, Spina Bifida, Spinal Cord Injury, Spinal Muscle Atrophy, Spinal Tumors, Stroke, Transverse Myelitits, dementia, senile dementia, mild cognitive impairment, Alzheimer-related dementia, Huntington's chorea, tardive dyskinesia, hyperkinesias, manias, Morbus Parkinson, steel-Richard syndrome, Down's syndrome, myasthenia gravis, nerve trauma, vascular amyloidosis, cerebral hemorrhage I with amyloidosis, bram inflammation, Friedrich's ataxia, acute confusion disorder, amyotrophic lateral sclerosis, glaucoma. Alzheimer's disease, diabetic nephropathy, sepsis, rheumatoid arthritis and related inflammatory diseases.

[0496] Various neurite degenerative diseases may be treated with the pharmaceutical compositions, AAV particles, of the present invention. As a non-limiting example, the disease may be multiple sclerosis, Parkinson's disease, Alzheimer's disease, Tay-Sachs disease, Niemann-Pick disease, Gaucher's disease, Hurler's syndrome, Huntington's disease, amyotrophic lateral sclerosis, idiopathic inflammatory demyelinating diseases, vitamin B12 deficiency, central pontine myelinolysis, tabes dorsalis, transverse myelitis, Devic's disease, progressive multifocal leukoencephalopathy, optic neuritis, traumatic injury to the CNS, an ischemic cerebral stroke, glaucoma, diabetic retinopathy, age-dependent macular degeneration, and a leukodystrophy.

[0497] Various neurological diseases may be treated with the pharmaceutical compositions, AAV particles, of the present invention. As a non-limiting example, the disease may be Amyotrophic Lateral Sclerosis, Brachial Plexus Injury, Bram Injury, including traumatic brain injury, Cerebral Palsy, Guillain Barre, Leukodystrophies, Multiple Sclerosis, Post Polio, Spina Bifida, Spinal Cord Injury, Spinal Muscle Atrophy, Spinal Tumors, Stroke, Transverse Myelitis; dementia, senile dementia, mild cognitive impairment, Alzheimer-related dementia, Huntington's chorea, tardive dyskinesia, hyperkinesias, manias, Morbus Parkinson, steel-Richard syndrome, Down's syndrome, myasthenia gravis, nerve trauma, vascular amyloidosis, cerebral hemorrhage I with amyloidosis, brain inflammation, acute confusion disorder, amyotrophic lateral sclerosis, glaucoma and Alzheimer's disease.

[0498] Various cancers may be treated with pharmaceutical compositions, AAV particles, of the present invention. As used herein, the term “cancer” refers to any of various malignant neoplasms characterized by the proliferation of anaplastic cells that tend to invade surrounding tissue and metastasize to new body sites and also refers to the pathological condition characterized by such malignant neoplastic growths. Cancers may be tumors or hematological malignancies, and include but are not limited to, all types of lymphomas/leukemias, carcinomas and sarcomas, such as those cancers or tumors found in the anus, bladder, bile duct, bone, brain, breast, cervix, colon/rectum, endometrium, esophagus, eye, gallbladder, head and neck, liver, kidney, larynx, lung, mediastinum (chest), mouth, ovaries, pancreas, penis, prostate, skin, small intestine, stomach, spinal marrow, tail bone, testicles, thyroid and uterus.

[0499] Types of carcinomas which may be treated with the AAV particles of the present invention include, but are not limited to, papilioma/carcinoma, choriocarcinoma, endodermal sinus tumor, teratoma, adenoma/adenocarcinoma, melanoma, fibroma, lipoma, leiomyoma, rhabdomyoma, mesothelioma, angioma, osteoma, chondroma, glioma, lymphoma/leukemia, squamous cell carcinoma, small cell carcinoma, large cell undifferentiated carcinomas, basal cell carcinoma and sinonasal undifferentiated carcinoma.

[0500] Types of sarcomas which may be treated with the AAV particles of the present invention include, but are not limited to soft tissue sarcoma such as alveolar soft part sarcoma, angiosarcoma, dermatofibrosarcoma, desmoid tumor, desmoplastic small round cell tumor, extraskeletal chondrosarcoma, extraskeletal osteosarcoma, fibrosarcoma, hemangiopericytoma, hemangiosarcoma, Kaposi's sarcoma, leiomyosarcoma, liposarcoma, lymphangiosarcoma, lymphosarcoma, malignant fibrous histiocytoma, neurofibrosarcoma, rhabdomyosarcoma, synovial sarcoma, and Asian's tumor, Ewing's sarcoma (primitive neuroectodermal tumor), malignant hemangioendothelioma, malignant schwannoma, osteosarcoma, and chondrosarcoma.

[0501] As a non-limiting example, the cancer which may be treated may be Acute granulocytic leukemia, Acute lymphocytic leukemia, Acute myelogenous leukemia, Adenocarcinoma, Adenosarcoma, Adrenal cancer. Adrenocortical carcinoma, Anal cancer, Anaplastic astrocytoma, Angiosarcoma, Appendix cancer, Astrocytoma, Basal cell carcinoma, B-Cell lymphoma), Bile duct cancer, Bladder cancer, Bone cancer, Bowel cancer, Brain cancer, Brain stem glioma, Brain tumor, Breast cancer, Carcinoid tumors, Cervical cancer, Cholangiocarcinoma, Chondrosarcoma, Chronic lymphocytic leukemia, Chronic myelogenous leukemia, Colon cancer, Colorectal cancer, Craniopharyngioma, Cutaneous lymphoma, Cutaneous melanoma, Diffuse astrocytoma, Ductal carcinoma in situ, Endometrial cancer, Ependymoma, Epithelioid sarcoma, Esophageal cancer, Ewing sarcoma, Extrahepatic bile duct cancer, Eye cancer, Fallopian tube cancer, Fibrosarcoma, Gallbladder cancer, Gastric cancer, Gastrointestinal cancer, Gastrointestinal carcinoid cancer, Gastrointestinal stromal tumors, General, Germ cell tumor, Glioblastoma multiforme, Glioma, Hairy cell leukemia, Head and neck cancer, Hemangioendothelioma, Hodgkin lymphoma, Hodgkin's disease, Hodgkin's lymphoma, Hypopharyngeal cancer, Infiltrating ductal carcinoma, Infiltrating lobular carcinoma, Inflammatory breast cancer, Intestinal Cancer, Intrahepatic bile duct cancer, Invasive/infiltrating breast cancer, Islet cell cancer, Jaw cancer, Kaposi sarcoma, Kidney cancer, Laryngeal cancer, Leiomyosarcoma, Leptomeningeal metastases, Leukemia, Lip cancer, Liposarcoma, Liver cancer, Lobular carcinoma in situ, Low-grade astrocytoma, Lung cancer, Lymph node cancer, Lymphoma, Male breast cancer, Medullary carcinoma, Medullohlastoma, Melanoma, Meningioma, Merkel cell carcinoma, Mesenchymal chondrosarcoma, Mesenchymous, Mesothelioma, Metastatic breast cancer, Metastatic melanoma, Metastatic squamous neck cancer, Mixed gliomas, Mouth cancer, Mucinous carcinoma, Mucosal melanoma, Multiple myeloma, Nasal cavity cancer, Nasopharyngeal cancer, Neck cancer, Neuroblastoma, Neuroendocrine tumors, Non-Hodgkm lymphoma, Non-Hodgkin's lymphoma, Non-small cell lung cancer, Oat cell cancer, Ocular cancer, Ocular melanoma, Oligodendroglioma, Oral cancer, Oral cavity cancer, Oropharyngeal cancer, Osteogenic sarcoma, Osteosarcoma, Ovarian cancer, Ovarian epithelial cancer, Ovarian germ cell tumor, Ovarian primary peritoneal carcinoma, Ovarian sex cord stromal tumor, Paget's disease, Pancreatic cancer, Papillary carcinoma, Paranasal sinus cancer, Parathyroid cancer, Pelvic cancer, Penile cancer, Peripheral nerve cancer, Peritoneal cancer, Pharyngeal cancer, Pheochromocytoma, Pilocytic astrocytoma, Pineal region tumor, Pineoblastoma, Pituitary gland cancer, Primary central nervous system lymphoma, Prostate cancer, Rectal cancer, Renal cell cancer, Renal pelvis cancer, Rhabdomyosarcoma, Salivary gland cancer, Sarcoma, Sarcoma, bone, Sarcoma, soft tissue, Sarcoma, uterine, Sinus cancer, Skin cancer, Small cell lung cancer, Small intestine cancer, Soft tissue sarcoma, Spinal cancer, Spinal column cancer, Spinal cord cancer, Spinal tumor, Squamous cell carcinoma, Stomach cancer, Synovial sarcoma, T-cell lymphoma), Testicular cancer, Throat cancer, Thymoma/thymic carcinoma, Thyroid cancer, Tongue cancer, Tonsil cancer, Transitional cell cancer, Transitional cell cancer, Transitional cell cancer, Triple-negative breast cancer, Tubal cancer, Tubular carcinoma, Ureteral cancer, Ureteral cancer. Urethral cancer, Uterine adenocarcinoma, Uterine cancer, Uterine sarcoma, Vaginal cancer, and Vulvar cancer.

### Diagnostic Applications

[0502] The AAV particles of the present invention may be used for diagnostic purposes or as diagnostic tools for any of the aforementioned diseases or disorders. As non-limiting examples, the AAV particles of the present invention or the antibodies encoded within the viral genome therein may be used as a biomarker for disease diagnosis. As a second non-limiting example, the AAV particles of the present invention or the antibodies encoded within the viral genome therein may be used for diagnostic imaging purposes, e.g., MRI, PET, CT or ultrasound.

[0503] Preventative Applications

[0504] The AAV particles of the present invention or the antibodies encoded by the viral genome therein may be used to prevent disease or stabilize the progression of disease. In one embodiment, the AAV particles of the present invention are used to as a prophylactic to prevent a disease or disorder in the future. In one embodiment, the AAV particles of the present invention are used to halt further progression of a disease or disorder. As a non-limiting example, the AAV particles of the invention may be used in a manner similar to that of a vaccine.

### Research Applications

[0505] The AAV particles of the present invention or the antibodies encoded by the viral genome therein may also be used as research tools. The AAV particles of the invention may be used as in any research experiment, e.g., in vivo or in vitro experiments. In a non-limiting example, the AAV particles of the invention may be used in cultured cells. The cultured cells may be derived from any origin known to one with skill in the art, and may be as non-limiting examples, derived from a stable cell line, an animal model or a human patient or control subject. In a non-limiting example, the AAV particles of the invention may be used in in vivo experiments in animal models (i.e., mouse, rat, rabbit, dog, cat, non-human primate, guinea pig, ferret c-elegans, drosophila, zebrafish, or any other animal used for research purposes, known in the art). In another non-limiting example, the AAV particles of the invention may be used in human research experiments or human clinical trials.

### Combination Applications

[0506] The AAV particles of the invention may be used as a combination therapy with any other therapeutic molecule known in the art. The therapeutic molecule may be approved by the US Food and Drug Administration or may be in clinical trial or at the preclinical research stage. The therapeutic molecule may utilize any therapeutic modality known in the art, with non-limiting examples including gene silencing or interference (i.e., miRNA, siRNA, RNAi, shRNA), gene editing (i.e., TALEN, CRISPR/Cas9 systems, zinc finger nucleases), and gene, protein or enzyme replacement.

### Therapeutic Applications

[0507] The present disclosure additionally provides a method for treating neurological diseases and/or disorders in a mammalian subject, including a human subject, comprising administering to the subject any of the AAV particles of the invention. In some cases, neurological diseases and/or disorders treated according to methods described herein include indications involving irregular expression or aggregation of tau. Such indications may include, but are not limited to Alzheimer's disease (AD), frontotemporal dementia and parkinsonism linked to chromosome 17 (FTDP-17), Frontotemporal lobar degeneration (FTLD), chronic traumatic encephalopathy (CTE), Progressive Supranuclear Palsy (PSP), Down's syndrome, Pick's disease, Corticobasai degeneration (CBD), Amyotrophic lateral sclerosis (ALS), Prion diseases, Creutzfeldt-Jakob disease (CJD), Multiple system atrophy, Tangle-only dementia, and Progressive subcortical gliosis.

[0508] In some embodiments, methods of treating neurological diseases and/or disorders in a subject in need thereof may comprise the steps of: (1) deriving, generating and/or selecting an anti-tau antibody, antibody-based composition or fragment thereof; (2) producing an AAV particle with a viral genome that includes a payload region encoding the selected antibody of (1); and (3) administering the AAV particle (or pharmaceutical composition thereof) to the subject.

[0509] The present disclosure provides a method for administering to a subject in need thereof, including a human subject, a therapeutically effective amount of the AAV particles of the invention to slow, stop or reverse disease progression. As a non-limiting example, disease progression may be measured by cognitive tests such as, but not limited to, the Mini-Mental State Exam (MMSE) or other similar diagnostic tool(s), known to those skilled in the art. As another non-limiting example, disease progression may be measured by change in the pathological features of the brain, CSF or other tissues of the subject, such as, but not limited to a decrease in levels of tau (either soluble or insoluble). In one embodiment levels of insoluble hyperphosphorylated tau are decreased. In one embodiment levels of soluble tau are decreased. In one embodiment both soluble and insoluble tau are decreased. In. one embodiment, levels of insoluble hyperphosphorylated tau are increased. In one embodiment levels of soluble tau are increased. In one embodiment both insoluble and soluble tau levels are increased. In one embodiment, neurofibrillary tangles are decreased in size, number, density, or combination thereof. In another embodiment, neurofibrillary tangles are increased in size, number, density or combination thereof.

### Alzheimer's Disease

[0510] Alzheimer Disease (AD) is a debilitating neurodegenerative disease currently afflicting more than 35 million people worldwide, with that number expected to double in coming decades. Symptomatic treatments have been available for many years but these treatments do not address the underlying pathophysiology. Recent clinical trials using these and other treatments have largely failed and, to date, no known cure has been identified.

[0511] The AD brain is characterized by the presence of two forms of pathological aggregates, the extracellular plaques composed of β-amyloid (Aβ) and the intracellular neurofibrillary tangles (NFT) composed of hyperphosphorylated microtubule associated protein tau. Based on early genetic findings, β-amyloid alterations were thought to initiate disease, with changes in tau considered downstream. Thus, most clinical trials have been Aβ-centric. Although no mutations of the tau gene have been linked to AD, such alterations have been shown to result in a family of dementias known as tauopathies, demonstrating that changes in tau can contribute to neurodegenerative processes. Tau is normally a very soluble protein known to associate with microtubules based on the extent of its phosphorylation. Hyperphosphorylation of tau depresses its binding to microtubules and microtubule assembly activity. In tauopathies, the tau becomes hyperphosphorylated, misfolds and aggregates as NFT of paired helical filaments (PHF), twisted ribbons or straight filaments. In AD, NFT pathology, rather than plaque pathology, correlates more closely with neuropathological markers such as neuronal loss, synaptic deficits, severity of disease and cognitive decline. NFT pathology marches through the brain in a stereotyped manner and animal studies suggest a trans-cellular propagation mechanism along neuronal connections.

[0512] Several approaches have been proposed for therapeutically interfering with progression of tau pathology and preventing the subsequent molecular and cellular consequences. Given that NFT are composed of a hyperphosphorylated, misfolded and aggregated form of tau, interference at each of these stages has yielded the most avidly pursued set of targets. Introducing agents that limit phosphorylation, block misfolding or prevent aggregation have all generated promising results. Passive and active immunization with late stage anti-phospho-tau antibodies in mouse models have led to dramatic decreases in tau aggregation and improvements in cognitive parameters. It has also been suggested that introduction of anti-tau antibodies can prevent the trans-neuronal spread of tau pathology.

[0513] The vectored antibody delivery (VAD) of tau disease associated antibodies of the present invention may be used to treat subjects suffering from AD and other tauopathies. In some cases, methods of the present invention may be used to treat subjects suspected of developing AD or other tauopathies.

### Frontotemporal Dementia ami Parkinsonism Linked to Chromosome 17 (FTDP-17)

[0514] Although Alzheimer's disease is, in part, characterized by the presence of tau pathology, no known mutations in the tau gene have been causally linked to the disease. Mutations in the tau gene have been shown to lead to an autosomal dominantly inherited tauopathy known as frontotemporal dementia and parkinsonism linked to chromosome 17 (FTDP-17) and demonstrate that alterations in tau can lead to neurodegenerative changes in the brain. Mutations in the tau gene that lead to FTDP-17 are thought to influence splicing patterns. thereby leading to an elevated proportion of tau with four microtubule binding domains (rather than three). These molecules are considered to be more arayloidogenic, meaning they are more likely to become hyperphosphorylated and more likely to aggregate into NFT (Button, M. et al., 1998, Nature 393(6686):702-5). Although physically and behaviorally, FTDP-17 patients can appear quite similar to Alzheimer's disease patients, at autopsy FTDP-17 brains lack the prominent Aβ plaque pathology of an AD brain (Gotz, J. et al. 2012, British Journal of Pharmacology 165(5):1246-59). Therapeutically targeting the aggregates of tau protein may ameliorate and prevent degenerative changes in the brain and potentially lead to improved cognitive ability.

[0515] As of today, there is no treatment to prevent, slow the progression, or cure FTD. Medication may be prescribed to reduce aggressive, agitated or dangerous behavior. There remains a need for therapy affecting the underlying pathophysiology, such as antibody therapies targeting tau protein.

[0516] In some embodiments, the vectored antibody delivery of the present invention may be used to treat subjects suffering from FTDP-17. In some cases, methods of the present invention may be used to treat subjects suspected of developing FTDP-17.

### Chronic Traumatic Encephalopathy

[0517] Unlike the genetically linked tauopathies, chronic traumatic encephalopathy is a degenerative tauopathy linked to repeated head injuries. The disease was first described in boxers whom behaved “punch drunk” and has since been identified primarily in athletes that play American football, ice hockey, wrestling and other contact sports. The brains of those suffering from CTE are characterized by distinctive patterns of brain atrophy accompanied by accumulation of hyperphosphorylated species of aggregated tau in NFT. In CTE, pathological changes in tau are accompanied by a number of other pathobiological processes, such as inflammation (Daneshvar, D. H. et al., 2015 Mol Cell Neurosci 66(Pt B): 81-90). Targeting the tau aggregates may provide reprieve from the progression of the disease and may allow cognitive improvement.

[0518] As of today, there is no medical therapy to treat or cure CTE. The condition is only diagnosed after death, due to lack of in vivo techniques to identify CTE specific biomarkers. There remains a need for therapy affecting the underlying pathophysiology, such as antibody therapies targeting tau protein.

[0519] In some embodiments, the vectored antibody deliver/methods of the present invention may be used to treat subjects suffering from CTE. In some cases, methods of the present invention may be used to treat, subjects suspected of developing CTE.

### Prion Diseases

[0520] Prion diseases, also known as transmissible spongiform encephalopathies (TSEs), are a group of rare progressive conditions affecting the nervous system. The related conditions are rare and are typically caused by mutations in the PRNP gene which enables production of the prion protein. Gene mutations lead to an abnormally structured prion protein. Alternatively, the abnormal prion may be acquired by exposure from an outside source, e.g. by consumption of beef products containing the abnormal prion protein. Abnormal prions are misfolded, causing the brain tissue to degenerate rapidly. Prion diseases include, but are not limited to, Creutzfeldt-Jakob disease (CJD), Gerstmann-Straussler-Scheinker syndrome (GSS), fatal insomnia (FFI), variably protease-sensitive prionopathy (VPSPr), and kuru. Prion diseases are rare. Approximately 350 cases of prion diseases are diagnosed in the US annually.

[0521] CJD is a degenerative brain disorder characterized by problems with muscular coordination, personality changes including mental impairment, impaired vision, involuntary muscle jerks, weakness and eventually coma. The most common categories of CJD are sporadic, hereditary due to a genetic mutation, and acquired. Sporadic CJD is the most common form affecting people with no known risk factors for the disease. The acquired form of CJD is transmitted by exposure of the brain and nervous system tissue to the prion. As an example, variant CJD (vCDJ) is linked to a bovine spongiform encephalopathy (BSE), also known as a ‘mad cow’ disease. CJD is fatal and patients typically die within one year of diagnosis.

[0522] Prion diseases are associated with an infectious agent consisting of an alternative conformational isoform of the prion protein, PrPSc. PrPSc replication is considered to occur through an induction of the infectious prion in the normal prion protein (PrP(C). The replication occurs without a nucleic acid.

[0523] As of today, there is no therapy to manage or cure CJD, or other prion diseases. Typically, treatment is aimed at alleviating symptoms and increasing comfortabiiity of the patient, e.g. with pain relievers. There remains a need for therapy affecting the underlying pathophysiology, such as antibody therapies targeting the prion protein.

[0524] In some embodiments, vectored antibody delivery methods of the present invention may be used to treat subjects suffering from a prion disease. In some cases, methods of the present invention may be used to treat subjects suspected of developing a prion disease.

### Neurodegeneration and Stroke

[0525] Neurodegenerative diseases and other diseases of the nervous system share many common features. Neurodegenerative diseases, in particular, are a group of conditions characterized by progressive loss of neuronal structure and function, ultimately leading to neuronal cell death. Neurons are the building blocks of the nervous system(s) and are generally not able to reproduce and/or be replaced, and therefore neuron damage and/or death is especially devastating. Other, non-degenerating diseases that lead to neuronal cell loss, such as stroke, have similarly debilitating outcomes. Targeting molecules that contribute to the deteriorating cell structure or function may prove beneficial generally for treatment of nervous system diseases, neurodegenerative disease and/or stroke.

[0526] Certain molecules are believed to have inhibitory effects on neurite outgrowth, contributing to the limited ability of the central nervous system to repair. Such molecules include, but are not limited to, myelin associated proteins, such as, but not limited to, RGM (Repulsive guidance molecule), NOGO (Neurite outgrowth inhibitor), NOGO receptor, MAG (myelin associated glycoprotein), and MAI (myelin associated inhibitor). In one embodiment, the vectored antibody delivery of the present invention is utilized to target the aforementioned antigens (e.g., neurite outgrowth inhibitors).

[0527] Many neurodegenerative diseases are associated with aggregation of misfolded proteins, including, but not limited to, alpha synuclein, tau, amyloid β, prion proteins, TDP-43, and huntingtin (see. e.g. De Genst et al. 2014, Biochim Biophys Acta;1844(11):1907-1919, and Yu et al, 2013, Neurotherapeutics.; 10(3): 459-472, references therein). The aggregation results from disease-specific conversion of soluble proteins to an insoluble, highly ordered fibrillary deposit. This conversion is thought to prevent the proper disposal or degradation of the misfolded protein, thereby leading to further aggregation. Conditions associated with alpha synuclein and tau may be referred to as “synucleinopathi.es” and “tauopathies”, respectively. In one embodiment, the vectored antibody delivery of the present invention is utilized to target the aforementioned antigens (e.g., misfolded or aggregated proteins).

### Other Therapeutic Targets

[0528] The AAV particles or pharmaceutical compositions of the present invention useful in preventing or treating tauopathies or tau-associated diseases may alternatively, or in combination, encode an antibody that does not bind to the tau protein (e.g., the antigen is a polypeptide other than tau). Non-limiting examples of other target antigens include any of the following, including fragments or variants thereof, α-synuclein (monomers, oligomers, aggregates, fragments), ABCA1 (ATP-binding cassette, sub-family A, member 1), ABCA4 (ATP-binding cassette, sub-family A, member 4), ABCB1 (ATP-binding cassette, sub-family B, member 1), ACE (angiotensin I converting enzyme), ACKR1 (atypical chemokine receptor 1 (Duffy blood group)), AMPA (DL-α-amino-3-hydroxy-5-methyl-4-isoxazole propionic acid), ACTH (Adrenocorticotropic Hormone), ACVR2A (Activin receptor type-2A), ACVR2B (Activin receptor type-2B), ADDL (Adducin-Like Protein 70), ADORA2A (adenosine A2a receptor), ADRA2A (adrenoceptor alpha 2A), ATFM1 (apoptosis-inducing factor), AKT1 (RAC-alpha serine/threnine-protein kinase), ALK-1 (activin receptor-like kinase 1), Alpha beta fibril, alpha subunit (basic helix-loop-helix transcription factor), AMT (Aminomethyltransferase), Amyloid β (monomers, oligomers, aggregates, fragments), amyloid or amyloid-like proteins, ANGPTL3 (Angiopoietin-Like 3), ANGTP1 (angiopoitin 1), ANGTP2 (angiopoietin 2), ANK3 (ankyrin 3), ANKG (ankyrin G), Annexin IV, phospholipid, Anx-A1 (annexin A1), APOE (apolipoprotein E), APP (amyloid beta precursor protein), ARSD (Arylsulfatase D), ATM (Ataxia Telangiectasia Mutated serine/threonine kinase), ATXN1 (ataxin 1), ATXN2 (ataxin 2), ATXN3 (ataxin 3), ATXN7 (ataxin 7), B Lymphocyte Stimulator, BDNF (brain-derived neurotrophic factor), beta A4 peptide/Alpha beta 4, beta A4 peptide, Alpha beta 5, bAlpha beta 6, Alpha beta 7, Alpha beta 8, Alpha beta 9, Beta-secretases (BACE), BRAF (B-Raf Proto-Oncogene, Serine/Threonine Kinase), Properdin (factor P), Factors Ba and Bb, C1, C1q (complement component 1, subcomponent q), C2, C3, C4, C3a, C3b, C5, C5a, C5b, C6, C7, C8, C9 and C5b-9 (complement components), CAIX (Carbonic anhydrase IX), CA 125 (cancer antigen 1.25), CACNA1A (calcium channel voltage-dependent P/Q type alpha 1A subunit), cadherins, CA-IX (carbonic anhydrase 9), CALCA (calcitonin-related polypeptide alpha), CCKBR (cholecystokinin B receptor), CCL11 (eotaxin-1), CCL2 (Chemokine (C-C Motif) Ligand 2), CD11 (integrin alpha component), CD 147 (basigin), CD154 (CD40L), CD 19 (Cluster of Differentiation 19), CD2 (cluster of differentiation 2), CD20 (B-lymphocyte antigen), CD200 (cluster of differentiation 200). CD22 (cluster of differentiation 22), CD221 (insulin-like growth factor 1 (IGF-1) receptor), CD248 (Endosialin), CD26 (Dipeptidyl peptidase-4), CD27 (antigen precursor), CD274 (cluster of differentiation 274), CD28 (Cluster of Differentiation 28), CD29 (Integrin, Beta 1), CD33 (cluster of differentiation 33), CD30 (cluster of differentiation 30), CD31 (cluster of differentiation 31), CD33 (cluster of differentiation 33), CD37 (Leukocyte antigen), CD38 (cyclic ADP ribose hydrolase), CD3E (T-Cell Surface Antigen T3/Leu-4 Epsilon Cham), CD4 (T-Cell Surface Antigen T4/Leu-3), CD40 (CD40 Molecule, TNF Receptor Superfamily Member 5), CD41 (Integrin, Alpha 2b (Platelet Glycoprotein IIb Of IIb/IIIa Complex, Antigen CD41)), CD44 (cluster of differentiation 44), CD51 (integrin alpha 1), CD52 (Human Epididymis-Specrfic Protein 5), CD55 (Decay Accelerating Factor For Complement (Cromer Blood Group)), CD58 (lymphocyte function-associated antigen 3), CD59 (MAC-inhibitory protein), CD6 (cluster of differentiation 6), CD70 (cluster of differentiation 70, ligand for CD27), CD74 (HLA class II histocompatibility aiitigen gamma chain), CD79B (immunoglobulin-associated beta), CEA (Carcinoembryonic antigen), CFHR1 (Complement Factor H-Related 1), CGRP (Calcitonin gene-related peptide), CFMP2B (charged multivesicular body protein 2B), CHRNA4 (cholinergic receptor nicotinic alpha 4 (neuronal)). CHRNB2 (cholinergic receptor nicotinic beta 2 (neuronal)), CISD2 (CDGSH iron sulfur domain 2), CLEC16A (C-type lectin domain family 16 member A), CLRN1 (clarin 1), CNR1 (cannabinoid receptor 1), CNTNAP2 (contactin associated protein-like 2), COMT (eatechol-O-methyltransferase), CRB1 (crumbs family member 1, photoreceptor morphogenesis associated), CRX (cone-rod homeobox), CRY (crystallin), CSF1R (Colony Stimulating Factor 1 Receptor), CSF2 (Colony Stimulating Factor 2 (Granulocyte-Macrophage)), CSF2RA (Colony Stimulating Factor 2 Receptor, Alpha, Low-Affinity). CTGF (Connective Tissue Growth Factor). CTLA4 (Cytotoxic T-Lymphocyte-Associated Protein 4), CXC (chemokine receptor type 4), CXCL.10 (Chemokine (C-X-C Motif) Ligand 10), DDC (dopa decarboxylase (aromatic L-amino acid decarboxylase)), DIABLO (IAP-Binding Mitochondrial Protein), differentiation factor 8 (GDF8), DISC1 (disrupted in schizophrenia 1), DLL3 (Delta-Like 3 (Drosophila)j, DLL4 (Delta-Like 4 (Drosophila)), DPP4 (dipeptyl-peptidase 4), DPP6 (dipeptidyl-peptidase 6), DR6 (Death receptor 6), DRD1 (dopamine receptor D1), DRD2 (dopamine receptor D2), DRD4 (dopamine receptor D4), DRD5 (dopamine receptor 5), DRD5 (dopamine receptor D5), DTNBP1 (dystrobrevin binding protein 1), EAG1 (Ether-A-Go-Go Potassium Channel 1). EDB (fibronectin extra domain-B), EDNRA (endothelin receptor type A), EFNA1 (Ephrin-A1), EGFL7 (EGF-Like-Domain, Multiple 7), EGFR/ERBB1/HER1 (epidermal growth factor receptor 1), EN2 (Engrailed Homeobox 2), EPCAM (Epithelial cell adhesion molecule). EPHA3 (EPH Receptor A3), episialin (a carcinoma-associated mucin, MUC-1), ERBB2 (epidermal growth factor receptor 2), ERBB3 (epidermal growth factor receptor 3), ESR1 (estrogen receptor 1), F3 (coagulation factor III), F9 (human factor 9), F10 (human factor 10), FAAH (fatty acid amide hydrolase), Factor D C3 proactivator convertase), humanized IgGl, humanized IgG2, FAP (Fibroblast Activation Protein, Alpha), FBN2 (fibrillin 2), FBP (Folate-binding protein), FcγRIIB (Fc receptor gamma B), FcγRIIIA (Fc receptor gamma A), FLT1 (Fms-Related Tyrosine Kinase 1), FOLR1 (folate receptor alpha), Frizzled receptor, FXN (frataxin), FUS/TLS (RNA binding protein), G protein-coupled, GAA (glucosidase alpha acid), Gc-globulin (Vitamin D binding protein), Gangliosides, GD2 (ganglioside G2), GD3 (ganglioside g3), GM2 (monosialotetrfihexosylganglioside 2) (GDF-8 (myostatin), GDNF (glial cell derived neurotrophic factor), GDNF (glial cell derived neurotrophic factor), GFAP (glial fibrillary acidic protein), GFRα3 (GDNF family receptor alpha-3), ghrelin, GIT1 (G protein-coupled receptor kinase interacting ArfGAP 1), GJA (Gap junction protein), GLDC Glycine Dehydrogenase (Decarboxylating), glycoprotein NMB (GPNMB), gpA33 (Glycoprotein A33 (Transmembrane)). GPC3 (glypican 3), GRIN2B (glutamate receptor ionotropic N-methyl D-aspartate 2B). GRN (granulin), GDF8 (growth differentiation factor 8), GTPases (guanosine triphosphate), GSTP1 (glutathione S-transferase pi 1), GUCA1A (guanylate cyclase activator 1A (retina), GUCY2C (anti-GCC), HMCN1 (hemicentin 1), HGF (Hepatocyte Growth Factor), HIF1A (hypoxia inducible factor 1, HINT1 (histidine triad nucleotide binding protein 1), HIST3H3 (Histone H3), histone, HLA-DQB1 (major histocompatibility complex class II DQ beta 1), HLA-DR (MHC class II cell surface receptor), HLA-DRB; (major histocompatibility complex class II DR beta 1), hNav1.7 (sodium ion channel), HTR1A (5-hydroxytryptamine (serotonin) receptor 1A G protein-coupled), HTR2A (5-hydroxytryptamine (serotonin) receptor 2A, HTR2A (5-hydroxytryptamine (serotonin) receptor 2A G protein-coupled), HIT (huntingtin), 1AP-binding mitochondrial protein, IFNAR1 (Interferon (Alpha, Beta And Omega) Receptor 1), IFNB1(interferon beta 1 fibroblast), IFN-γ (Interferon gamma), IGF-1 receptor, IGF1R (insulin-like growth factor 1 receptor), IGF-1 (insulin-like growth factor 1), IGG1 (immunoglobulin subclass 1), IgG2 (immunoglobulin subclass 2), lgG4 (immunoglobulin subclass 4), 1GHE (Immunoglobulin Heavy Constant Epsilon), IL 1B (interleukin 1 beta), IL12 (interleukin 12), IL12B (interleukin 12B), IL13 (interleukin 13), IL17A (interleukin 17A), IL17F (interleukin 17F), IL1A (interleukin 1 A), IL1B (interleukin 1 beta), IL1-Ri (Interleukin 1 receptor, type 1), IL20 (Interleukin 20), IL23A (interleukin 23A), IL-23p19 subunit (interleukin 23 subunit p19), IL2RA (interleukin 2 receptor alpha), IL4R (interleukin 4 receptor alpha, IL6 (inteleukin 6), IL6R (interleukin 6 receptor), IL7R (interleukin 7 receptor), ILGF2 (insulin like growth factor 2), INS (insulin), Integrin α5β1, Integrin αVβ3, integrin αIIpβ3/GPIIb/IIIa, IP6K2 (inositol hexakisphosphate kinase 2), ITGA4 (Integrin, Alpha 4 (Antigen CD49D, Alpha 4 Subunit Of VLA-4 Receptor)), ITGB7 (Integrin, Alpha 7 (Antigen CD49D, Alpha 4 Subunit Of VLA-7 Receptor)), ITGAL (integrin alpha L chain), ITGAV ((Vitronectin Receptor, Alpha Polypeptide, Antigen CD51), ITGB3 (Integrin alpha-V/beta-3), KCNQ2 (potassium channel voltage gated KQT-like subfamily Q member 2), KDR (Kinase Insert Domain Receptor), KIR2D (killer immunoglobulin-like receptor (KIR) 2D subtype), KLRC 1 (Killer Cell Lectin-Like Receptor Subfamily C, Member 1), LAG-3 (Lymphocyte-activation gene 3), Le (y) (Lewis y) antigen, LINGO (Leucine rich repeat and Immunoglobin-like domain-containing protein 1), LOXL2 (Lysyl oxidase homolog 2), LPG (lysophosphatidylglucoside), LPS (Lipopolysaccharides), LRP1 (low density lipoprotein receptor-related protein 1), I.RRC6 (Leucine Rich Repeat Containing 6), LRRK2 (leucine-rich repeat kinase 2), LTA (Lymphotoxin Alpha), MAF (maf avian musculoaponeurotic fibrosarcoma oncogene homolog), MAG (Myelin Associated Glycoprotein), MAI (myelin associated inhibitor), MAOB (monoamine oxidase B), MAPT (microtubule-associated protein tau), MBP (myelin basic protein), MCAF (monocyte chemotactic and activating factor), MCP-1 (Monocyte chemoattractant protein-1), MBL (mannose binding lectin), mannose, MET (Tyrosine-Protein Kinase Met), MIF (Macrophage Migration Inhibitor Factor (Glycosylation-Iiihibitmg Factor), MS4A1 (Membrane-Spanning 4-Domains, Subfamily A, Member 1), MSLN (Mesothelin), MST1R (Macrophage Stimulating 1 Receptor), MSTN (mayostatin), MUC1/Episialin, MUC5AC (Mucin 5 AC, Oligomeric Mueus/Gel-Forming), mucin CanAg (glycoform MUC-1), Mucins, myostatin, myostatin antagonists, N-acetyl glucosamine, NCAM1 (Neural Cell Adhesion Molecule 1), Neu5Gc/NGNA (Neurogenin A), neuregulin (NRG), neurokinin B, NGF (Nerve growth factor), NMDA (N-methyl-D-aspartate), NOGO (Neurite outgrowth inhibitor), NOGO receptor-1, Nogo-66, NOGOA/NiG (Neurite Outgrowth Inhibitory Fragments of NOGOA), Notch receptor, NOTCH-1 (Notch homolog 1, translocation-associated (Drosophila)), NRG1 (neuregulin 1), NRP1 (Neuropilin 1), NT-3 trkC ligand, N-terminal region of Aβ8-x peptide, OGG1 (8-oxoguanine DNA glycosylase), oligomers of N-terminal truncated Aβ, OPA2 (Optic Atrophy 2), OPA3 (Optic Atrophy 3), oxLDL (Oxidized low-density lipoprotein), P75 (Low-affinity Nerve Growth Factor Receptor), PAND1 9Panic disorder 1), PAND2 (Panic disorder 2), PAND3 9Panic disorder 3), PARK2 (parkin RBR E3 ubiquitin protein ligase). PCSK9 (proprotein convertase subtilisin/kexin type 9), PD-1 (Programmed cell death protein 1), PD-2 (Programmed cell death protein 2), PD-3 (Programmed cell death protein 3), PD-4 (Programmed cell death protein 4), PD-5 (Programmed cell death protein 5), PD-6 (Programmed cell death protein 6), PD-7 (Programmed cell death protein 7), PD-8 (Programmed cell death protein 8), PDGFRA (Platelet-derived growth factor receptor alpha), PDGFRB (Platelet-derived growth factor receptor beta), PD-L1 (Programmed cell death protein 1 ligand), PEX7 (Peroxisomal Biogenesis Factor 7), PHOBS (phobia specific), PhosphatidyL-serine, chimeric IgG1 Phosphatide L-serine, Chimeric IgG2, PINK1 (PTEN induced putative kinase 1), platelet-derived growth factor receptor beta PDGFRB, PLAU (plasminogen activator urokinase), PLP (protelopid protein). PMP22 (peripheral myelin protein 22), POLG (polymerase (DNA directed) gamma), PRDM16 (PR domain containing 16), Prion proteins. PrP, PrPC, PrPSc, PRKCG (protein kinase C gamma), PSEN1 (presenilin 1), PSEN2 (presenilin 2), PSMA (Prostate-specific membrane antigen), PTGS2 (prostaglandin-endoperoxide synthase 2 (prostaglandin G/H synthase and cyclooxygenase)), PTPN11 (Tyrosine-protein phosphatase non-receptor type 11), PVR14 (Poliovirus Receptor-Related 4), PVRL5 (Poliovirus Receptor-Related 5), pyroglutamated A RAf1 (proto-oncogene serine/threonine-protein kinase), RAGE protein, RANKL (Receptor activator of nuclear factor kappa-B ligand). RCAN1 (regulator of calcineurin 1), RDh12 (retinol dehydrogenase 12 (all-trans/9-cis/11-cis)), RGM A (Repulsive guidance molecule A), RHD (Rh blood group, D antigen), RHO (rhodopsin), RPE65 (retinal pigment epithelium-specific protein 65kDa), RTN4 (Reticulon-4, NOGO), S100B (calcium-binding protein R), S1P4 (Type 4 sphingosine 1-phosphate G protein-coupled receptor), SCN1A (Sodium Channel, Voltage Gated, Type I Alpha Subunit), SBC1 (Syndecan 1), selectin P, SHANK3 (SH3 And Multiple Ankyrin Repeat Domains 3), SLAMF7 (SLAM Family Member 7), SLC18A2 (solute carrier family 18 (vesicular monoamine transporter, member 2), SLC1A2 (solute carrier family 1 (glial high affinity glutamate transporter, member 2), SLC34A2 (Solute Carrier Family 34 (Type II Sodium/Phosphate Cotransporier), SLC6A3 (solute carrier family 6 (neurotransmitter transporter) member 3), SLC6A4 (Solute Carrier Family 6 (Neurotransmitter Transporter), SMN1 (survival of motor neuron 1 telomeric), SMN2 (survival of motor neuron 2 centromeric), SNCA (synuclein alpha (non A4 component of amyloid precursor)), SNCA (synuclem alpha (non A4 component of amyloid precursor), SNCB (synuclein beta), SOD1 (superoxide dismutase 1 soluble), SOST (Sclerostin), sphingosine-1-phosphate, SQSTM1 (sequestosome 1), STEAP1(Six Transmembrane Epithelial Antigen Of The Prostate 1), SULF2 (Sulfatase 2), TACR1 (tachykinin receptor 1), TAG-72 (Tumor-associated glycoprotein 72), TARDBP (TAR DNA binding protein), tau antigen, tau protein, tau pS422, TDP-43, tenascin, tenascin C, TFP1 (Tissue Factor Pathway Inhibitor (Lipoprotein-Associated Coagulation inhibitor)), TGF beta (Transforming growth factor beta), TH (Tyrosine hydroxylase), TkrC (Tropomyosin receptor kinase C), TMEFF2 (Transmembrane Protein With EGF-Like And Two Follistatin-Like Domains 2), TMEFF3 (Transmembrane Protein With EGF-Like And Two Follistatin-Like Domains 3), TNF (tumor necrosis factor), TNFa (tumor necrosis factor alpha), TNFRSF10B (Tumor Necrosis Factor Receptor Superfamily, Member 10b), TNFRSF12A (Tumor Necrosis Factor Receptor Superfamiiy, Member 12A), TNFRSF8 (Tumor Necrosis Factor Receptor Superfamily, Member 8), TNFRSF9 (Tumor Necrosis Factor Receptor Superfamiiy, Member 9), TNFSFI11 (Tumor Necrosis Factor Receptor Superfamiiy, Member 11), TNFSF13B (Tumor Necrosis Factor Receptor Superfamiiy, Member 13b), TNF-α (Tumor Necrosis Factor alpha)), TNNT2 (troponin T type 2), TOR1A (torsin family 1 member A (torsin A)), TP EG (Trophoblast Glycoprotein), TPH2 (tryptophan hydroxylase 2), TRAILR1 (Death receptor 4), TRAILR2 (Death receptor 5), TrkA (Tropomyosin receptor kinase A), TRPY4 (Transient Receptor Potential Cation Channel, Subfamily V, Member 4), TSC2 (tuberous sclerosis 2), TULP1 (tubby like protein 1), tumor necrosis factor related protein 5, tumor specific glycosylation of MUC1, tumor-associated calcium signal transducer 2, tumor protein p53, TYRP1 (glycoprotein 75), UCHI1 (ubiquitin carboxyl-terminal esterase L1 (ubiquitin thiolesterase)), UNC-13A (unc-13 homolog A), USH1C (Usher Syndrome 1C), USH2A (Usher Syndrome 2A (Autosomal Recessive, Mild), VEGF (Vascular endothelial growth factor), VEGF A (Vascular endothelial growth factor A), C5, Factor P, Factor D, EPO (Erythropoietin), EPOR (EPO receptor), Interleukins, IL-1β,IL-17A, Il-10, TNFα, FGFR2 (Fibroblast Growth Factor Receptor 2), VEGFR (vascular endothelial growth factor receptor), VEGFR2 (vascular endothelial growth factor receptor 2), vimentin, voltage gated ion channels, VWF (Von Willebrand Factor), WFS1 (Wolfram syndrome 1 (wolframin)), and YES1 (Yamaguchi Sarcoma Viral Oncogene Homolog 1).

[0529] In one embodiment, the AAV particle of the present invention, useful in treating a tauopathy or tau-associated disease, targets an antigen considered to be part, of the immune system (i.e., target antigens commonly associated with treatment of cancers or autoimmune diseases).

[0530] In one embodiment, tire AAV particle of the present invention, useful in treating a tauopathy or tau-associated disease, targets an antigen considered to be part of the inflammatory system (i.e., target antigens commonly associated with treatment of inflammatory diseases).

[0531] In one embodiment, the AAV particle of the present invention, useful in treating a tauopathy or tau-associated disease, targets an antigen considered to be pail, of the cell-death signaling cascade.

[0532] In one embodiment, the AAV particle of the present invention, useful in treating a tauopathy or tau-associated disease, targets an antigen considered to be a neuroprotective agent.

[0533] AAV Particles and methods of using the AAV particles described in the present invention may be used to prevent, manage and/or treat tauopathies or tau associated disease. As a non-limiting example, the AAV particles of the present invention comprise a nucleic acid sequence encoding at least one of the sequences described in Table 3 or Table 4 (SEQ ID NO: 2948-4269 and 4276-4320).

### V. KITS AND DEVICES

### Kits

[0534] In one embodiment, the invention provides a variety of kits for conveniently and/or effectively carrying out methods of the present invention. Typically, kits will comprise sufficient amounts and/or numbers of components to allow a user to perform multiple treatments of a suhject(s) and/or to perform multiple experiments.

[0535] Any of the AAV particles of the present invention may be comprised in a kit. In some embodiments, kits may further include reagents and/or instructions for creating and/or synthesizing compounds and/or compositions of the present invention. In some embodiments, kits may also include one or more buffers. In some embodiments, kits of the invention may include components for making protein or nucleic acid arrays or libraries and thus, may include, for example, solid supports.

[0536] In some embodiments, kit components may be packaged either in aqueous media or lyophilized form. The container means of the kits will generally include at least one vial, test tube, flask, bottle, syringe or other container means, into which a component may be placed, and preferably, suitably aliquoted. Where there is more than one kit component, (labeling reagent and label may be packaged together), kits may also generally contain second, third or other additional containers into which additional components may be separately placed. In some embodiments, kits may also comprise second container means for containing sterile, pharmaceutically acceptable buffers and/or other diluents. In some embodiments, various combinations of components may be comprised in one or more vial. Kits of the present invention may also typically include means for containing compounds and/or compositions of the present invention, e.g., proteins, nucleic acids, and any other reagent containers in close confinement for commercial sale. Such containers may include injection or blow-molded plastic containers into which desired vials are retained.

[0537] In some embodiments, kit components are provided in one and/or more liquid, solutions. In some embodiments, liquid solutions are aqueous solutions, with sterile aqueous solutions being particularly preferred. In some embodiments, kit components may be provided as dried powder(s). When reagents and/or components are provided as dry powders, such powders may be reconstituted by the addition of suitable volumes of solvent, in some embodiments, it is envisioned that solvents may also be provided in another container means. In some embodiments, labeling dyes are provided as dried powders. In some embodiments, it is contemplated that 10, 20, 30, 40, 50, 60, 70, 80, 90, 100, 120, 120, 130, 140, 150, 160, 170, 180, 190, 200, 300, 400, 500, 600, 700, 800, 900, 1000 micrograms or at least or at most those amounts of dried dye are provided in kits of the invention. In such embodiments, dye may then be resuspended in any suitable solvent, such as DMSO.

[0538] In some embodiments, kits may include instructions for employing kit components as well the use of any other reagent not included in the kit. Instructions mav include variations that may be implemented.

### Devices

[0539] In one embodiment, the AAV particles may delivered to a subject using a device to deliver the AAV particles and a head fixation assembly. The head fixation assembly may be, but is not limited to, any of the head fixation assemblies sold by MRI interventions. As a non-limiting example, the head fixation assembly may be airy of the assemblies described in U.S. Pat. Nos. 8,099,150, 8,548,569, and 9,031,636 and International Patent Publication Nos. WO201108495 and WO2014014585, the contents of each of which are incorporated by reference in their entireties. A head fixation assembly may be used in combination with an MRI compatible drill such as, but not limited to, the MRI compatible drills described in International Patent Publication No. WO2013181008 and US Patent Publication No. US20130325012, the contents of which are herein incorporated by reference in its entirety.

[0540] In one embodiment, the AAV particles may be delivered using a method, system and/or computer program for positioning apparatus to a target point on a subject to deliver the AAV particles. As a non-limiting example, the method, system and/or computer program may be the methods, systems and/or computer programs described in U.S. Pat. No. 8,340,743, the contents of which are herein incorporated by reference in its entirety. The method may include: determining a target point in the body and a reference point, wherein the target point and the reference point define a planned trajectory line (PTL) extending through each; determining a visualization plane, wherein the PTL intersects the visualization plane at a sighting point; mounting the guide device relative to the body to move with respect to the PTL, wherein the guide device does not intersect the visualization plane; determining a point of intersection (GPP) between the guide axis and the visualization plane; and aligning the GPP with the sighting point in the visualization plane.

[0541] In one embodiment, the AAV particles may be delivered to a subject using a convention-enhanced delivery device. Non-limiting examples of targeted delivery of drugs using convection are described in US Patent Publication Nos. US20100217228, US20130035574, and US 20130035660 and International Patent Publication No. WO2013019830 and WO2008144585, the contents of each of which are herein incorporated by reference in their entireties.

[0542] In one embodiment, a subject may be imaged prior to, during and or after delivery of the AAV particles. The imaging method may be a method known in the art and/or described herein, such as but not limited to, magnetic resonance imaging (MRI). As anon-limiting example, imaging may be used to assess therapeutic effect. As another non-limiting example, imaging may be used for assisted delivery of AAV particles.

[0543] In one embodiment, the AAV particles may be delivered using an MRI-guided device. Non-limiting examples of MRI-guided devices are described in U.S. Pat. Nos. 9,055,884, 9,042,958, 8,886,288, 8,768,433, 8,396,532, 8,369,930, 8,374,677, and 8,175,677 and US Patent Application No. US20140024927 the contents of each of which are herein incorporated by reference in their entireties. As a non-limiting example, the MRI-guided device may be able to provide data in real time such as those described in U.S. Pat. Nos. 8,886,288 and 8,768,433, the contents of each of which is herein incorporated by reference in its entirety. As another non-limiting example, the MRI-guided device or system may be used with a targeting cannula such as the systems described in U.S. Pat. Nos. 8,175,677 and 8,374,677, the contents of each of which are herein incorporated, by reference in their entireties. As yet another non-limiting example, the MRI-guided device includes a trajectory guide frame for guiding an interventional device as described, for example, in U.S. Pat. 9,055,884 and US Patent Application No. US20140024927, the contents of each of which are herein incorporated by reference in their entireties.

[0544] In one embodiment, the AAV particles may be delivered using an MRI-compatible tip assembly. Non-limiting examples of MRI-compatible tip assemblies are described in US Patent Publication No. US20140275980, the contents of which is herein incorporated by reference in its entirety.

[0545] In one embodiment, the AAV particles may be delivered using a cannula which is MRI-compatible. Non-limiting examples of MRI-compatible cannulas include those taught in International Patent Publication No. WO2011130107, the contents of which are herein incorporated by reference in its entirety.

[0546] In one embodiment, the AAV particles may be delivered using a catheter which is MRI-compatible. Non-limiting examples of MRI-compatible catheters include those taught in International Patent Publication No. WO2012116265, U.S. Pat. No. 8,825,133 and US Patent Publication No. US20140024909, the contents of each of which are herein incorporated by reference in their entireties.

[0547] In one embodiment, the AAV particles may be delivered using a device with an elongated tubular body and a diaphragm as described in US Patent Publication Nos. US20140276582 and US20140276614, the contents of each of which are herein incorporated by reference in their entireties,

[0548] In one embodiment, the AAV particles may be delivered using an MRI compatible localization and/or guidance system such as, but not limited to, those described in US Patent Publication Nos. US20150223905 and US20150230871, the contents of each of which are herein incorporated by reference in their entireties. As a non-limiting example, the MRI compatible localization and/or guidance systems may comprise a mount adapted for fixation to a patient, a targeting cannula with a lumen configured to attach to the mount so as to be able to controllably translate in at least three dimensions, and an elongate probe configured to snugly advance via slide and retract in the targeting cannula lumen, the elongate probe comprising at least one of a stimulation or recording electrode.

[0549] In one embodiment, the AAV particles may be delivered to a subject using a trajectory frame as described in US Patent Publication Nos. US20150031982 and US20140066750 and International Patent Publication Nos. WO2015057807 and WO2014039481, the contents of each of which are herein incorporated by reference in their entireties.

[0550] In one embodiment, the AAV particles may be delivered to a subject using a gene gun.

### VI. DEFINITIONS

[0551] At various places in the present specification, substituents of compounds of the present disclosure are disclosed in groups or in ranges. It is specifically intended that the present disclosure include each and every individual subcombination of the members of such groups and ranges.

[0552] About: As used herein, the term “about” means +/−10% of the recited value.

[0553] Adeno-associated virus: The term “adeno-associated virus” or “AAV” as used herein refers to members of the dependovirus genus comprising any particle, sequence, gene, protein, or component derived therefrom.

[0554] AAV Particle: As used herein, an “AAV particle” is a vims which comprises a viral genome with at least one payload region and at least one ITR region. AAV vectors of the present disclosure may be produced recombinantly and may be based on adeno-associated virus (AAV) parent or reference sequences. AAV particle may be derived from any serotype, described herein or known in the art, including combinations of serotypes (i.e., “pseudotyped” AAV) or from various genomes (e.g., single stranded or self-complementary). In addition, the AAV particle may be replication defective and/or targeted.

[0555] Activity: As used herein, the term “activity” refers to the condition in which things are happening or being done. Compositions of the invention may have activity and this activity may involve one or more biological events.

[0556] Administered in combination: As used herein, the term “administered in combination” or “combined administration” means that two or more agents are administered to a subject at the same time or w ithin an interval such that there may be an overlap of an effect of each agent on the patient. In some embodiments, they are administered within about 60, 30, 15, 10, 5, or 1 minute of one another. In some embodiments, the administrations of the agents are spaced sufficiently closely together such that a combinatorial (e.g., a synergistic) effect is achieved.

[0557] Amelioration: As used herein, the term “amelioration” or “ameliorating” refers to a lessening of severity of at least one indicator of a condition or disease. For example, in the context of neurodegeneration disorder, amelioration includes the reduction of neuron loss.

[0558] Animal: As used herein, the term “animal” refers to any member of the animal kingdom. In some embodiments, “animal” refers to humans at any stage of development. In some embodiments, “animal” refers to non-human animals at any stage of development. In. certain embodiments, the non-human animal is a mammal (e.g., a rodent, a mouse, a rat, a rabbit, a monkey, a dog, a cat, a sheep, cattle, a primate, or a pig). In some embodiments, animals include, but are not limited to, mammals, birds, reptiles, amphibians, fish, and worms. In some embodiments, the animal is a transgenic animal, genetically-engineered animal, or a clone.

[0559] Antibody: As used herein, the term “antibody” is referred to in the broadest sense and specifically covers various embodiments including, but not limited to monoclonal antibodies, polyclonal antibodies, multispecific antibodies (e.g. bispecific antibodies formed from at least two intact antibodies), and antibody fragments (e.g., diabodies) so long as they exhibit a desired biological activity (e.g., “functional”). Antibodies are primarily amino-acid based molecules but may also comprise one or more modifications (including, but not limited to the addition of sugar moieties, fluorescent moieties, chemical tags, etc.). Non-limiting examples of antibodies or fragments thereof include V_{H} and V_{L} domains, scFvs, Fab, Fab′, F(ab*)₂, Fv fragment, diabodies, linear antibodies, single chain antibody molecules, multispecific antibodies, bispeclfic antibodies, intrabodies, monoclonal antibodies, polyclonal antibodies, humanized antibodies, codon-optimized antibodies, tandem scFv antibodies, bispecifie T-eeil engagers, mAb2 antibodies, chimeric antigen receptors (CAR), tetravalent bispeclfic antibodies, biosynthetic antibodies, native antibodies, miniaturized antibodies, unibodies, maxibodies, antibodies to senescent cells, antibodies to conformers, antibodies to disease specific epitopes, or antibodies to innate defense molecules.

[0560] Antibody-based composition: As used herein, “antibody-based” or “antibody-derived” compositions are monomelic or multi-meric polypeptides which comprise at least one amino-acid region derived, from a known or parental antibody sequence and at least one amino acid region derived from a non-antibody sequence, e.g., mammalian protein.

[0561] Approximately: As used herein, the term “approximately” or “about,” as applied to one or more values of interest, refers to a value that is similar to a stated reference value. In certain embodiments, the term “approximately” or “about” refers to a range of values that fall within 25%, 20%, 19%, 18%, 17%, 16%, 15%, 14%, 13%, 12%, 11%, 10%, 9%, 8%, 7%, 6%, 5%, 4%, 3%, 2%, 1%, or less in either direction (greater than or less than) of the stated reference value unless otherwise stated or otherwise evident from the context (except where such number would exceed 100% of a possible value).

[0562] Associated with: As used herein, the terms “associated with,” “conjugated,” “linked,” “attached,” and “tethered,” when used with respect to two or more moieties, means that the moieties are physically associated or connected with one another, either directly or via one or more additional moieties that serves as a linking agent, to form a structure that is sufficiently stable so that the moieties remain physically associated under the conditions in which the structure is used, e.g., physiological conditions. An “association” need not be strictly through direct covalent chemical bonding. It may also suggest ionic or hydrogen bonding or a hybridization based connectivity sufficiently stable such that the “associated” entities remain physically associated.

[0563] Bijunctional: As used herein, the term “bifunctional” refers to any substance, molecule or moiety which is capable of or maintains at least two functions. The functions may affect the same outcome or a different outcome. The structure that produces the function may be the same or different.

[0564] Biocompatible: As used herein, the term “biocompatible” means compatible with living cells, tissues, organs or systems posing little to no risk of injury, toxicity or rejection by the immune system.

[0565] Biodegradable: As used herein, the term “biodegradable” means capable of being broken down into innocuous products by the action of living things.

[0566] Biologically active: As used herein, the phrase “biologically active” refers to a characteristic of any substance that has activity in a biological system and/or organism. For instance, a substance that, when administered to an organism, has a biological effect on that organism, is considered to be biologically active, in particular embodiments, an AAV particle of the present invention may be considered biologically active if even a portion of the encoded payload is biologically active or mimics an activity considered biologically relevant.

[0567] Capsid: As used herein, the term “capsid” refers to the protein shell of a virus particle.

[0568] Chimeric antigen receptor (CAE): As used herein, the term, “chimeric antigen receptor” or “CAR” refers to an artificial chimeric protein comprising at least one antigen specific targeting region (ASTR), a transmembrane domain and an intracellular signaling domain, wherein the antigen specific targeting region comprises a full-length antibody or a fragment thereof. As a non-limiting example the ASTR of a CAR may be any of the antibodies listed in Table 3, antibody-based compositions or fragments thereof. Any molecule that is capable of binding a target antigen with high affinity can be used in the ASTR of a CAR. The CAR may optionally have an extracellular spacer domain and or a co-stimulatory domain. A CAR may also be used to generate a cytotoxic cell carrying the CAR.

[0569] Complementary and substantially complementary: As used herein, the term “complementary” refers to the ability of polynucleotides to form base pairs with one another. Base pairs are typically formed by hydrogen bonds between nucleotide units in amiparallel polynucleotide strands. Complementary polynucleotide strands can form base pair in the Watson-Crick manner (e.g., A to T, A to U, C to G), or in any other manner that allows for the formation of duplexes. As persons skilled in the art are aware, when using RNA as opposed to DNA, uracil rather than thymine is the base that is considered to be complementary to adenosine. However, when a U is denoted in the context of the present invention, the ability to substitute a T is implied, unless otherwise stated. Perfect complementarity or 100% complementarity refers to the situation in which each nucleotide unit of one polynucleotide strand can form hydrogen bond with a nucleotide unit of a second polynucleotide strand. Less than perfect complementarity refers to the situation in which some, but not all, nucleotide units of two strands can form hydrogen bond with each other. For example, for two 20-mers, if only two base pairs on each strand can form hydrogen bond with each other, the polynucleotide strands exhibit 10% complementarity. In the same example, if 18 base pairs on each strand can form hydrogen bonds with each other, the polynucleotide strands exhibit 90% complementarity. As used herein, the term “substantially complementary” means that the siRNA has a sequence (e.g., in the antisense strand) which is sufficient to bind the desired target mRNA, and to trigger the RNA silencing of the target mRNA.

[0570] Compound: (Compounds of the present disclosure include all of the isotopes of the atoms occurring in the intermediate or final compounds. “Isotopes” refers to atoms having the same atomic number but different mass numbers resulting from a different number of neutrons in the nuclei. For example, isotopes of hydrogen include tritium and deuterium.

[0571] The compounds and salts of the present disclosure can be prepared in combination with solvent or water molecules to form solvates and hydrates by routine methods.

[0572] Comprehensive Positional Evolution (CPE™): As used herein, the term “comprehensive positional evolution” refers to an antibody evolution technology that allows for mapping of the effects of amino acid changes at every position along an antibody variable domain's sequence. This comprehensive mutagenesis technology can be used to enhance one or more antibody properties or characteristics.

[0573] Comprehensive Protein Synthesis (CPS™): As used herein, the term “comprehensive protein synthesis” refers to a combinatorial protein synthesis technology that can be used to optimize antibody properties or characteristics by combining the best properties into anew, high-performance antibody.

[0574] Conditionally active: As used herein, the term “conditionally active” refers to a mutant or variant of a wild-type polypeptide, wherein the mutant or variant is more or less active at physiological conditions than the parent polypeptide. Further, the conditionally active polypeptide may have increased or decreased activity at aberrant conditions as compared to the parent polypeptide. A conditionally active polypeptide may be reversibly or irreversibly inactivated at normal physiological conditions or aberrant conditions.

[0575] Conserved. As used herein, the term “conserved” refers to nucleotides or amino acid residues of a polynucleotide sequence or polypeptide sequence, respectively, that are those that occur unaltered in the same position of two or more sequences being compared. Nucleotides or amino acids that are relatively conserved are those that are conserved amongst more related sequences than nucleotides or amino acids appearing elsewhere in the sequences.

[0576] In some embodiments, two or more sequences are said to be “completely conserved” if they are 100% identical to one another. In some embodiments, two or more sequences are said to be “highly conserved” if they are at least 70% identical, at least 80% identical, at least 90% identical, or at least 95% identical to one another, in some embodiments, two or more sequences are said to be “highly conserved” if they are about 70% identical, about 80% identical, about 90% identical, about 95%, about 98%, or about 99% identical to one another. In some embodiments, two or more sequences are said to be “conserved” if they are at least 30% identical, at least 40% identical, at least 50% identical, at least 60% identical, at least 70% identical, at least 80% identical, at least 90% identical, or at least 95% identical to one another. In some embodiments, two or more sequences are said to be “conserved” if they are about 30% identical, about 40% identical, about 50% identical, about 60% identical, about 70% identical, about 80% identical, about 90% identical, about 95% identical, about 98% identical, or about 99% identical to one another. Conservation of sequence may apply to the entire length of a polynucleotide or polypeptide or may apply to a portion, region or feature thereof.

[0577] Control Elements: As used herein, “control, elements”, “regulatory control element”, or “regulatory sequences” refers to promoter regions, polyadenylation signals, transcription termination sequences, upstream regulatory domains, origins of replication, internal ribosome entry sites (“IRES”), enhancers, and the like, which provide for the replication, transcription and translation of a coding sequence in a recipient cell. Not all of these control elements need always be present as long as the selected coding sequence is capable of being replicated, transcribed and/or translated in an appropriate host cell.

[0578] Controlled Release: As used herem, the term “controlled release” refers to a pharmaceutical composition or compound release profile that conforms to a particular pattern of release to effect a therapeutic outcome.

[0579] Cytostatic: As used herein, “cytostatic” refers to inhibiting, reducing, suppressing the growth, division, or multiplication of a cell (e.g., a mammalian cell (e.g., a human cell)), bacterium, virus, fungus, protozoan, parasite, prion, or a combination thereof.

[0580] Cytotoxic: As used herein, “cytotoxic” refers to killing or causing injurious, toxic, or deadly effect on a cell (e.g., a mammalian cell (e.g., a human cell)), bacterium, virus, fungus, protozoan, parasite, prion, or a combination thereof.

[0581] Delivery: As used herein, “delivery” refers to the act or manner of delivering an AAV particle, a compound, substance, entity, moiety, cargo or payload.

[0582] Delivery Agent: As used herein, “delivery agent” refers to any substance which facilitates, at least in part, the in vivo delivery of an AAV particle to targeted cells.

[0583] Destabilized: As used herein, the term “destabie”, “destabilize”, or “destabilizing region” means a region or molecule that is less stable than a starting, wild-type or native form of the same region or molecule.

[0584] Detectable label: As used herein, “detectable label” refers to one or more markers, signals, or moieties which are attached, incorporated or associated with another entity that is readily detected by methods known in the art including radiography, fluorescence, chemiluminescence, enzymatic activity, absorbance and the like. Detectable labels include radioisotopes, fluorophores, chromophores, enzymes, dyes, metal ions, ligands such as biotin, avidin, streptavidin and haptens, quantum dots, and the like. Detectable labels may be located at any position in the peptides or proteins disclosed herein. They may be within the amino acids, the peptides, or proteins, or located at the N- or C-termini.

[0585] Digest: As used herein, the term “digest” means to break apart into smaller pieces or components. When referring to polypeptides or proteins, digestion results in the production of peptides.

[0586] Distal: As used herein, the term “distal” means situated away from the center or away from a point or region of interest.

[0587] Dosing regimen: As used herein, a “dosing regimen” is a schedule of administration or physician determined regimen of treatment, prophylaxis, or palliative care.

[0588] Encapsulate: As used herein, the term “encapsulate” means to enclose, surround or encase.

[0589] Engineered: As used herein, embodiments of the invention are “engineered” when they are designed to have a feature or property, whether structural or chemical, that varies from a starting point, wild type or native molecule.

[0590] Effective Amount: As used herein, the term “effective amount” of an agent is that amount sufficient to effect beneficial or desired results, for example, clinical results, and, as such, an “effective amount” depends upon the context in which it is being applied. For example, in the context of administering an agent that treats cancer, an effective amount of an agent is, for example, an amount sufficient to achieve treatment, as defined herein, of cancer, as compared to the response obtained without administration of the agent.

[0591] Epitope: As used herein, an “epitope” refers to a surface or region on a molecule that is capable of interacting with a biomolecule. For example, a protein may contain one or more amino acids, e.g., an epitope, which interacts with an antibody, e.g., a biomolecule. In some embodiments, when referring to a protein or protein module, an epitope may comprise a linear stretch of amino acids or a three-dimensional structure formed by folded amino acid chains.

[0592] EvoMap™: As used herein, an EvoMap™ refers to a map of a polypeptide, wherein detailed informatics are presented about the effects of single amino acid mutations within the length of the polypeptide and their influence on the properties and characteristics of that polypeptide.

[0593] Expression: As used herein, “expression” of a nucleic acid sequence refers to one or more of the following events: (1) production of an RNA template from a DNA sequence (e.g., by transcription); (2) processing of an RNA transcript (e.g., by splicing, editing, 5′ cap formation, and/or 3′ end processing), (3) translation of an RNA into a polypeptide or protein, and (4) post-translational modification of a polypeptide or protein.

[0594] Feature: As used herein, a “feature” refers to a characteristic, a property, or a distinctive element.

[0595] Formulation: As used herein, a “formulation” includes at least one AAV particle and a delivery agent.

[0596] Fragment: A “fragment,” as used herein, refers to a portion. For example, fragments of proteins may comprise polypeptides obtained by digesting full-length protein isolated from cultured cells.

[0597] Functional: As used herein, a “functional” biological molecule is a biological molecule in a form in which it exhibits a property and/or activity by which it is characterized.

[0598] Gene expression: The term “gene expression” refers to the process by which a nucleic acid sequence undergoes successful transcription find in most instances translation to produce a protein or peptide. For clarity, when reference is made to measurement of “gene expression”, this should be understood to mean that measurements may be of the nucleic acid product of transcription, e.g., RNA or mRNA or of the amino acid product of translation, e.g., polypeptides or peptides. Methods of measuring the amount or levels of RNA, mRNA, polypeptides and peptides are well known in the art.

[0599] Homology: As used, herein, the term “homology” refers to the overall relatedness between polymeric molecules, e.g. between polynucleotide molecules (e.g. DNA molecules and/or RNA molecules) and/or between polypeptide molecules. In some embodiments, polymeric molecules are considered to be “homologous” to one another if their sequences are at least 25%, 30%, 35%, 40%, 45%, 50%, 55%, 60%, 65%. 70%, 75%, 80%, 85%, 90%, 95%, or 99% identical or similar. The term “homologous” necessarily refers to a comparison between at least two sequences (polynucleotide or polypeptide sequences). In accordance with the invention, two polynucleotide sequences are considered to be homologous if the polypeptides they encode are at least about 50%, 60%, 70%, 80%, 90%, 95%, or even 99% for at least one stretch of at least about 20 amino acids. In some embodiments, homologous polynucleotide sequences are characterized by the ability to encode a stretch of at least 4-5 uniquely specified amino acids. For polynucleotide sequences less than 60 nucleotides in length, homology is determined by the ability to encode a stretch of at least 4-5 uniquely specified amino acids. In accordance with the invention, two protein sequences are considered to be homologous if the proteins are at least about 50%, 60%, 70%, 80%, or 90% identical for at least one stretch of at least about 20 amino acids.

[0600] Heterologous Region: As used herein the term “heterologous region” refers to a region which would not be considered a homologous region.

[0601] Homologous Region: As used herein the term “homologous region” refers to a region which is similar in position, structure, evolution origin, character, form or function.

[0602] Identity: As used herein, the term “identity” refers to the overall relatedness between polymeric molecules, e.g., between polynucleotide molecules (e.g. DNA molecules and/or RNA molecules) and/or between polypeptide molecules. Calculation of the percent identity of two polynucleotide sequences, for example, can be performed by aligning the two sequences for optimal comparison purposes (e.g., gaps can be introduced in one or both of a first and a second nucleic acid sequences for optimal alignment and non-identical sequences can be disregarded for comparison purposes). In certain embodiments, the length of a sequence aligned for comparison purposes is at least 30%, at least 40%, at least 50%, at least 60%, at least 70%, at least 80%, at least 90%, at least 95%, or 100% of the length of the reference sequence. The nucleotides at corresponding nucleotide positions are then compared. When a position in the first sequence is occupied by the same nucleotide as the corresponding position in the second sequence, then the molecules are identical at that position. The percent identity between the two sequences is a function of the number of identical positions shared by the sequences, taking into account the number of gaps, and the length of each gap, which needs to be introduced for optimal alignment of the two sequences. The comparison of sequences and determination of percent identity between two sequences can be accomplished using a mathematical algorithm. For example, the percent identity between two nucleotide sequences can be determined using methods such as those described in Computational Molecular Biology, Lesk, A. M., ed., Oxford University Press, New York, 1988; Biocomputing: Informatics and Genome Projects, Smith, D. W., ed., Academic Press, New York, 1993: Sequence Analysis in Molecular Biology, von Heinje, G., Academic Press, 1987; Computer Analysis of Sequence Data, Part I, Griffin, A. M., and Griffin, H. G., eds., Humana Press, New Jersey, 1994; and Sequence Analysis Primer, Gribskov, M. and Devereux, J., eds., M Stockton Press, New York, 1991; each of which is incorporated herein by reference. For example, the percent identity between two nucleotide sequences can be determined using the algorithm of Meyers and Miller (CABIOS, 1989, 4:11-17), which has been incorporated into the ALIGN program (version 2.0) using a PAM120 weight residue table, a gap length penalty of 12 and a gap penalty of 4. The percent identity between two nucleotide sequences can, alternatively, be determined using the (JAP program in the GCG software package using an NWSgapdna CMP matrix. Methods commonly employed to determine percent identity between sequences include, but are not limited to those disclosed in Carillo, H. and Lipman, D., SIAM J Applied Math., 48:1073 (1988); incorporated herein by reference. Techniques for determining identity are codified in publicly available computer programs. Exemplar computer software to determine homology between two sequences include, but are not limited to, GCG program package, Devereux, J., et al., Nucleic Acids Research, 12(1), 387 (1984)). BLASTP, BLASTN, and FASTA Altschul, S. F. et al., J. Molec. Biol., 215, 403 (1990)).

[0603] Inhibit expression of a gene: As used herein, the phrase “inhibit expression of a gene” means to cause a reduction in the amount of an expression product of the gene. The expression product can be an RNA transcribed from the gene (e.g., an mRNA) or a polypeptide translated from an mRNA transcribed from the gene. Typically, a reduction in the level of an mRNA results in a reduction in the level of a polypeptide translated therefrom. The level of expression may be determined using standard techniques for measuring mRNA or protein.

[0604] In vitro: As used herein, the term “in vitro” refers to events that occur in an artificial environment, e.g., in a test tube or reaction vessel, in cell culture, in a Petri dish, etc., rather than within an organism (e.g., animal, plant, or microbe).

[0605] In vivo: As used herein, the term “in vivo” refers to events that occur within an organism (e.g., animal, plant, or microbe or cell or tissue thereof).

[0606] Isolated: As used herein, the term “isolated” refers to a substance or entity that has been separated from at least some of the components with which it was associated (whether in nature or in an experimental setting). Isolated substances may have varying levels of purity in reference to the substances from which they have been associated. Isolated substances and/or entities may be separated from at least about 10%, about 20%, about 30%, about 40%, about 50%, about 60%, about 70%, about 80%, about 90%, or more of the other components with which they were initially associated. In some embodiments, isolated agents are more than about 80%, about 85%, about 90%, about 91%, about 92%, about 93%, about 94%, about 95%, about 96%, about 97%, about 98%, about 99%, or more than about 99% pure. As used herein, a substance is “pure” if it is substantially free of other components.

[0607] Substantially isolated: By “substantially isolated” is meant that a substance is substantially separated from the environment in which it was formed or detected. Partial separation can include, for example, a composition enriched in the substance or AAV particles of the present disclosure. Substantial separation can include compositions containing at least about 50%, at least about 60%, at least about 70%, at least about 80%, at least about 90%, at least about 95%, at least about 97%, or at least about 99% by weight of the compound of the present disclosure, or salt thereof. Methods for isolating compounds and their salts are routine in the art.

[0608] Linker: As used herein “linker” refers to a molecule or group of molecules which connects two molecules, such as a V_{H} chain and V_{L} chain or an antibody. A linker may be a nucleic acid sequence connecting two nucleic acid sequences encoding two different polypeptides. The linker may or may not be translated. The linker may be a cleavable linker.

[0609] MicroRNA (miRNA) binding site: As used herein, a microRNA (miRNA) binding site represents a nucleotide location or region of a nucleic acid transcript to which at least the “see” region of a miRNA binds.

[0610] Modified: As used herein “modified” refers to a changed state or structure of a molecule of the invention. Molecules may be modified in many ways including chemically, structurally, and functionally.

[0611] Naturally Occurring: As used herein, “naturally occurring” or “wild-type” means existing in nature without artificial aid, or involvement of the hand of man.

[0612] Non-human vertebrate: As used herein, a “non-human vertebrate” includes all vertebrates except Homo sapiens, including wild and domesticated species. Examples of non-human vertebrates include, but are not limited to, mammals, such as alpaca, banteng, bison, camel, cat, cattle, deer, dog, donkey, gayal, goat, guinea pig, horse, llama, mule, pig, rabbit, reindeer, sheep water buffalo, and yak.

[0613] Off-target: As used herein, “off target” refers to any unintended effect on any one or more target, gene, or cellular transcript.

[0614] Open reading frame: As used herein, “open reading frame” or “ORF” refers to a sequence which does not contain a. stop codon in a given reading frame.

[0615] Operably linked: As used herein, the phrase “operably linked” refers to a functional connection between two or more molecules, constructs, transcripts, entities, moieties or the like.

[0616] Particle: As used herein, a “particle” is a virus comprised of at least two components, a protein capsid and a polynucleotide sequence enclosed within the capsid.

[0617] Patient: As used herein, “patient” refers to a subject who may seek or be in need of treatment, requires treatment, is receiving treatment, will receive treatment, or a subject who is under care by a trained professional for a particular disease or condition.

[0618] Payload: As used herein, “payload” or “payload region” refers to one or more polynucleotides or polynucleotide regions encoded by or within a viral genome or an expression product of such polynucleotide or polynucleotide region, e.g., a transgene, a polynucleotide encoding a polypeptide or raulti-polypeptide or a modulatory nucleic acid or regulatory nucleic acid.

[0619] Payload construct: As used herein, “payload construct” is one or more polynucleotide regions encoding or comprising a payload that is flanked on one or both sides by an inverted terminal repeat (ITR) sequence. The payload construct is a template that is replicated in a viral production cell to produce a viral genome.

[0620] Payload construct vector. As used herein, “payload construct vector” is a vector encoding or comprising a payload construct, and regulatory regions tor replication and expression in bacterial cells.

[0621] Payload construct expression vector: As used herein, a “payload construct expression vector” is a vector encoding or comprising a payload construct and which further comprises one or more polynucleotide regions encoding or comprising components for viral expression in a viral replication cell.

[0622] Peptide: As used herein, “peptide” is less than or equal to 50 amino acids long, e.g., about 5, 10, 15, 20, 25, 30, 35, 40, 45, or 50 amino acids long.

[0623] Pharmaceutically acceptable: The phrase “pharmaceutically acceptable” is employed herein to refer to those compounds, materials, compositions, and/or dosage forms which are, within the scope of sound medical judgment, suitable for use in contact with the tissues of human beings and animals without excessive toxicity, irritation, allergic response, or other problem or complication, commensurate with a reasonable benefit/risk ratio.

[0624] Pharmaceutically acceptable excipients: The phrase “pharmaceutically acceptable excipient,” as used herein, refers any ingredient other than the compounds described herein (for example, a vehicle capable of suspending or dissolving the active compound) and having the properties of being substantially nontoxic and non-inflammatory in a patient. Excipients may include, for example: antiadherents, antioxidants, binders, coatings, compression aids, disintegrants, dyes (colors), emollients, emulsifiers, fillers (diluents), film formers or coatings, flavors, fragrances, glidants (flow enhancers), lubricants, preservatives, printing inks, sorbents, suspensing or dispersing agents, sweeteners, and waters of hydration. Exemplary excipients include, but are not limited to: butyiated hydroxytoluene (BHT), calcium carbonate, calcium phosphate (dibasic), calcium stearate, croscarmellose, crosslinked polyvinyl pyrrolidone, citric acid, crospovidone, cysteine, ethylcellulose, gelatin, hydroxypropyl cellulose, hydroxypropyl methylcellulose, lactose, magnesium stearate, maltitol, mannitol, methionine, methyl cellulose, methyl paraben, microcrystalline cellulose, polyethylene glycol, polyvinyl pyrrolidone, povidone, pregelatinized starch, propyl paraben, retinyl palmitate, shellac, silicon dioxide, sodium carboxymethyl cellulose, sodium citrate, sodium starch glycolate, sorbitol, starch (corn), stearic acid, sucrose, talc, titanium dioxide, vitamin A, vitamin E, vitamin C, and xyiitol.

[0625] Pharmaceutically acceptable salts: The present disclosure also includes pharmaceutically acceptable salts of the compounds described herein. As used herein, “pharmaceutically acceptable salts” refers to derivatives of the disclosed compounds wherein the parent compound is modified by converting an existing acid or base moiety to its salt form (e.g., by reacting the free base group with a suitable organic acid). Examples of pharmaceutically acceptable salts include, but are not limited to, mineral or organic acid salts of basic residues such as amines; alkali or organic salts of acidic residues such as carboxylic acids; and the like. Representative acid addition salts include acetate, acetic acid, adipate, alginate, ascorbate, aspartate, benzenesulfonate, benzene sulfonic acid, benzoate, bisulfate, borate, butyrate, campborate, camphorsulfonate, citrate, cyclopentanepropionate, digluconate, dodecyisulfate, ethanesuifonate, fumarate, glucoheptonate, glycerophosphate, hemisulfate, heptonate, hexanoate, hydrobromide, hydrochloride, hydroiodide, 2-hydroxy-ethanesulfonate, lactobionate, lactate, laurate, laurvl sulfate, malate, maleate, malonate, methanesulfonate, 2-naphthalenesulfonate, nicotinate, nitrate, oleate, oxalate, palmitate, pamoate, pectinate, persulfate, 3-phenylpropionate, phosphate, picrate, pivalate, propionate, stearate, succinate, sulfate, tartrate, thiocyanate, toluenesulfonate, undecanoate, valerate salts, and the like. Representative alkali or alkaline earth metal salts include sodium, lithium, potassium, calcium, magnesium, and the like, as well as nontoxic ammonium, quaternary ammonium, and amine cations, including, but not limited to ammonium, tetramethylammonium, tetraethylammonium, methylamme, dimethylamme, trimethylamine, triethylamine, ethylamine, and the like. The pharmaceutieally acceptable salts of the present disclosure include the conventional non-toxic salts of the parent compound formed, for example, from non-toxic inorganic or organic acids. The pharmaceuticallv acceptable salts of the present disclosure can be synthesized from the parent compound which contains a basic or acidic moiety by conventional chemical methods. Generally, such salts can be prepared by reacting the free acid or base forms of these compounds with a stoichiometric amount of the appropriate base or acid in water or in an organic solvent, or in a mixture of the two; generally, nonaqueous media like ether, ethyl acetate, ethanol, isopropanol, or acetonitrile are preferred. Lists of suitable salts are found in Remington's Pharmaceutical Sciences, 17^{th} ed., Mack Publishing Company, Easton, Pa., 1985, p. 1418, Pharmaceutical Salts: Properties, Selection, and Use, P. H. Stahl and C. G. Wermuth (eds.), Wiley-VCH, 2008, and Berge et al., Journal of Pharmaceutical Science, 66, 1-19 (1977), each of which is incorporated herein by reference in its entirety.

[0626] Pharmaceutieally acceptable solvate: The term “pharmaceutieally acceptable solvate,” as used herein, means a compound of the invention wherein molecules of a suitable solvent are incorporated in the crystal lattice. A suitable solvent is physiologically tolerable at the dosage administered. For example, solvates may be prepared by crystallization, recrystallization, or precipitation from a solution that includes organic solvents, water, or a mixture thereof. Examples of suitable solvents are ethanol, water (for example, mono-, di-, and tri-hydrates), N-methylpyrrolidinone (NMP), dimethyl sulfoxide (DMSO), N,N′-dimethylformamide (DMF), N,N′-dimethylacetamide (DMAC), 1,3-dimethyl-2-imidazolidinone (DMEU), 1,3-dimethyl-3,4,5,6-tetrahydro-2-(1H)-pyrimidinone (DMPI), acetonitrile (ACN), propylene glycol, ethyl acetate, benzyl alcohol, 2-pyrrolidone, benzyl benzoate, and the like. When water is the solvent, the solvate is referred to as a “hydrate.”

[0627] Pharmacokinetic: As used herein, “pharmacokinetic” refers to any one or more properties of a molecule or compound as it relates to the determination of the fate of substances administered to a living organism. Pharmacokinetics is divided into several areas including the extent and rate of absorption, distribution, metabolism and excretion. This is commonly referred to as ADME where: (A) Absorption is the process of a substance entering the blood circulation; (D) Distribution is the dispersion or dissemination of substances throughout the fluids and tissues of the body: (M) Metabolism (or Biotransformation) is the irreversible transformation of parent compounds into daughter metabolites; and (E) Excretion (or Elimination) refers to the elimination of the substances from the body. In rare cases, some drugs irreversibly accumulate in body tissue.

[0628] Physicochemical: As used herein, “physicochemical” means of or relating to a physical and/or chemical property.

[0629] Preventing: As used herein, the term “preventing” refers to partially or completely delaying onset of an infection, disease, disorder and/or condition; partially or completely delaying onset of one or more symptoms, features, or clinical manifestations of a particular infection, disease, disorder, and/or condition, partially or completely delaying onset of one or more symptoms, features, or manifestations of a particular infection, disease, disorder, and/or condition: partially or completely delaying progression from an infection, a particular disease, disorder and/or condition; and/or decreasing the risk of developing pathology associated with the infection, the disease, disorder, and/or condition.

[0630] Proliferate: As used herein, the term “proliferate” means to grow, expand or increase or cause to grow, expand or increase rapidly. “Proliferative” means having the ability to proliferate. “Anti-proliferative” means having properties counter to or inapposite to proliferative properties.

[0631] Prophylactic: As used herein, “prophylactic” refers to a therapeutic or course of action used to prevent the spread of disease.

[0632] Prophylaxis: As used herein, a “prophylaxis” refers to a measure taken to maintain health and prevent the spread of disease.

[0633] Protein of interest: As used herein, the terms “proteins of interest” or “desired proteins” include those provided herein and fragments, mutants, variants, and alterations thereof.

[0634] Proximal: As used herein, the term “proximal” means situated nearer to the center or to a point or region of interest.

[0635] Purified: As used herein, “purify,” “purified,” “purification” means to make substantially pure or clear from unwanted components, material defilement, admixture or imperfection. “Purified” refers to the state of being pure, “Purification” refers to the process of making pure.

[0636] Region: As used herein, the term “region” refers to a zone or general area. In some embodiments, when referring to a protein or protein module, a region may comprise a linear sequence of amino acids along the protein or protein module or may comprise a three-dimensional area, an epitope and/or a cluster of epitopes. In some embodiments, regions comprise terminal regions. As used herein, the term “terminal region” refers to regions located at the ends or termini of a given agent. When referring to proteins, terminal regions may comprise N- and/or C-termim. N-termini refer to the end of a protein comprising an amino acid with a free amino group. C-termini refer to the end of a protein comprising an amino acid with a free earboxyl group. N- and/or C-terminal regions may there for comprise the N- and/or C-termim as well as surrounding amino acids. In some embodiments, N- and/or C-terminal regions comprise from about 3 amino acid to about 30 amino acids, from about 5 amino acids to about 40 amino acids, from about 10 amino acids to about 50 amino acids, from about 20 amino acids to about 100 amino acids and/or at least 100 amino acids. In some embodiments, N-terminal regions may comprise any length of amino acids that includes the N-terminus, but does not include the C-terminus. In some embodiments, C-terminal regions may comprise any length of amino acids, which include the C-terminus, but do not comprise the N-terminus.

[0637] In some embodiments, when referring to a polynucleotide, a region may comprise a linear sequence of nucleic acids along the polynucleotide or may comprise a three-dimensional area, secondary structure, or tertiary structure. In some embodiments, regions comprise terminal regions. As used herein, the term “terminal region” refers to regions located at the ends or termini of a given agent. When referring to polynucleotides, terminal regions may comprise 5′ and 3′ termini. 5′ termini refer to the end of a polynucleotide comprising a nucleic acid with a free phosphate group. 3′ termini refer to the end of a polynucleotide comprising a nucleic acid with a free hydroxyl group. 5′ and 3′ regions may there for comprise the 5′ and 3′ termini as well as surrounding nucleic acids. In some embodiments, 5′0 and 3′ terminal regions comprise from about 9 nucleic acids to about 90 nucleic acids, from about 15 nucleic acids to about 120 nucleic acids, from about 30 nucleic acids to about 150 nucleic acids, from about 60 nucleic acids to about 300 nucleic acids and/or at least 300 nucleic acids. In some embodiments, 5′ regions may comprise any length of nucleic acids that includes the 5′ terminus, but does not include the 3′ terminus. In some embodiments, 3′ regions may comprise any length of nucleic acids, which include the 3′ terminus, but does not comprise the 5′ terminus.

[0638] RNA or RNA molecule: As used herein, the term “RNA” or “RNA molecule” or “ribonucleic acid molecule” refers to a polymer of ribonucleotides; the term “DNA” or “DNA molecule” or “deoxyribonucleic acid molecule” refers to a polymer of deoxyribonucleotides. DNA and RNA can be synthesized naturally, e.g., by DNA replication and transcription of DNA, respectively; or be chemically synthesized. DNA and RNA can be single-stranded (i.e., ssRNA or ssDNA, respectively) or multi-stranded (e.g., double stranded, i.e., dsRNA and dsDNA, respectively). The term “mRNA” or “messenger RNA”, as used herein, refers to a single stranded RNA that encodes the amino acid sequence of one or more polypeptide chains.

[0639] Sample: As used herein, the term “sample” or “biological sample” refers to a subset of its tissues, cells or component parts (e.g. body fluids, including but not limited to blood, mucus, lymphatic fluid, synovial fluid, cerebrospinal fluid, saliva, amniotic fluid, amniotic cord blood, urine, vaginal fluid and semen). A sample further may include a homogenate, lysate or extract prepared from a whole organism or a subset of its tissues, cells or component parts, or a fraction or portion thereof, including but not limited to, for example, plasma, serum, spinal fluid, lymph fluid, the external sections of the skin, respiratory, intestinal, and genitourinary tracts, tears, saliva, milk, blood cells, tumors, organs. A sample further refers to a medium, such as a nutrient broth or gel, which may contain cellular components, such as proteins or nucleic acid molecule.

[0640] Self-complementary viral particle: As used herein, a “self-complementary viral particle” is a particle comprised of at least two components, a protein capsid and a polynucleotide sequence encoding a self-complementary genome enclosed within the capsid.

[0641] Signal Sequences: As used herein, the phrase “signal sequences” refers to a sequence which can direct the transport or localization of a protein.

[0642] Single unit dose: As used herein, a “single unit dose” is a dose of any therapeutic administered in one dose/at one time/single route/single point of contact, i.e., single administration event. In some embodiments, a single unit dose is provided as a discrete dosage form. (e.g., a tablet, capsule, patch, loaded syringe, vial, etc.).

[0643] Similarity: As used herein, the term “similarity” refers to the overall relatedness between polymeric molecules, e.g. between polynucleotide molecules (e.g. DNA molecules and/or RNA molecules) and/or between polypeptide molecules. Calculation of percent similarity of polymeric molecules to one another can be performed in the same maimer as a calculation of percent identity, except that calculation of percent similarity takes into account conservative substitutions as is understood in the art.

[0644] Split dose: As used herein, a “split dose” is the division of single unit dose or total daily dose into two or more doses.

[0645] Stable: As used herein “stable” refers to a compound that is sufficiently robust to survive isolation to a useful degree of purity from, a reaction mixture, and preferably capable of formulation into an efficacious therapeutic agent.

[0646] Stabilized: As used herein, the term “stabilize”, “stabilized,” “stabilized region” means to make or become stable.

[0647] Subject: As used herein, the term “subject” or “patient” refers to any organism to which a composition in accordance with the invention may be administered, e.g., for experimental, diagnostic, prophylactic, and/or therapeutic purposes. Typical subjects include animals (e.g., mammals such as mice, rats, rabbits, non-human primates, and humans) and/or plains.

[0648] Substantially. As used herein, the terra “substantially” refers to the qualitative condition of exhibiting total or near-total extent or degree of a characteristic or property of interest. One of ordinary skill in the biological arts will understand that biological and chemical phenomena rarely, if ever, go to completion and/or proceed to completeness or achieve or avoid an absolute result. The term “substantially” is therefore used herein to capture the potential lack of completeness inherent in many biological and chemical phenomena.

[0649] Substantially equal: As used herein as it relates to time differences between doses, the term means plus/minus 2%.

[0650] Substantially simultaneously: As used herein and as it relates to plurality of doses, the term means within 2 seconds.

[0651] Suffering from: An individual who is “suffering from” a disease, disorder, and/or condition has been diagnosed with or displays one or more symptoms of a disease, disorder, and/or condition.

[0652] Susceptible to: An individual who is “susceptible to” a disease, disorder, and/or condition has not been diagnosed with and/or may not exhibit symptoms of the disease, disorder, and/or condition but harbors a propensity to develop a disease or its symptoms. In some embodiments, an individual who is susceptible to a disease, disorder, and/or condition (for example, cancer) may be characterized by one or more of the following: (1) a genetic mutation associated with development of the disease, disorder, and/or condition; (2) a genetic polymorphism associated with development of the disease, disorder, and/or condition; (3) increased and/or decreased expression and/or activity of a protein and/or nucleic acid associated with the disease, disorder, and/or condition; (4) habits and/or lifestyles associated with development of the disease, disorder, and/or condition; (5) a family history of the disease, disorder, and/or condition; and (6) exposure to and/or infection with a microbe associated with development of the disease, disorder, and/or condition. In some embodiments, an individual who is susceptible to a disease, disorder, and/or condition will develop the disease, disorder, and/or condition, in some embodiments, an individual who is susceptible to a disease, disorder, and/or condition will not develop the disease, disorder, and/or condition.

[0653] Sustained release: As used herein, the terra “sutained release” refers to a pharmaceutical composition or compound release profile that conforms to a release rate over a specific period of time.

[0654] Synthetic: The term “synthetic” means produced, prepared, and/or manufactured by the hand of man. Synthesis of polynucleotides or polypeptides or other molecules of the present invention may be chemical or enzymatic.

[0655] Targeting: As used herein, “targeting” means the process of design and selection of nucleic acid sequence that will hybridize to a target nucleic acid and induce a desired effect.

[0656] Targeted Cells: As used herein, “targeted cells” refers to any one or more cells of interest. The cells may be found in vitro, in vivo, in situ or in the tissue or organ of an organism. The organism may be an animal, preferably a mammal, more preferably a human and most preferably a patient.

[0657] Therapeutic Agent: The term “therapeutic agent” refers to any agent that, when administered to a subject, has a therapeutic, diagnostic, and/or prophylactic effect and/or elicits a desired biological and/or pharmacological effect.

[0658] Therapeutically effective amount: As used herein, the term “therapeutically effective amount” means an amount of an agent to be delivered (e.g., nucleic acid, drug, therapeutic agent, diagnostic agent, prophylactic agent, etc.) that is sufficient, when administered to a subject suffering from or susceptible to an infection, disease, disorder, and/or condition, to treat, improve symptoms of, diagnose, prevent, and/or delay the onset of the infection, disease, disorder, and/or condition. In some embodiments, a therapeutically effective amount is provided in a single dose. In some embodiments, a therapeutically effective amount is administered in a dosage regimen comprising a plurality of doses. Those skilled in the art will appreciate that in some embodiments, a unit dosage form may be considered to comprise a therapeutically effective amount of a particular agent or entity if it comprises an amount that is effective when administered as part of such a dosage regimen.

[0659] Therapeutically effective outcome: As used herein, the term “therapeutically effective outcome” means an outcome that is sufficient in a subject suffering from or susceptible to an infection, disease, disorder, and/or condition, to treat, improve symptoms of, diagnose, prevent, and/or delay the onset of the infection, disease, disorder, and/or condition.

[0660] Total daily dose: As used herein, a “total daily dose” is an amount given or prescribed in 24 hr period. It may be administered as a single unit dose.

[0661] Transfection: As used herein, the term “transfection” refers to methods to introduce exogenous nucleic acids into a cell. Methods of transfection include, but are not limited to, chemical methods, physical treatments and cationic lipids or mixtures.

[0662] Treating: As used herein, the term “treating” refers to partially or completely alleviating, ameliorating, improving, relieving, delaying onset of, inhibiting progression of, reducing severity of, and/or reducing incidence of one or more symptoms or features of a particular infection, disease, disorder, and/or condition. For example, “treating” cancer may refer to inhibiting survival, growth, and/or spread of a tumor. Treatment may be administered to a subject who does not exhibit signs of a disease, disorder, and/or condition and/or to a subject who exhibits only early signs of a disease, disorder, and/or condition for the purpose of decreasing the risk of developing pathology associated with the disease, disorder, and/or condition.

[0663] Unmodified: As used herein, “unmodified” refers to any substance, compound or molecule prior to being changed in any way. Unmodified may, but does not always, refer to the wild type or native form of a biomolecule. Molecules may undergo a series of modifications whereby each modified molecule may serve as the “unmodified” starting molecule for a subsequen t modification.

[0664] Vector: As used herein, a “vector” is any molecule or nicuety which transports, transduces or otherwise acts as a carrier of a heterologous molecule. Vectors of the present invention may be produced recombinantly and may be based on and/or may comprise adeno-associated virus (AAV) parent or reference sequence. Such parent or reference AAV sequences may serve as an original, second, third or subsequent sequence for engineering vectors. In non-limiting examples, such parent or reference AAV sequences may comprise any one or more of the following sequences: a polynucleotide sequence encoding a polypeptide or multi-polypeptide, which sequence may be wild-type or modified from wild-type and which sequence may encode full-length or partial sequence of a protein, protein domain, or one or more sub units of a protein; a polynucleotide comprising a modulatory or regulatory nucleic acid which sequence may be wild-type or modified from wild-type; and a transgene that may or may not be modified from wild-type sequence. These AAV sequences may serve as either the “donor” sequence of one or more codons (at the nucleic acid level) or amino acids (at the polypeptide level) or “acceptor” sequences of one or more codons (at the nucleic acid level) or amino acids (at the polypeptide level).

[0665] Viral genome: As used herein, a “viral genome” or “vector genome” is a polynucleotide comprising at least one inverted terminal repeat (ITR) and at least one encoded payload. A viral genome encodes at least one copy of the payload.

[0666] Described herein are compositions, methods, processes, kits and devices for the design, preparation, manufacture and/or formulation of AAV particles. In some embodiments, payloads, such as but not limited to AAV polynucleotides, may be encoded by payload constructs or contained within plasmids or vectors or recombinant adeno-associated viruses (AAVs).

[0667] The details of one or more embodiments of the invention are set forth in the accompanying description below. Although any materials and methods similar or equivalent to those described herein can be used in the practice or testing of the present invention, the preferred materials and methods are now described. Other features, objects and advantages of the invention will be apparent from the description. In the description, the singular forms also include the plural unless the context clearly dictates otherwise. Unless defined otherwise, ail technical and scientific terms used herein have the same meaning as commonly understood by one of ordinary skill in the art to which this invention belongs. In the case of conflict, the present description will control.

[0668] The present invention is further illustrated by the following non-limiting examples.

### VII. EXAMPLES

### Example 1

### Production and Purification of AAV particles

[0669] AAV particles described herein may be produced using methods known in the art, such as, for example, triple transfection or baculovirus mediated virus production. Any suitable permissive or packaging cell known in the art may be employed to produce the vectors. Mammalian cells are often preferred. Also preferred are trans-complementing packaging cell lines that provide functions deleted from a replication-defective helper virus, e.g., 293 cells or other E1a trans-complementing cells.

[0670] The gene cassette may contain some or all of the parvovirus (e.g., AAV) cap and rep genes. Preferably, however, some or all of the cap and rep functions are provided in trans by introducing a packaging vector(s) encoding the capsid and/or Rep proteins into the cell. Most preferably, the gene cassette does not encode the capsid or Rep proteins. Alternatively, a. packaging cell line is used that is stably transformed to express the cap and/or rep genes.

[0671] Recombinant AAV virus particles are, in some cases, produced and purified from culture supematants according to the procedure as described in US20160032254, the contents of which are incorporated by reference. Production may also involve methods known in the art including those using 293T cell, sf9 insect cells, triple transfection or any suitable production method.

[0672] In some cases, 293 cells are transfected with CaPO4 with plasmids required for production of AAV, i.e., AAV2 rep, an adenoviral helper construct and a ITR flanked transgene cassette. The AAV2 rep plasmid also contains the cap sequence of the particular virus being studied. Twenty-four hours after transfection, which occurs in serum containing DMEM, the medium is replaced with fresh medium with or without serum. Three (3) days after transfection, a sample is taken from the culture medium of the 293 adherent cells. Subsequently cells are scraped and transferred into a receptacle. After centrifugation to remove cellular pellet, a second sample is taken from the supernatant after scraping. Next cell lysis is achieved by three consecutive freeze-thaw cycles (−80 C. to 37 C.). Cellular debris is removed and sample 3 is taken from the medium. The samples are quantified for AAV particles by DNase resistant genome titration by Taqman™ PCR. The total production yield from such a transfection is equal to the particle concentration from sample 3.

[0673] AAV vector titers are measured according to genome copy number (genome particles per milliliter). Genome particle concentrations are based on Taqman™ PCR of the vector DNA as previously reported (Clark et al. (1999) Hum. Gene Ther., 10:1031-1039; Veldwijk et al. (2002) Moi. Ther., 6:272-278).

### Example 2

### Tissue Specific Expression

[0674] To evaluate the expression of various encoded antibody pay loads in tissues, a series of AAV particles carrying the encoded antibody sequences driven by a panel of ubiquitous and tissue-specific promoters are made. These particles are administered to the specific tissue, e.g., intramuscularly, via an appropriate route, e.g., a single injection in the gastrocnemius muscle and expression is monitored to determine the relative expression potential of the payload as well as of each promoter in this target tissue. Measurement of antibody production is performed using standard techniques, for example by ELISA.

[0675] In some cases, the cytomegalovirus immediate early promoter (CMV), chimeric chicken-beta-actin (CAG), and ubiquitin C (UBC), CBA, H1 promoters provide robust expression.

### Example 3

### Generation of Antibodies

### Antibody Production by Hybridoma Technology

[0676] Host animals (e.g. mice, rabbits, goats, and llamas) are immunized by an injection with an antigenic protein (e.g., tau) to elicit lymphocytes that specifically bind to the antigen (e.g., tau). Lymphocytes are collected and fused with immortalized cell lines to generate hybridomas. Hybridomas are cultured in a suitable culture medium that is enriched with appropriate selection agents to promote growth.

[0677] Antibodies produced by the cultured hybridomas are subjected to analysis to determine binding specificity of the antibodies for the target antigen. Once antibodies with desirable characteristics are identified, corresponding hybridomas are subcloned through limiting dilution procedures and grown by standard methods. Antibodies produced by these cells are isolated and purified using standard immunoglobulin purification procedures.

### Recombinant Antibody Production

[0678] Recombinant antibodies are produced using heavy and light chain variable region cDNA sequences selected from hybridomas or from other sources. Sequences encoding antibody variable domains expressed by hybridomas are determined by extracting RNA molecules from antibody-producing hybridoma cells and producing cDNA by reverse transcriptase polymerase chain reaction (PCR). PCR is used to amplify cDNA using primers specific for heavy and light chain sequences. PCR products are then subcloned into plasmids for sequence analysis. Antibodies are produced by insertion of resulting variable domain sequences into expression vectors.

[0679] Recombinant antibodies are also produced using phage display technology. Target antigens are screened, in vitro, using phage display libraries having millions to billions of phage particles expressing unique single chain variable fragments (scFvs) on their viral coat. Precipitated phage particles are analyzed and sequences encoding expressed scFvs are determined. Sequences encoding antibody variable domains and/or CDRs are inserted into expression vectors for antibody production.

[0680] Recombinant antibodies are further produced using yeast surface display technology, wherein antibody variable domain sequences are expressed on the cell surface of Saccharomyces cerevisiae. Recombinant antibodies are developed by displaying the antibody fragment of interest as a fusion to e.g. Aga2p protein on the surface of the yeast, where the protein interacts with proteins and small molecules in a solution. scFvs with affinity towards desired receptors are isolated from the yeast surface using magnetic separation and flow cytometry. Several cycles of yeast surface display and isolation will be done to attain scFvs with desired properties through directed evolution.

### Example 4

### Optimization of the Encoded Antibody

[0681] To design an optimal framework for the expression of an antibody, the heavy and light chains of several antibodies separated by an F2A self-processing peptide sequence are cloned into a mammalian expression vector under the control of the CMV promoter. 293T cells or any suitable cell line transfected with these vectors exhibit secretion of human IgG into the culture supernatant that is then detected by ELISA.

[0682] To increase expression, the antibody chains and/or the processing peptide are codon optimized for mammalian expression, in some instances, a furin cleavage site at the N-terminus is inserted for better processing.

[0683] To improve secretion of the antibody, the endogenous signal sequences are replaced with a sequence which may or may not be codon optimized, derived from any gene. In some cases, the human growth hormone signal sequence is used. Any of the heavy, light or both chains may be driven by any signal sequence, whether the same or different. Antibody expression is confirmed using standard immunohistochemical techniques, including ELISA.

### Example 5

### Vectored Antibodies

[0684] Viral genomes are designed for AAV delivery of antibodies to cells. The viral genome comprises a payload region and at least one inverted terminal repeat (ITR) region. The payload region may optionally encode regulatory elements e.g., a promoter region, an intronic region, or a polyadenylation sequence. The payload region comprises a sequence encoding one or more polypeptides selected from the group consisting of those listed in Table 3. An exemplary payload region comprises a sequence encoding an antibody heavy chain, a region encoding an antibody light chain and a region encoding a linker connecting the heavy and light chain sequences or polypeptides before further processing. A promoter is selected to target the desired tissue or for desired regulation of expression, or both. The promoter may be selected from human EF1α, CMV, CBA, and its derivative C AG, GUSB, UBC, or any other promoter known to one with skill in the art, or combinations thereof. The 5′ and 3′ ITRs may or may not be of the same serotype as the capsid of the AAV particle.

[0685] Payload regions may optionally encode a linker between light and heavy antibody chain sequences or polypeptides. Sequence encoding linkers are derived from an internal ribosome entry site (IRES; SEQ ID NO: 899), foot and mouth disease virus 2A (F2A; SEQ ID NO: 900), porcine teschovirus-1 virus 2A (P2A; SEQ ID NO: 901), a furin cleavage site (F; SEQ ID NO: 902), or a 5×G4S (SEQ ID NO: 4321 encoded by SEQ ID NO: 903) linker sequence. In various payload regions, the order of heavy and light chains is alternated with respect to 5′ to 3′ direction. Payioads are further designed to encode protein signal sequences (to aid in protein processing, localization, and/or secretion) as well as an untranslated poly A tail.

[0686] Each viral genome is then incorporated into an AAV cloning vector to create payload expression vectors.

[0687] The payload expression vectors are expressed in e.g. Expi293 cells. The supematants are collected and expressed antibodies are purified using protein A/G beads. Supematants are diluted with a loading buffer and applied, to a column prepared with A/G beads. Unbound proteins are washed through with loading buffer. Elution buffer is added to the column, fractions collected, and fractions containing proteins of interest are identified with absorption spectroscopy technique, pooled together, and neutralized. Western blotting techniques are used, to identify payload regions producing the antibody proteins of interest. Purified antibodies are then tested for their affinity to their specific target by e.g. ELISA essay technique and antibodies with the highest affinity are identified and selected.

[0688] Finally, the rAAVs are produced, using, for example, HEK293T cells. The cells are transfected simultaneously with the viral genome of the present invention, a viral genome encoding helper proteins and a viral genome encoding replication and capsid proteins.

### Example 6

### In Vivo Expression and Efficacy of Antibody Payloads

[0689] To determine the efficacy or comparative expression of encoded antibodies, dose-dependent expression is determined at a series of time points. Samples from mice treated with AAV particles encoding antibodies or luciferase at various levels are examined for expression using standard techniques such as nucleic acid analyses for RNA levels, protein analyses for antibody levels and compared to the expression of the luciferase control.

### Example 7

### Treatment of Tau-Assodated Disease

[0690] AAV particles of the current invention for delivery of an antibody are administered to a patient who has been diagnosed with a tau associated disease, disorder or condition. The purpose of the treatment may be aimed to manage the disease, prevent or slow the progression of the disease, treat, the symptoms associated with the disease ami/or cure the disease.

[0691] The AAV particles are administered to a subject by IV, ICV, I/Pa or IT administration. The administration may include one or more injections over a period of time. The level and distribution of AAV particles and antibody expression is monitored by standard diagnostic techniques known in the art. Such diagnostic techniques include e.g. (e.g. from blood, urine, or saliva), cerebrospinal fluid (CSF) testing, or any other testing useful for monitoring antibody levels in the body.

[0692] Additionally, the progression of the disease and the health of the patient is monitored by standard diagnostic techniques known in the art. Such techniques may include diagnostic imaging (e.g. X-ray, MRI scans, Ultrasound scans, PET scans, Nuclear scans, mammography), biopsy, laboratory tests (e.g. from blood, urine, or saliva), cerebrospinal fluid (CSF) testing, vital signs, clinical tests (cognitive, motor or reflex tests) and other relevant techniques. Treatment with the AAV particles may results in cure of the tau-associated disease, slowing down or stabilizing the progression of the disease, or have no effect on the progression of the disease. Additionally, the treatment may reduce seventy of one or more symptoms associated with the disease, eliminate one or more symptoms associated with the disease or have no effect on the symptoms.

### Example 8

### Payloads for Tau Associated Diseases

[0693] Payloads were designed for viral delivery of anti-tau antibodies MC-1 (with heavy chain of SEQ ID NO: 2948 and light chain of SEQ ID NO: 3153), PHF1 (with heavy chain of SEQ ID NO: 2949 and tight chain of SEQ ID NO: 3154) and IPN002 (with heavy chain of SEQ ID NO: 2950 and light chain of SEQ ID NO: 3155) to cells. The viral genome includes, besides the coding region, a 5′ ITR (SEQ ID NO: 4270), CB6 promoter (SEQ ID NO: 4271), SV40 intron (SEQ ID NO: 4272), rabbit globin poly A tail (SEQ ID NO: 4273), and 3′ITR (SEQ ID NO: 4274) sequences.

[0694] Payloads were designed to encode a tinker between light and heavy antibody chains. Sequence encoding linkers were derived from an internal ribosome entry site (IRES, SEQ ID NO: 899), foot and mouth disease virus 2A (F2A; SEQ ID NO: 900), porcine teschovirus-1 virus 2A (P2A; SEQ ID NO: 901), a furin cleavage site (F; SEQ ID NO: 902), or a 5×G4S (also referred to herein as “G4S5”) (SEQ ID NO: 4321 encoded by SEQ ID NO: 903) linker sequence. In various payload regions, the order of heavy and light chains was alternated with respect to 5′ to 3′ direction. Payloads were further designed to encode protein signal sequences (to aid in protein processing, localization, and/or secretion) as well as an untranslated poly A tail, Payioad region sequences included in the prepared viral genomes are listed in Table 4. Each viral genome was then cloned into a pAAVss cloning vector (SEQ ID NO: 4275) to create the AAV particle listed in Table 4.

TABLE 4
AAV Particle Sequences

| | | Coding | Viral | Complete |
|---|---|---|---|---|
| | | Region | Genome | Sequence |
| Description | Abbreviation | SEQ ID | SEQ ID NO | SEQ ID |
| pAAVss-CB6-SV40-MC1HIRESL | MC1HIRESL | 4276 | 4292 | 4291 |
| pAAVss-CB6-SV40-MC1LIRESH | MC1LIRESH | 4277 | 4294 | 4293 |
| pAAVss-CB6-SV40-MC1HF2AL | MC1HF2AL | 4278 | 4296 | 4295 |
| pAAVss-CB6-SV40-MC1LF2AH | MC1LF2AH | 4279 | 4298 | 4297 |
| pAAVss-CB6-SV40-MC1HF.F2AL | MC1HF.F2AL | 4280 | 4300 | 4299 |
| pAAVss-CB6-SV40-MC1LF.F2AH | MC1LF.F2AH | 4281 | 4302 | 4301 |
| pAAVss-CB6-SV40-MC1HP2AL | MC1HP2AL | 4282 | 4304 | 4303 |
| pAAVss-CB6-SV40-MC1LP2AH | MC1LP2AH | 4283 | 4306 | 4305 |
| pAAVss-CB6-SV40-MC1HF.P2AL | MC1HF.P2AL | 4284 | 4308 | 4307 |
| pAAVss-CB6-SV40-MC1LF.P2AH | MC1LF.P2AH | 4285 | 4310 | 4309 |
| pAAVss-CB6-SV40-MC1LG4S5H | MC1LG4S5H | 4286 | 4312 | 4311 |
| pAAVss-CB6-SV40-IPN002LF2AH | IPN002LF2AH | 4287 | 4314 | 4313 |
| pAAVss-CB6-SV40-IPN002HF.F2AL | IPN002HF.F2AL | 4288 | 4316 | 4315 |
| pAAVss-CB6-SV40-PHF-1LF2AH | PHF-1LF2AH | 4289 | 4318 | 4317 |
| pAAVss-CB6-SV40-PHF-1HF.F2AL | PHF-1HF.F2AL | 4290 | 4320 | 4319 |

### Example 9

### Development of ELISA Assay to Determine Affinity to ePHF Tau

[0695] An assay was developed to determine the affinity of anti-tau antibodies expressed from various payload coding region constructs for extracellular tau in the form of paired helical filaments (ePHF). The ePHF were first immobilized on a 96-well plate overnight by pre-coating with 1500× of the concentrated PHF tau at 4° C. washed 3 times with PBS then blocked with 3% BSA for 2 hrs at room temperature or overnight at 4° C. Supematants from suspensions of Expi 293 cells transfected with MC-1 payload coding region constructs were collected and loaded onto the plates. Anti-tau antibody MC-1 was diluted in 3% BSA and analyzed separately as a control. Plates were then incubated, for 2 hrs at room temperature. Weils were washed 5 times with TBS/0.5% Tween 20 wash buffer, then incubated with 1:5000 dilution of anti-mouse antibody labeled with HRP (Thermo Fisher Scientific, Waltham, Mass.) for 30 mm. Plates were then developed by incubating with one-step TMB substrate (Thermo Fisher Scientific, Waltham, Mass.) for 30 mm, stopped by 2H₂SO₄ and read using a BioTek Synergy H1 hybnd reader (BioTek, Winooski, Vt.) at 450 nm. The concentration of anti-tau antibodies, and their affinity for ePHF tau, was determined using a standard curve. Anti-tau antibodies produced using MC1LIRESH, MC1LF2AH, MC1HF.F2AL, MC1LF.F2AH, and MC1HF.P2AL payload coding region constmcts showed similar affinity for ePHF tau as the MC-1 control. Anti-tau antibodies generated using MC1HIRESL, MC1LP2AH and MC1LF.P2AH payload coding region constructs demonstrated lower affinity to ePHF tau than control MC-1.

[0696] According to the same assay, MC 1LF2AH, MC 1HF.F2AL, IPN002LF2AH, IPN002HF.F2AL, PHF-1LF2AH, and PHF-1 HF.F2AL payload coding region constructs were expressed in Expi 293 cells, the supematants collected and expressed antibodies were tested for affinity to ePHF tau. Antibodies generated, using all six constructs tested showed similar affinity for ePHF tau in comparison to their respective control antibodies (MC-1, PHF1 and IPN002 antibodies).

### Example 10

### ELISA Assay for Detection of Expressed Antibodies

[0697] Expi 293 cell culture supematants from cells expressing anti-tau antibodies were tested by sandwich ELISA to detect and determine concentrations of expressed antibodies. Ninety-six well plates were pre-coated with anti-mouse IgG1 overnight at 4° C. then washed 3 times with PBS and blocked, with 3% BSA for 2 hrs at room temperature. Supematants were diluted in blocking buffer (3% BSA), added to the wells and incubated for 2 hrs at room temperature. Samples were then washed 5 times with TBS/0.5% Tween 20 wash buffer and incubated with 1:5000 dilution of anti-mouse antibody labeled with HRP (Thermo Fisher Scientific, Waltham, Mass.) for 30 min. Plates were developed by incubating with one-step TMB substrate for 30 min, stopped by 2N H2SO₄ and read using a BioTek Synergy H1 hybrid reader (BioTek, Wmooski, Vt.) at 450 nm. The concentration of expressed MC-1 anti-tau antibodies was then determined for each construct using a standard curve (see Table 5).

TABLE 5
Concentrations of expressed antibodies

| Construct | Antibody concentration |
|---|---|
| name | μg/mL |
| MC1HIRESL | 4.42 |
| MC1LIRESH | 32.29 |
| MC1LF2AH | 10.74 |
| MC1HF.F2AL | 12.10 |
| MC1LF.F2AH | 12.94 |
| MC1LP2AH | 44.12 |
| MC1HF.P2AL | 23.79 |
| MC1LF.P2AH | 46.43 |

[0698] Cells expressing MC1LIRESH, MC1LP2AH and MC1LP2AH coding region constructs produced the highest concentration of antibodies from transfected cells.

[0699] In a subsequent experiment using the same methods, cell supernatants from Expi 293 cells expressing MC1LF2AH, MC1HF.F2AL, PHF1LF2AH, PHF1HF.F2AL, IPN002LF2AH, or IPN002HF.F2AL coding region constructs were also assessed for concentrations of expressed antibodies by ELISA. Antibody concentrations from supernatants tested, are presented in Table 6.

TABLE 6
Concentrations of expressed antibodies

| Construct name | Antibody concentration μg/ml |
|---|---|
| MC1LF2AH | 40.4 |
| MC1HF.F2AL | 4.5 |
| PHF1LF2AH | 28.3 |
| PHF1HF.F2AL | 2.9 |
| IPN002LF2AH | 10.2 |
| IPN002HF.F2AL | 1.6 |

[0700] Cells expressing MC1LF2AH, PHF1LF2AH and IPN002LF2AH coding constructs produced the highest concentration of antibodies from transfected cells.

### Example 11

### Western Blotting for Anti-Tans Antibody Expression

[0701] Anti-tau antibodies expressed using MC1HIRESL, MC1LIRESH, MC1HF2AL, MC1LF2AH, MC1HF.F2AL, MC1LF.F2AH, MC1HP2AL, MC1LP2AH, MC1HF.P2AL, MC1LF.P2AH, and MC1LG4S5H coding region constructs was assessed by Western blotting in both small and large volume (30 mL) cell culture experiments. Expi 293 cells expressing MC1HIRESL, MC1LIRESH, MC1HF2AL, MC1LF2AH, MC1HF.F2AL, MC1LF.F2AH, MEC1HP2AL, MC1LP2AH, MC1HF.P2AL, MC1LF.P2AB, or MC1LG4S5H coding region constructs were cultured to produce antibody-rich supernatant After centrifugation, supermatants were collected and two small samples of each were removed and mixed with equal volumes of Laemmli sample buffer. Samples were then boiled at 95° C. for 5 min before loading into two 4-20% polyacrylamide gels along with molecular weight markers. Both gels were run for 1-2hrs at 100V under reducing or non-reducing conditions. Proteins were then transferred to a nitrocellulose membrane for 2 hr at 4° C. and stained with anti-mouse IgGs. First membranes were placed in blocking buffer for 1 h at room temperature or overnight at 4° C. followed by incubation with anti-mouse IgG antibodies in blocking buffer overnight at 4° C. The membranes were then washed three times each for 5 min in TEST and incubated with enzyme-labeled secondary antibody in blocking buffer for 1 hr at room temperature. Membranes were washed three times each for 5 min in TBST then developed using a luminescent substrate.

[0702] Under both reducing and non-reducing conditions, three coding region constructs showed limited expression when initially assessed by Western blot. In normal (reducing) conditions, antibody heavy chains usually run at approximately 50 kD, while light chains are evident at 25 kD. In supernatant from cells expressing MC1HF2AL and MC1LG4S5H coding regions, only the 25 kD species was evident while in supernatant from, cells expressing MC1HP2AL, neither species appeared. The remaining supematants showed the anticipated 25 and 5 GkD species under reducing conditions and several high molecular weight (80-150 kD) bands under non-reducing conditions.

[0703] A similar experiment was conducted using MC1 LF2AH, MC 1HF.F2AL, IPN002LF2AH, IPN002HF.F2AL, PHF-1LF2AH, and PHF-1HF.F2AL coding region constructs. Western blot showed the expected 25 kD and 50 kD bands under reducing conditions and high molecular weight triplets under non-reducing conditions, similar to the appropriate controls (MC-1, PHF1 and IPN002 antibodies). LF2AH coding region constructs generated better expression levels for all three antibodies than the HF.F2AL coding region constructs.

[0704] Antibody concentrations from scaled-up culture conditions (30 mL) were determined for select constructs (see Table 7).

TABLE 7
Antibody concentrations from 30 mL cultures

| Construct name | Concentration μg/ml |
|---|---|
| MC1LIRESH | 20.3 |
| MC1LF2AH | 86.2 |
| MC1HF.F2AL | 9.9 |
| MC1LF.F2AH | 14.7 |
| MC1HF.P2AL | 15.9 |

[0705] Coding construct MC1LF2AH yielded the highest concentration of antibody from transfected cells.

### Example 12

### Purification of Anti-Tau Antibody Constructs

[0706] Anti-tau antibodies expressed in large volumes of Expi 293 cells (30 mL) were purified using protein A/G beads. A column was prepared with protein A/G bead resin and washed 3 times with loading buffer. Supematants were diluted with equal volumes of loading buffer and applied to the column. Unbound proteins were washed through with loading buffer. Elution buffer was added to the column and fractions collected. Fractions containing proteins were identified by absorbance at 280 nm, pooled together, neutralized and run on polyacrylamide gels as described in Example 4. Under reducing conditions, antibodies produced using MC1L1RE SH, MC1LF2AH, MC1LF.F2AL, MC1LF.F2AH, and MC1HF.P2AL coding region constructs yielded protein bands when examined by Western blotting that were similar to those observed with MC-1 control antibody (bands at 25 kD and 50 kD). Under non-reducing conditions, all expressed antibodies generated a triplet set of bands between 80-150kD, as did the MC-1 control.

[0707] Purified anti-tau antibodies were then tested for their affinity to ePHF tau by ELISA assay as described in Example 9. Antibodies with the highest affinity for ePHF tau were those produced using MC1LF2AH, MC1HF.F2AL and MC1LF.F2AH coding region constructs. These antibodies all demonstrated affinity for ePHF tau that was similar to that observed with MC-1 control antibody.

### Example 13

### rAAV Production of Anti-Tau Autobodies Using HEK293T Cells

[0708] HEK293 cells were transfected with three vectors simultaneously: anti-tau antibody encoding viral genomes, vectors expressing rep and cap genes; and a helper vector to generate rAAV9 products. Vector production was the greatest (highest AAV titer Vg/μL) when using MC1F2AH and MC1HF.F2AL viral genomes. These two formats were then utilized to generate rAAV9 particles encoding anti-tau antibodies PHF1 and IPN002.

### Example 14

### Evaluation of Anti-Tau Antibody Constructs in Non-Human Primates

[0709] Adult Rhesus macaque monkeys, pre-screened for low anti-AAV antibody levels, will receive intraparenchymal (IPa; thalamus and putamen) or intracisternal (CM) administration of anti-tau antibody AAV particles to assess expression, distribution and therapeutic potential.

[0710] Anti-tau antibody AAV particles will be formulated in a solution comprising 180 mM sodium chloride, 10 mM sodium phosphate, and 0.001% Piuronic Acid. Dosing concentrations will be 2.1×10¹² vg/ml for IPa administration and 1×10¹³ vg/ml for CM administration. For IPa administration (2.1×10¹² vg/ml), two animals will each receive bilateral infusions (1-2 μL) into the thalamus (150 μL) and putamen (60 μL) by convection enhanced delivery device guided by MRI. An additional three animals will each receive a single 1 ml. bolus injection into the CSF via the cisterna magna (1×10¹³ vg/ml). Animals will be monitored post-injection(s) for 28 days, with weekly body weight measurements and daily cage-side behavioral, mortality and morbidity checks serving as secondary readouts. Serum and CSF samples will be collected pre-dose and prior to necropsy.

[0711] On day 29, animals will be transcardially perfused with PBS, tissues will be collected and drop fixed in paraformaldehyde for histological analyses or flash frozen for biochemical assay. Tissues processed for histological analysis will be sectioned and immunostained with HRP-labeled mouse IgG1 for presence of the tau antibodies. Further, these samples will be co-immunostained with NeuN, Iba1 or GFAP to identify cell-type. Samples snap frozen for biochemical analyses will be utilized for PCR to detect vector genomes and mRNA, ELISA to detect antibodies and MS to determine protein levels. Blood and CSF samples will be assessed for antibody and AAV levels.

### VIII. EQUIVALENTS AND SCOPE

[0712] Those skilled in the art will recognize, or be able to ascertain using no more than routine experimentation, many equivalents to the specific embodiments in accordance with the invention described herein. The scope of the present invention is not intended to be limited to the above Description, but rather is as set forth in the appended claims.

[0713] In the claims, articles such as “a,” “an,” and “the” may mean one or more than one unless indicated to the contrary or otherwise evident from the context. Claims or descriptions that include “or” between one or more members of a group are considered satisfied if one, more than one, or all of the group members are present in, employed in, or otherwise relevant to a given product or process unless indicated to the contrary or otherwise evident from the context. The invention includes embodiments in which exactly one member of the group is present in, employed in, or otherwise relevant to a given product or process. The invention includes embodiments in which more than one, or the entire group members are present in, employed in, or otherwise relevant to a given product or process.

[0714] It is also noted that the term “comprising” is intended to be open and permits but does not require the inclusion of additional elements or steps. When the term “comprising” is used herein, the term “consisting of” is thus also encompassed and disclosed.

[0715] Where ranges are given, endpoints are included. Furthermore, it is to be understood that unless otherwise indicated or otherwise evident from the context and understanding of one of ordinary skill in the art values that are expressed as ranges can assume any specific value or subrange within the stated ranges in different embodiments of the invention, to the tenth of the unit of the lower limit of the range, unless the context clearly dictates otherwise.

[0716] In addition, it is to be understood that any particular embodiment of the present invention that fails within the prior art may be explicitly excluded from any one or more of the claims. Since such embodiments are deemed to be known to one of ordinary skill in the art, they may be excluded even if the exclusion is not set forth explicitly herein. Any particular embodiment of the compositions of the invention (e.g., any antibiotic, therapeutic or active ingredient; any method of production; any method of use: etc.) can be excluded from any one or more claims, for any reason, whether or not related to the existence of prior art.

[0717] It is to be understood that the words which have been used are words of description rather than limitation, and that changes may be made within the purview of the appended claims without departing from the true scope and spirit of the invention in its broader aspects.

[0718] While the present invention has been described at some length and with some particularity with respect to the several described embodiments, it is not intended that it should be limited to any such particulars or embodiments or any particular embodiment, but it is to be construed with reference to the appended claims so as to provide the broadest possible interpretation of such claims in view of the prior art and, therefore, to effectively encompass the intended scope of the invention.

The application's sequence listing, which the Patent Office published only in electronic form, follows.

SEQUENCE LISTING (4323 sequences)

SEQ ID NO: 1 - DNA, 2211 bp, Adeno-associated virus 1
atggctgccgatggttatcttccagattggctcgaggacaacctctctgagggcattcgcgagtggtgggacttgaaacctggagccccgaagcccaaagccaaccagcaaaagcaggacgacggccggggtctggtgcttcctggctacaagtacctcggacccttcaacggactcgacaagggggagcccgtcaacgcggcggacgcagcggccctcgagcacgacaaggcctacgaccagcagctcaaagcgggtgacaatccgtacctgcggtataaccacgccgacgccgagtttcaggagcgtctgcaagaagatacgtcttttgggggcaacctcgggcgagcagtcttccaggccaagaagcgggttctcgaacctctcggtctggttgaggaaggcgctaagacggctcctggaaagaaacgtccggtagagcagtcgccacaagagccagactcctcctcgggcatcggcaagacaggccagcagcccgctaaaaagagactcaattttggtcagactggcgactcagagtcagtccccgatccacaacctctcggagaacctccagcaacccccgctgctgtgggacctactacaatggcttcaggcggtggcgcaccaatggcagacaataacgaaggcgccgacggagtgggtaatgcctcaggaaattggcattgcgattccacatggctgggcgacagagtcatcaccaccagcacccgcacctgggccttgcccacctacaataaccacctctacaagcaaatctccagtgcttcaacgggggccagcaacgacaaccactacttcggctacagcaccccctgggggtattttgatttcaacagattccactgccacttttcaccacgtgactggcagcgactcatcaacaacaattggggattccggcccaagagactcaacttcaaactcttcaacatccaagtcaaggaggtcacgacgaatgatggcgtcacaaccatcgctaataaccttaccagcacggttcaagtcttctcggactcggagtaccagcttccgtacgtcctcggctctgcgcaccagggctgcctccctccgttcccggcggacgtgttcatgattccgcaatacggctacctgacgctcaacaatggcagccaagccgtgggacgttcatccttttactgcctggaatatttcccttctcagatgctgagaacgggcaacaactttaccttcagctacacctttgaggaagtgcctttccacagcagctacgcgcacagccagagcctggaccggctgatgaatcctctcatcgaccaatacctgtattacctgaacagaactcaaaatcagtccggaagtgcccaaaacaaggacttgctgtttagccgtgggtctccagctggcatgtctgttcagcccaaaaactggctacctggaccctgttatcggcagcagcgcgtttctaaaacaaaaacagacaacaacaacagcaattttacctggactggtgcttcaaaatataacctcaatgggcgtgaatccatcatcaaccctggcactgctatggcctcacacaaagacgacgaagacaagttctttcccatgagcggtgtcatgatttttggaaaagagagcgccggagcttcaaacactgcattggacaatgtcatgattacagacgaagaggaaattaaagccactaaccctgtggccaccgaaagatttgggaccgtggcagtcaatttccagagcagcagcacagaccctgcgaccggagatgtgcatgctatgggagcattacctggcatggtgtggcaagatagagacgtgtacctgcagggtcccatttgggccaaaattcctcacacagatggacactttcacccgtctcctcttatgggcggctttggactcaagaacccgcctcctcagatcctcatcaaaaacacgcctgttcctgcgaatcctccggcggagttttcagctacaaagtttgcttcattcatcacccaatactccacaggacaagtgagtgtggaaattgaatgggagctgcagaaagaaaacagcaagcgctggaatcccgaagtgcagtacacatccaattatgcaaaatctgccaacgttgattttactgtggacaacaatggactttatactgagcctcgccccattggcacccgttaccttacccgtcccctgtaa

SEQ ID NO: 2 - protein, 736 aa, Adeno-associated virus 1
MAADGYLPDWLEDNLSEGIREWWDLKPGAPKPKANQQKQDDGRGLVLPGYKYLGPFNGLDKGEPVNAADAAALEHDKAYDQQLKAGDNPYLRYNHADAEFQERLQEDTSFGGNLGRAVFQAKKRVLEPLGLVEEGAKTAPGKKRPVEQSPQEPDSSSGIGKTGQQPAKKRLNFGQTGDSESVPDPQPLGEPPATPAAVGPTTMASGGGAPMADNNEGADGVGNASGNWHCDSTWLGDRVITTSTRTWALPTYNNHLYKQISSASTGASNDNHYFGYSTPWGYFDFNRFHCHFSPRDWQRLINNNWGFRPKRLNFKLFNIQVKEVTTNDGVTTIANNLTSTVQVFSDSEYQLPYVLGSAHQGCLPPFPADVFMIPQYGYLTLNNGSQAVGRSSFYCLEYFPSQMLRTGNNFTFSYTFEEVPFHSSYAHSQSLDRLMNPLIDQYLYYLNRTQNQSGSAQNKDLLFSRGSPAGMSVQPKNWLPGPCYRQQRVSKTKTDNNNSNFTWTGASKYNLNGRESIINPGTAMASHKDDEDKFFPMSGVMIFGKESAGASNTALDNVMITDEEEIKATNPVATERFGTVAVNFQSSSTDPATGDVHAMGALPGMVWQDRDVYLQGPIWAKIPHTDGHFHPSPLMGGFGLKNPPPQILIKNTPVPANPPAEFSATKFASFITQYSTGQVSVEIEWELQKENSKRWNPEVQYTSNYAKSANVDFTVDNNGLYTEPRPIGTRYLTRPL

SEQ ID NO: 3 - DNA, 4718 bp, Adeno-associated virus 1
ttgcccactccctctctgcgcgctcgctcgctcggtggggcctgcggaccaaaggtccgcagacggcagagctctgctctgccggccccaccgagcgagcgagcgcgcagagagggagtgggcaactccatcactaggggtaatcgcgaagcgcctcccacgctgccgcgtcagcgctgacgtaaattacgtcataggggagtggtcctgtattagctgtcacgtgagtgcttttgcgacattttgcgacaccacgtggccatttagggtatatatggccgagtgagcgagcaggatctccattttgaccgcgaaatttgaacgagcagcagccatgccgggcttctacgagatcgtgatcaaggtgccgagcgacctggacgagcacctgccgggcatttctgactcgtttgtgagctgggtggccgagaaggaatgggagctgcccccggattctgacatggatctgaatctgattgagcaggcacccctgaccgtggccgagaagctgcagcgcgacttcctggtccaatggcgccgcgtgagtaaggccccggaggccctcttctttgttcagttcgagaagggcgagtcctacttccacctccatattctggtggagaccacgggggtcaaatccatggtgctgggccgcttcctgagtcagattagggacaagctggtgcagaccatctaccgcgggatcgagccgaccctgcccaactggttcgcggtgaccaagacgcgtaatggcgccggaggggggaacaaggtggtggacgagtgctacatccccaactacctcctgcccaagactcagcccgagctgcagtgggcgtggactaacatggaggagtatataagcgcctgtttgaacctggccgagcgcaaacggctcgtggcgcagcacctgacccacgtcagccagacccaggagcagaacaaggagaatctgaaccccaattctgacgcgcctgtcatccggtcaaaaacctccgcgcgctacatggagctggtcgggtggctggtggaccggggcatcacctccgagaagcagtggatccaggaggaccaggcctcgtacatctccttcaacgccgcttccaactcgcggtcccagatcaaggccgctctggacaatgccggcaagatcatggcgctgaccaaatccgcgcccgactacctggtaggccccgctccgcccgcggacattaaaaccaaccgcatctaccgcatcctggagctgaacggctacgaacctgcctacgccggctccgtctttctcggctgggcccagaaaaggttcgggaagcgcaacaccatctggctgtttgggccggccaccacgggcaagaccaacatcgcggaagccatcgcccacgccgtgcccttctacggctgcgtcaactggaccaatgagaactttcccttcaatgattgcgtcgacaagatggtgatctggtgggaggagggcaagatgacggccaaggtcgtggagtccgccaaggccattctcggcggcagcaaggtgcgcgtggaccaaaagtgcaagtcgtccgcccagatcgaccccacccccgtgatcgtcacctccaacaccaacatgtgcgccgtgattgacgggaacagcaccaccttcgagcaccagcagccgttgcaggaccggatgttcaaatttgaactcacccgccgtctggagcatgactttggcaaggtgacaaagcaggaagtcaaagagttcttccgctgggcgcaggatcacgtgaccgaggtggcgcatgagttctacgtcagaaagggtggagccaacaaaagacccgcccccgatgacgcggataaaagcgagcccaagcgggcctgcccctcagtcgcggatccatcgacgtcagacgcggaaggagctccggtggactttgccgacaggtaccaaaacaaatgttctcgtcacgcgggcatgcttcagatgctgtttccctgcaagacatgcgagagaatgaatcagaatttcaacatttgcttcacgcacgggacgagagactgttcagagtgcttccccggcgtgtcagaatctcaaccggtcgtcagaaagaggacgtatcggaaactctgtgccattcatcatctgctggggcgggctcccgagattgcttgctcggcctgcgatctggtcaacgtggacctggatgactgtgtttctgagcaataaatgacttaaaccaggtatggctgccgatggttatcttccagattggctcgaggacaacctctctgagggcattcgcgagtggtgggacttgaaacctggagccccgaagcccaaagccaaccagcaaaagcaggacgacggccggggtctggtgcttcctggctacaagtacctcggacccttcaacggactcgacaagggggagcccgtcaacgcggcggacgcagcggccctcgagcacgacaaggcctacgaccagcagctcaaagcgggtgacaatccgtacctgcggtataaccacgccgacgccgagtttcaggagcgtctgcaagaagatacgtcttttgggggcaacctcgggcgagcagtcttccaggccaagaagcgggttctcgaacctctcggtctggttgaggaaggcgctaagacggctcctggaaagaaacgtccggtagagcagtcgccacaagagccagactcctcctcgggcatcggcaagacaggccagcagcccgctaaaaagagactcaattttggtcagactggcgactcagagtcagtccccgatccacaacctctcggagaacctccagcaacccccgctgctgtgggacctactacaatggcttcaggcggtggcgcaccaatggcagacaataacgaaggcgccgacggagtgggtaatgcctcaggaaattggcattgcgattccacatggctgggcgacagagtcatcaccaccagcacccgcacctgggccttgcccacctacaataaccacctctacaagcaaatctccagtgcttcaacgggggccagcaacgacaaccactacttcggctacagcaccccctgggggtattttgatttcaacagattccactgccacttttcaccacgtgactggcagcgactcatcaacaacaattggggattccggcccaagagactcaacttcaaactcttcaacatccaagtcaaggaggtcacgacgaatgatggcgtcacaaccatcgctaataaccttaccagcacggttcaagtcttctcggactcggagtaccagcttccgtacgtcctcggctctgcgcaccagggctgcctccctccgttcccggcggacgtgttcatgattccgcaatacggctacctgacgctcaacaatggcagccaagccgtgggacgttcatccttttactgcctggaatatttcccttctcagatgctgagaacgggcaacaactttaccttcagctacacctttgaggaagtgcctttccacagcagctacgcgcacagccagagcctggaccggctgatgaatcctctcatcgaccaatacctgtattacctgaacagaactcaaaatcagtccggaagtgcccaaaacaaggacttgctgtttagccgtgggtctccagctggcatgtctgttcagcccaaaaactggctacctggaccctgttatcggcagcagcgcgtttctaaaacaaaaacagacaacaacaacagcaattttacctggactggtgcttcaaaatataacctcaatgggcgtgaatccatcatcaaccctggcactgctatggcctcacacaaagacgacgaagacaagttctttcccatgagcggtgtcatgatttttggaaaagagagcgccggagcttcaaacactgcattggacaatgtcatgattacagacgaagaggaaattaaagccactaaccctgtggccaccgaaagatttgggaccgtggcagtcaatttccagagcagcagcacagaccctgcgaccggagatgtgcatgctatgggagcattacctggcatggtgtggcaagatagagacgtgtacctgcagggtcccatttgggccaaaattcctcacacagatggacactttcacccgtctcctcttatgggcggctttggactcaagaacccgcctcctcagatcctcatcaaaaacacgcctgttcctgcgaatcctccggcggagttttcagctacaaagtttgcttcattcatcacccaatactccacaggacaagtgagtgtggaaattgaatgggagctgcagaaagaaaacagcaagcgctggaatcccgaagtgcagtacacatccaattatgcaaaatctgccaacgttgattttactgtggacaacaatggactttatactgagcctcgccccattggcacccgttaccttacccgtcccctgtaattacgtgttaatcaataaaccggttgattcgtttcagttgaactttggtctcctgtccttcttatcttatcggttaccatggttatagcttacacattaactgcttggttgcgcttcgcgataaaagacttacgtcatcgggttacccctagtgatggagttgcccactccctctctgcgcgctcgctcgctcggtggggcctgcggaccaaaggtccgcagacggcagagctctgctctgccggccccaccgagcgagcgagcgcgcagagagggagtgggcaa

SEQ ID NO: 4 - DNA, 3131 bp, Adeno-associated virus
gcggccgcgaattcgcccttggctgcgtcaactggaccaatgagaactttcccttcaatgattgcgtcgacaagatggtgatctggtgggaggagggcaagatgacggccaaggtcgtggagtccgccaaggccattctcggcggcagcaaggtgcgcgtggaccaaaagtgcaagtcgtccgcccagatcgaccccacccccgtgatcgtcacctccaacaccaacatgtgcgccgtgattgacgggaacagcaccaccttcgagcaccagcagcctctccaggaccggatgtttaagttcgaactcacccgccgtctggagcacgactttggcaaggtgacaaagcaggaagtcaaagagttcttccgctgggccagtgatcacgtgaccgaggtggcgcatgagttttacgtcagaaagggcggagccagcaaaagacccgcccccgatgacgcggataaaagcgagcccaagcgggcctgcccctcagtcgcggatccatcgacgtcagacgcggaaggagctccggtggactttgccgacaggtaccaaaacaaatgttctcgtcacgcgggcatgcttcagatgctgtttccctgcaaaacgtgcgagagaatgaatcggaatttcaacatttgcttcacacacggggtcagagactgctcagagtgtttccccggcgtgtcagaatctcaaccggtcgtcagaaagaggacgtatcggaaactccgtgcgattcatcatctgctggggcgggctcccgagattgcttgctcggcctgcgatctggtcaacgtggacctggatgactgtgtttctgagcaataaatgacttaaaccaggtatggctgccgatggttatcttccagattggctcgaggacaacctctctgagggcattcgcgagtggtgggcgctgaaacctggagccccgaagcccaaagccaaccagcaaaagcaggacgacggccggggtctggtgcttcctggctacaagtacctcggacccttcaacggactcgacaagggggagcccgtcaacgcggcggacgcagcggccctcgagcacgacaaggcttacgaccagcagctgcaggcgggtgacaatccgtacctgcggtataaccacgccgacgccgagtttcaggagcgtctgcaagaagatacgtcttttgggggcaacctcgggcgagcagtcttccaggccaagaagcgggttctcgaacctctcggtctggttgaggaaggcgctaagacggctcctggaaagaagagaccggtagagccatcaccccagcgttctccagactcctctacgggcatcggcaagaaaggccaacagcccgccagaaaaagactcaattttggtcagactggcgactcagagtcagttccagaccctcaacctctcggagaacctccagcagcgccctctggtgtgggacctaatacaatggctgcaggcggtggcgcaccaatggcagacaataacgaaggcgccgacggagtgggtagttcctcgggaaattggcattgcgattccacatggctgggcgacagagtcatcaccaccagcacccgaacctgggccctgcccacctacaacaaccacctctacaagcaaatctccaacgggacatcgggaggagccaccaacgacaacacctacttcggctacagcaccccctgggggtattttgactttaacagattccactgccacctttcaccacgtgactggcagcgactcatcaacaacaactggggattccgacccaagagactcagcttcaagctcttcaacatccaggtcaaggaggtcacgcagaatgaaggcaccaagaccatcgccaataacctcaccagcaccatccaggtgtttacggactcggagtaccagctgccgtacgttctcggctctgtccaccagggctgcctgcctccgttcccggcggacgtgttcatgattccccagtacggctacctaacactcaacaacggtagtcaggccgtgggacgctcctccttctactgcctggaatactttccttcgcagatgctgagaaccggcaacaacttccagtttacttacaccttcgaggacgtgcctttccacagcagctacgcccacagctagagcttggaccggctgatgaatcctctgattgaccagtacctgtactacttgtctcggactcaaacaacaggaggcacggcaaatacgcagactctgggcttcagccaaggtgggcctaatacaatggccaatcaggcaaagaactggctgccaggaccctgttaccgccaacaacgcgtctcaacgacaaccgggcaaaacaacaatagcaactttgcctggactgctgggaccaaataccatctgaatggaagaaattcattggctaatcctggcatcgctatggcaacacacaaagacgacgaggagcgtttttttcccagtaacgggatcctgatttttggcaaacaaaatgctgccagagacaatgcggattacagcgatgtcatgctcaccagcgaggaagaaatcaaaaccactaaccctgtggctacagaggaatacggtatcgtggcagataacttgcagcagcaaaacacggctcctcaaattggaactgtcaacagccagggggccttacccggtatggtctggcagaaccgggacgtgtacctgcagggtcccatctgggccaagattcctcacacggacggcaacttccacccgtctccgctgatgggcggctttggcctgaaacatcctccgcctcagatcctgatcaagaacacgcctgtacctgcggatcctccgaccaccttcaaccagtcaaagctgaactctttcatcacgcaatacagcaccggacaggtcagcgtggaaattgaatgggagctgcagaaggaaaacagcaagcgctggaaccccgagatccagtacacctccaactactacaaatctataagtgtggactttgctgttaatacagaaggcgtgtactctgaaccccgccccattggcacccgttacctcacccgtaatctgtaattgcctgttaatcaataaaccggttgattcgtttcagttgaactttggtctctgcgaagggcgaattc

SEQ ID NO: 5 - DNA, 255 bp, Adeno-associated virus 10
ggtaattcctccggaaattggcattgcgattccacatggctgggcgacagagtcatcaccaccagcacccgaacctgggtcctgcccacctacaacaaccacatctacaagcaaatctccagcgagacaggagccaccaacgacaaccactacttcggctacagcaccccctgggggtattttgactttaacagattccactgccacttttcaccacgtgactggcagcgactcatcaacaacaactggggattc

SEQ ID NO: 6 - protein, 738 aa, Adeno-associated virus 10
MAADGYLPDWLEDNLSEGIREWWDLKPGAPKPKANQQKQDDGRGLVLPGYKYLGPFNGLDKGEPVNAADAAALEHDKAYDQQLKAGDNPYLRYNHADAEFQERLQEDTSFGGNLGRAVFQAKKRVLEPLGLVEEAAKTAPGKKRPVEPSPQRSPDSSTGIGKKGQQPAKKRLNFGQTGESESVPDPQPIGEPPAGPSGLGSGTMAAGGGAPMADNNEGADGVGSSSGNWHCDSTWLGDRVITTSTRTWALPTYNNHLYKQISNGTSGGSTNDNTYFGYSTPWGYFDFNRFHCHFSPRDWQRLINNNWGFRPKRLSFKLFNIQVKEVTQNEGTKTIANNLTSTIQVFTDSEYQLPYVLGSAHQGCLPPFPADVFMIPQYGYLTLNNGSQAVGRSSFYCLEYFPSQMLRTGNNFEFSYTFEDVPFHSSYAHSQSLDRLMNPLIDQYLYYLSRTQSTGGTQGTQQLLFSQAGPANMSAQAKNWLPGPCYRQQRVSTTLSQNNNSNFAWTGATKYHLNGRDSLVNPGVAMATHKDDEERFFPSSGVLMFGKQGAGRDNVDYSSVMLTSEEEIKTTNPVATEQYGVVADNLQQANTGPIVGNVNSQGALPGMVWQNRDVYLQGPIWAKIPHTDGNFHPSPLMGGFGLKHPPPQILIKNTPVPADPPTTFSQAKLASFITQYSTGQVSVEIEWELQKENSKRWNPEIQYTSNYYKSTNVDFAVNTEGTYSEPRPIGTRYLTRNL

SEQ ID NO: 7 - protein, 738 aa, Adeno-associated virus 10
MAADGYLPDWLEDNLSEGIREWWDLKPGAPKPKANQQKQDDGRGLVLPGYKYLGPFNGLDKGEPVNAADAAALEHDKAYDQQLKAGDNPYLRYNHADAEFQERLQEDTSFGGNLGRAVFQAKKRVLEPLGLVEEGAKTAPGKKRPVEPSPQRSPDSSTGIGKKGQQPAKKRLNFGQTGDSESVPDPQPIGEPPAGPSGLGSGTMAAGGGAPMADNNEGADGVGSSSGNWHCDSTWLGDRVITTSTRTWALPTYNNHLYKQISNGTSGGSTNDNTYFGYSTPWGYFDFNRFHCHFSPRDWQRLINNNWGFRPKRLNFKLFNIQVKEVTQNEGTKTIANNLTSTIQVFTDSEYQLPYVLGSAHQGCLPPFPADVFMIPQYGYLTLNNGSQAVGRSSFYCLEYFPSQMLRTGNNFEFSYQFEDVPFHSSYAHSQSLDRLMNPLIDQYLYYLSRTQSTGGTAGTQQLLFSQAGPNNMSAQAKNWLPGPCYRQQRVSTTLSQNNNSNFAWTGATKYHLNGRDSLVNPGVAMATHKDDEERFFPSSGVLMFGKQGAGKDNVDYSSVMLTSEEEIKTTNPVATEQYGVVADNLQQQNAAPIVGAVNSQGALPGMVWQNRDVYLQGPIWAKIPHTDGNFHPSPLMGGFGLKHPPPQILIKNTPVPADPPTTFSQAKLASFITQYSTGQVSVEIEWELQKENSKRWNPEIQYTSNYYKSTNVDFAVNTDGTYSEPRPIGTRYLTRNL

SEQ ID NO: 8 - DNA, 258 bp, Adeno-associated virus 11
ggtaattcctccggaaattggcattgcgattccacatggctgggcgacagagtcatcaccaccagcacccgaacctgggccctgccaacctacaacaaccacctctacaaacaaatctccagcgcttcaacgggggccagcaacgacaaccactactttggctacagcaccccctgggggtattttgactttaacagattccactgccacttctcaccacgtgactggcagcgactcatcaacaacaactggggattc

SEQ ID NO: 9 - DNA, 255 bp, Adeno-associated virus 12
ggtaattcctccggaaattggcattgcgattccacatggctgggcgaccgagtcattaccaccagcacccggacttgggccctgcccacctacaacaaccacctctacaagcaaatctccagccaatcgggtgccaccaacgacaaccactacttcggctacagcaccccttgggggtattttgatttcaacagattccactgccatttctcaccacgtgactggcagcgactcatcaacaacaactggggattc

SEQ ID NO: 10 - DNA, 2208 bp, Adeno-associated virus 2
atggctgccgatggttatcttccagattggctcgaggacactctctctgaaggaataagacagtggtggaagctcaaacctggcccaccaccaccaaagcccgcagagcggcataaggacgacagcaggggtcttgtgcttcctgggtacaagtacctcggacccttcaacggactcgacaagggagagccggtcaacgaggcagacgccgcggccctcgagcacgacaaagcctacgaccggcagctcgacagcggagacaacccgtacctcaagtacaaccacgccgacgcggagtttcaggagcgccttaaagaagatacgtcttttgggggcaacctcggacgagcagtcttccaggcgaaaaagagggttcttgaacctctgggcctggttgaggaacctgttaagacggctccgggaaaaaagaggccggtagagcactctcctgtggagccagactcctcctcgggaaccggaaaggcgggccagcagcctgcaagaaaaagattgaattttggtcagactggagacgcagactcagtacctgacccccagcctctcggacagccaccagcagccccctctggtctgggaactaatacgatggctacaggcagtggcgcaccaatggcagacaataacgagggcgccgacggagtgggtaattcctcgggaaattggcattgcgattccacatggatgggcgacagagtcatcaccaccagcacccgaacctgggccctgcccacctacaacaaccacctctacaaacaaatttccagccaatcaggagcctcgaacgacaatcactactttggctacagcaccccttgggggtattttgacttcaacagattccactgccacttttcaccacgtgactggcaaagactcatcaacaacaactggggattccgacccaagagactcaacttcaagctctttaacattcaagtcaaagaggtcacgcagaatgacggtacgacgacgattgccaataaccttaccagcacggttcaggtgtttactgactcggagtaccagctcccgtacgtcctcggctcggcgcatcaaggatgcctcccgccgttcccagcagacgtcttcatggtgccacagtatggatacctcaccctgaacaacgggagtcaggcagtaggacgctcttcattttactgcctggagtactttccttctcagatgctgcgtaccggaaacaactttaccttcagctacacttttgaggacgttcctttccacagcagctacgctcacagccagagtctggaccgtctcatgaatcctctcatcgaccagtacctgtattacttgagcagaacaaacactccaagtggaaccaccacgcagtcaaggcttcagttttctcaggccggagcgagtgacattcgggaccagtctaggaactggcttcctggaccctgttaccgccagcagcgagtatcaaagacatctgcggataacaacaacagtgaatactcgtggactggagctaccaagtaccacctcaatggcagagactctctggtgaatccgggcccggccatggcaagccacaaggacgatgaagaaaagttttttcctcagagcggggttctcatctttgggaagcaaggctcagagaaaacaaatgtggacattgaaaaggtcatgattacagacgaagaggaaatcaggacaaccaatcccgtggctacggagcagtatggttctgtatctaccaacctccagagaggcaacagacaagcagctaccgcagatgtcaacacacaaggcgttcttccaggcatggtctggcaggacagagatgtgtaccttcaggggcccatctgggcaaagattccacacacggacggacattttcacccctctcccctcatgggtggattcggacttaaacaccctcctccacagattctcatcaagaacaccccggtacctgcgaatccttcgaccaccttcagtgcggcaaagtttgcttccttcatcacacagtactccacgggacaggtcagcgtggagatcgagtgggagctgcagaaggaaaacagcaaacgctggaatcccgaaattcagtacacttccaactacaacaagtctgttaatgtggactttactgtggacactaatggcgtgtattcagagcctcgccccattggcaccagatacctgactcgtaatctgtaa

SEQ ID NO: 11 - protein, 735 aa, Adeno-associated virus 2 [sequence omitted]

SEQ ID NO: 12 - protein, 621 aa, Adeno-associated virus 2
MPGFYEIVIKVPSDLDGHLPGISDSFVNWVAEKEWELPPDSDMDLNLIEQAPLTVAEKLQRDFLTEWRRVSKAPEALFFVQFEKGESYFHMHVLVETTGVKSMVLGRFLSQIREKLIQRIYRGIEPTLPNWFAVTKTRNGAGGGNKVVDECYIPNYLLPKTQPELQWAWTNMEQYLSACLNLTERKRLVAQHLTHVSQTQEQNKENQNPNSDAPVIRSKTSARYMELVGWLVDKGITSEKQWIQEDQASYISFNAASNSRSQIKAALDNAGKIMSLTKTAPDYLVGQQPVEDISSNRIYKILELNGYDPQYAASVFLGWATKKFGKRNTIWLFGPATTGKTNIAEAIAHTVPFYGCVNWTNENFPFNDCVDKMVIWWEEGKMTAKVVESAKAILGGSKVRVDQKCKSSAQIDPTPVIVTSNTNMCAVIDGNSTTFEHQQPLQDRMFKFELTRRLDHDFGKVTKQEVKDFFRWAKDHVVEVEHEFYVKKGGAKKRPAPSDADISEPKRVRESVAQPSTSDAEASINYADRYQNKCSRHVGMNLMLFPCRQCERMNQNSNICFTHGQKDCLECFPVSESQPVSVVKKAYQKLCYIHHIMGKVPDACTACDLVNVDLDDCIFEQ

SEQ ID NO: 13 - DNA, 4675 bp, Adeno-associated virus 2
ttggccactccctctctgcgcgctcgctcgctcactgaggccgggcgaccaaaggtcgcccgacgcccgggctttgcccgggcggcctcagtgagcgagcgagcgcgcagagagggagtggccaactccatcactaggggttcctggaggggtggagtcgtgacgtgaattacgtcatagggttagggaggtcctgtattagaggtcacgtgagtgttttgcgacattttgcgacaccatgtggtcacgctgggtatttaagcccgagtgagcacgcagggtctccattttgaagcgggaggtttgaacgcgcagccgccatgccggggttttacgagattgtgattaaggtccccagcgaccttgacgggcatctgcccggcatttctgacagctttgtgaactgggtggccgagaaggaatgggagttgccgccagattctgacatggatctgaatctgattgagcaggcacccctgaccgtggccgagaagctgcagcgcgactttctgacggaatggcgccgtgtgagtaaggccccggaggcccttttctttgtgcaatttgagaagggagagagctacttccacatgcacgtgctcgtggaaaccaccggggtgaaatccatggttttgggacgtttcctgagtcagattcgcgaaaaactgattcagagaatttaccgcgggatcgagccgactttgccaaactggttcgcggtcacaaagaccagaaatggcgccggaggcgggaacaaggtggtggatgagtgctacatccccaattacttgctccccaaaacccagcctgagctccagtgggcgtggactaatatggaacagtatttaagcgcctgtttgaatctcacggagcgtaaacggttggtggcgcagcatctgacgcacgtgtcgcagacgcaggagcagaacaaagagaatcagaatcccaattctgatgcgccggtgatcagatcaaaaacttcagccaggtacatggagctggtcgggtggctcgtggacaaggggattacctcggagaagcagtggatccaggaggaccaggcctcatacatctccttcaatgcggcctccaactcgcggtcccaaatcaaggctgccttggacaatgcgggaaagattatgagcctgactaaaaccgcccccgactacctggtgggccagcagcccgtggaggacatttccagcaatcggatttataaaattttggaactaaacgggtacgatccccaatatgcggcttccgtctttctgggatgggccacgaaaaagttcggcaagaggaacaccatctggctgtttgggcctgcaactaccgggaagaccaacatcgcggaggccatagcccacactgtgcccttctacgggtgcgtaaactggaccaatgagaactttcccttcaacgactgtgtcgacaagatggtgatctggtgggaggaggggaagatgaccgccaaggtcgtggagtcggccaaagccattctcggaggaagcaaggtgcgcgtggaccagaaatgcaagtcctcggcccagatagacccgactcccgtgatcgtcacctccaacaccaacatgtgcgccgtgattgacgggaactcaacgaccttcgaacaccagcagccgttgcaagaccggatgttcaaatttgaactcacccgccgtctggatcatgactttgggaaggtcaccaagcaggaagtcaaagactttttccggtgggcaaaggatcacgtggttgaggtggagcatgaattctacgtcaaaaagggtggagccaagaaaagacccgcccccagtgacgcagatataagtgagcccaaacgggtgcgcgagtcagttgcgcagccatcgacgtcagacgcggaagcttcgatcaactacgcagacaggtaccaaaacaaatgttctcgtcacgtgggcatgaatctgatgctgtttccctgcagacaatgcgagagaatgaatcagaattcaaatatctgcttcactcacggacagaaagactgtttagagtgctttcccgtgtcagaatctcaacccgtttctgtcgtcaaaaaggcgtatcagaaactgtgctacattcatcatatcatgggaaaggtgccagacgcttgcactgcctgcgatctggtcaatgtggatttggatgactgcatctttgaacaataaatgatttaaatcaggtatggctgccgatggttatcttccagattggctcgaggacactctctctgaaggaataagacagtggtggaagctcaaacctggcccaccaccaccaaagcccgcagagcggcataaggacgacagcaggggtcttgtgcttcctgggtacaagtacctcggacccttcaacggactcgacaagggagagccggtcaacgaggcagacgccgcggccctcgagcacgtacaaagcctacgaccggcagctcgacagcggagacaacccgtacctcaagtacaaccacgccgacgcggagtttcaggagcgccttaaagaagatacgtcttttgggggcaacctcggacgagcagtcttccaggcgaaaaagagggttcttgaacctctgggcctggttgaggaacctgttaagacggctccgggaaaaaagaggccggtagagcactctcctgtggagccagactcctcctcgggaaccggaaaggcgggccagcagcctgcaagaaaaagattgaattttggtcagactggagacgcagactcagtacctgacccccagcctctcggacagccaccagcagccccctctggtctgggaactaatacgatggctacaggcagtggcgcaccaatggcagacaataacgagggcgccgacggagtgggtaattcctccggaaattggcattgcgattccacatggatgggcgacagagtcatcaccaccagcacccgaacctgggccctgcccacctacaacaaccacctctacaaacaaatttccagccaatcaggagcctcgaacgacaatcactactttggctacagcaccccttgggggtattttgacttcaacagattccactgccacttttcaccacgtgactggcaaagactcatcaacaacaactggggattccgacccaagagactcaacttcaagctctttaacattcaagtcaaagaggtcacgcagaatgacggtacgacgacgattgccaataaccttaccagcacggttcaggtgtttactgactcggagtaccagctcccgtacgtcctcggctcggcgcatcaaggatgcctcccgccgttcccagcagacgtcttcatggtgccacagtatggatacctcaccctgaacaacgggagtcaggcagtaggacgctcttcattttactgcctggagtactttccttctcagatgctgcgtaccggaaacaactttaccttcagctacacttttgaggacgttcctttccacagcagctacgctcacagccagagtctggaccgtctcatgaatcctctcatcgaccagtacctgtattacttgagcagaacaaacactccaagtggaaccaccacgcagtcaaggcttcagttttctcaggccggagcgagtgacattcgggaccagtctaggaactggcttcctggaccctgttaccgccagcagcgagtatcaaagacatctgcggataacaacaacagtgaatactcgtggactggagctaccaagtaccacctcaatggcagagactctctggtgaatccggccatggcaagccacaaggacgatgaagaaaagttttttcctcagagcggggttctcatctttgggaagcaaggctcagagaaaacaaatgtgaacattgaaaaggtcatgattacagacgaagaggaaatcggaacaaccaatcccgtggctacggagcagtatggttctgtatctaccaacctccagagaggcaacagacaagcagctaccgcagatgtcaacacacaaggcgttcttccaggcatggtctggcaggacagagatgtgtaccttcaggggcccatctgggcaaagattccacacacggacggacattttcacccctctcccctcatgggtggattcggacttaaacaccctcctccacagattctcatcaagaacaccccggtacctgcgaatccttcgaccaccttcagtgcggcaaagtttgcttccttcatcacacagtactccacgggacacggtcagcgtggagatcgagtgggagctgcagaaggaaaacagcaaacgctggaatcccgaaattcagtacacttccaactacaacaagtctgttaatcgtggacttaccgtggatactaatggcgtgtattcagagcctcgccccattggcaccagatacctgactcgtaatctgtaattgcttgttaatcaataaaccgtttaattcgtttcagttgaactttggtctctgcgtatttctttcttatctagtttccatggctacgtagataagtagcatggcgggttaatcattaactacaaggaacccctagtgatggagttggccactccctctctgcgcgctcgctcgctcactgaggccgggcgaccaaaggtcgcccgacgcccgggctttgcccgggcggcctcagtgagcgagcgagcgcgcagagagggagtggccaa

SEQ ID NO: 14 - DNA, 4679 bp, Adeno-associated virus 2
ttggccactccctctctgcgcgctcgctcgctcactgaggccgggcgaccaaaggtcgcccgacgcccgggctttgcccgggcggcctcagtgagcgagcgagcgcgcagagagggagtggccaactccatcactaggggttcctggaggggtggagtcgtgacgtgaattacgtcatagggttagggaggtcctgtattagaggtcacgtgagtgttttgcgacattttgcgacaccatgtggtcacgctgggtatttaagcccgagtgagcacgcagggtctccattttgaagcgggaggtttgaacgcgcagccgccatgccggggttttacgagattgtgattaaggtccccagcgaccttgacgggcatctgcccggcatttctgacagctttgtgaactgggtggccgagaaggaatgggagttgccgccagattctgacatggatctgaatctgattgagcaggcacccctgaccgtggccgagaagctgcagcgcgactttctgacggaatggcgccgtgtgagtaaggccccggaggcccttttctttgtgcaatttgagaagggagagagctacttccacatgcacgtgctcgtggaaaccaccggggtgaaatccatggttttgggacgtttcctgagtcagattcgcgaaaaactgattcagagaatttaccgcgggatcgagccgactttgccaaactggttcgcggtcacaaagaccagaaatggcgccggaggcgggaacaaggtggtggatgagtgctacatccccaattacttgctccccaaaacccagcctgagctccagtgggcgtggactaatatggaacagtatttaagcgcctgtttgaatctcacggagcgtaaacggttggtggcgcagcatctgacgcacgtgtcgcagacgcaggagcagaacaaagagaatcagaatcccaattctgatgcgccggtgatcagatcaaaaacttcagccaggtacatggagctggtcgggtggctcgtggacaaggggattacctcggagaagcagtggatccaggaggaccaggcctcatacatctccttcaatgcggcctccaactcgcggtcccaaatcaaggctgccttggacaatgcgggaaagattatgagcctgactaaaaccgcccccgactacctggtgggccagcagcccgtggaggacatttccagcaatcggatttataaaattttggaactaaacgggtacgatccccaatatgcggcttccgtctttctgggatgggccacgaaaaagttcggcaagaggaacaccatctggctgtttgggcctgcaactaccgggaagaccaacatcgcggaggccatagcccacactgtgcccttctacgggtgcgtaaactggaccaatgagaactttcccttcaacgactgtgtcgacaagatggtgatctggtgggaggaggggaagatgaccgccaaggtcgtggagtcggccaaagccattctcggaggaagcaaggtgcgcgtggaccagaaatgcaagtcctcggcccagatagacccgactcccgtgatcgtcacctccaacaccaacatgtgcgccgtgattgacgggaactcaacgaccttcgaacaccagcagccgttgcaagaccggatgttcaaatttgaactcacccgccgtctggatcatgactttgggaaggtcaccaagcaggaagtcaaagactttttccggtgggcaaaggatcacgtggttgaggtggagcatgaattctacgtcaaaaagggtggagccaagaaaagacccgcccccagtgacgcagatataagtgagcccaaacgggtgcgcgagtcagttgcgcagccatcgacgtcagacgcggaagcttcgatcaactacgcagacaggtaccaaaacaaatgttctcgtcacgtgggcatgaatctgatgctgtttccctgcagacaatgcgagagaatgaatcagaattcaaatatctgcttcactcacggacagaaagactgtttagagtgctttcccgtgtcagaatctcaacccgtttctgtcgtcaaaaaggcgtatcagaaactgtgctacattcatcatatcatgggaaaggtgccagacgcttgcactgcctgcgatctggtcaatgtggatttggatgactgcatctttgaacaataaatgatttaaatcaggtatggctgccgatggttatcttccagattggctcgaggacactctctctgaaggaataagacagtggtggaagctcaaacctggcccaccaccaccaaagcccgcagagcggcataaggacgacagcaggggtcttgtgcttcctgggtacaagtacctcggacccttcaacggactcgacaagggagagccggtcaacgaggcagacgccgcggccctcgagcacgacaaagcctacgaccggcagctcgacagcggagacaacccgtacctcaagtacaaccacgccgacgcggagtttcaggagcgccttaaagaagatacgtcttttgggggcaacctcggacgagcagtcttccaggcgaaaaagagggttcttgaacctctgggcctggttgaggaacctgttaagacggctccgggaaaaaagaggccggtagagcactctcctgtggagccagactcctcctcgggaaccggaaaggcgggccagcagcctgcaagaaaaagattgaattttggtcagactggagacgcagactcagtacctgacccccagcctctcggacagccaccagcagccccctctggtctgggaactaatacgatggctacaggcagtggcgcaccaatggcagacaataacgagggcgccgacggagtgggtaattcctccggaaattggcattgcgattccacatggatgggcgacagagtcatcaccaccagcacccgaacctgggccctgcccacctacaacaaccacctctacaaacaaatttccagccaatcaggagcctcgaacgacaatcactactttggctacagcaccccttgggggtattttgacttcaacagattccactgccacttttcaccacgtgactggcaaagactcatcaacaacaactggggattccgacccaagagactcaacttcaagctctttaacattcaagtcaaagaggtcacgcagaatgacggtacgacgacgattgccaataaccttaccagcacggttcaggtgtttactgactcggagtaccagctcccgtacgtcctcggctcggcgcatcaaggatgcctcccgccgttcccagcagacgtcttcatggtgccacagtatggatacctcaccctgaacaacgggagtcaggcagtaggacgctcttcattttactgcctggagtactttccttctcagatgctgcgtaccggaaacaactttaccttcagctacacttttgaggacgttcctttccacagcagctacgctcacagccagagtctggaccgtctcatgaatcctctcatcgaccagtacctgtattacttgagcagaacaaacactccaagtggaaccaccacgcagtcaaggcttcagttttctcaggccggagcgagtgacattcgggaccagtctaggaactggcttcctggaccctgttaccgccagcagcgagtatcaaagacatctgcggataacaacaacagtgaatactcgtggactggagctaccaagtaccacctcaatggcagagactctctggtgaatccgggcccggccatggcaagccacaaggacgatgaagaaaagttttttcctcagagcggggttctcatctttgggaagcaaggctcagagaaaacaaatgtggacattgaaaaggtcatgattacagacgaagaggaaatcaggacaaccaatcccgtggctacggagcagtatggttctgtatctaccaacctccagagaggcaacagacaagcagctaccgcagatgtcaacacacaaggcgttcttccaggcatggtctggcaggacagagatgtgtaccttcaggggcccatctgggcaaagattccacacacggacggacattttcacccctctcccctcatgggtggattcggacttaaacaccctcctccacagattctcatcaagaacaccccggtacctgcgaatccttcgaccaccttcagtgcggcaaagtttgcttccttcatcacacagtactccacgggacaggtcagcgtggagatcgagtgggagctgcagaaggaaaacagcaaacgctggaatcccgaaattcagtacacttccaactacaacaagtctgttaatgtggactttactgtggacactaatggcgtgtattcagagcctcgccccattggcaccagatacctgactcgtaatctgtaattgcttgttaatcaataaaccgtttaattcgtttcagttgaactttggtctctgcgtatttctttcttatctagtttccatggctacgtagataagtagcatggcgggttaatcattaactacaaggaacccctagtgatggagttggccactccctctctgcgcgctcgctcgctcactgaggccgggcgaccaaaggtcgcccgacgcccgggctttgcccgggcggcctcagtgagcgagcgagcgcgcagagagggagtggccaa

SEQ ID NO: 15 - protein, 725 aa, Adeno-associated virus 5
MAADGYLPDWLEDTLSEGIRQWWKLKPGPPPPKPAERHKDDSRGLVLPGYKYLGPFNGLDKGEPVNEADAAALEHDKAYDRQLDSGDNPYLKYNHADAEFQERLKEDTSFGGNLGRAVFQAKKRVLEPFGLVEEGAKTAPTGKRIDDHFPKRKKARTEEDSKPSTSSDAEAGPSGSQQLQIPAQPASSLGADTMSAGGGGPLGDNNQGADGVGNASGDWHCDSTWMGDRVVTKSTRTWVLPSYNNHQYREIKSGSVDGSNANAYFGYSTPWGYFDFNRFHSHWSPRDWQRLINNYWGFRPRSLRVKIFNIQVKEVTVQDSTTTIANNLTSTVQVFTDDDYQLPYVVGNGTEGCLPAFPPQVFTLPQYGYATLNRDNTENPTERSSFFCLEYFPSKMLRTGNNFEFTYNFEEVPFHSSFAPSQNLFKLANPLVDQYLYRFVSTNNTGGVQFNKNLAGRYANTYKNWFPGPMGRTQGWNLGSGVNRASVSAFATTNRMELEGASYQVPPQPNGMTNNLQGSNTYALENTMIFNSQPANPGTTATYLEGNMLITSESETQPVNRVAYNVGGQMATNNQSSTTAPTTGTYNLQEIVPGSVWMERDVYLQGPIWAKIPETGAHFHPSPAMGGFGLKHPPPMMLIKNTPVPGNITSFSDVPVSSFITQYSTGQVTVEMEWELKKENSKRWNPEIQYTNNYNDPQFVDFAPDSTGEYRTTRPIGTRYLTRPL

SEQ ID NO: 16 - protein, 644 aa, Artificial Sequence
  Description of Artificial Sequence: Synthetic polypeptide
  MOD_RES (434)..(434): Any amino acid
KAYDQQLKAGDNPYLRYNHADAEFQERLQEDTSFGGNLGRAVFQAKKRVLEPLGLVETPAKTAPGKKRPVDSPDSTSGIGKKGQQPAKKRLNFGQTGDSESVPDPQPIGEPPAGPSGLGSGTMAAGGGAPMADNNEGADGVGNASGNWHCDSTWLGDRVITTSTRTWALPTYNNHLYKQISSQSAGSTNDNVYFGYSTPWGYFDFNRFHCHFSPRDWQRLINNNWGFRPKKLNFKLFNIQVKEVTTNDGVTTIANNLTSTVQVFSDSEYQLPYVLGSAHQGCLPPFPADVFMIPQYGYLTLNNGSQSVGRSSFYCLEYFPSQMLRTGNNFTFSYTFEDVPFHSSYAHSQSLDRLMNPLIDQYLYYLARTQSNAGGTAGNRELQFYQGGPTTMAEQAKNWLPGPCFRQQRVSKTLDQNNNSNFAWTGATKYHLNXRNSLVNPGVAMATHKDDEERFFPSSGVLIFGKTGAANKTTLENVLMTNEEEIRPTNPVATEEYGIVSSNLQAASTAAQTQVVNNQGALPGMVWQNRDVYLQGPIWAKIPHTDGNFHPSPLMGGFGLKHPPPQILIKNTPVPANPPEVFTPAKFASFITQYSTGQVSVEIEWELQKENSKRWNPEIQYTSNFDKQTGVDFAVDSQGVYSEP

SEQ ID NO: 17 - DNA, 1933 bp, Adeno-associated virus
caaggcctacgaccagcagctcaaagcgggtgacaatccgtacctgcggtataaccacgccgacgccgagtttcaggagtgtcttcaagaagatacgtcttttgggggcaacctcgggcgagcagtcttccaggccaaaaagcgggttctcgaacctcttggtctggttgagacgccagctaagacggcacctggaaagaagcgaccggtagactcgccagactccacctcgggcatcggcaagaaaggccagcagcccgcgaaaaagagactcaactttgggcagactggcgactcagagtcagtccccgaccctcaaccaatcggagaaccaccagcaggcccctctggtctgggatctggtacaatggttgcaggcggtggcgcaccaatggctgacaataacgagggcgccgacggagtgggtaatgcctcaggaaattggcattgcgattccacatggctgggcgacagagtcatcaccaccagcacccgaacctgggccctgcccacctacaacaaccacctctacaagcaaatctccagtcagtcagcagggagcaccaacgataacgtctatttcggctacagcaccccctgggggtattttgacttcaacagattccattgccacttctcaccacgtgactggcagcgacttatcaacaacaactggggattccggcccaagaagctcaacttcaagctcttcaacatccaggtcaaggaggtcacgacgaatgacggtgtcacaaccatcgctaataaccttaccagcacggttcaggtcttttcggactcggaatatcaactgccgtacgtcctcggctccgcgcaccagggctgcctgcctccgttcccggcagacgtgttcatgattccgcagtacggatacctgactctgaacaatggcagccaatcggtaggccgttcctccttctactgcctggagtactttccttctcagatgctgagaacgggcaacaacttcacctttagctacaccttcgaggacgtgcctttccacagcagctacgcgcacagccagagtctggaccggctgatgaatcccctcatcgaccagtacctgtactacttggccagaacacagagcaacgcaggaggtactgctggcaatcgggaactgcagttttatcagggcggacctaccaccatggccgaacaagcaaagaactggctgcccggaccttgcttccggcaacagagagtatccaagacgctggatcaaaataacaacagcaactttgcctggactggtgccacaaaataccatttaaatggaagaaattcattggttaatcccggtgtcgccatggcaacccacaaggacgacgaggaacgcttctccccttcgagcggagttctaatttttggcaaaactggagcagctaataaaactacattagaaaacgtgctcatgacaaatgaagaagaaattcgtcctaccaacccggtagctaccgaggaatacgggattgtaagcagcaacttgcaggcggctagcaccgcagcccagacacaagttgttaacaaccagggagccttacctggcatggtctggcagaaccgggacgtgtacctgcaaggtcccatttgggccaagattcctcacacggacggcaactttcacccgtctcctctaatgggtggctttggactgaaacacccgcctccccagatcctgatcaaaaacacgccggtacctgctaatcctccagaagtgtttactcctgccaagtttgcttccttcatcacgcagtacagcaccgggcaagtcagcgttgagatcgagtgggagctgcagaaagagaacagcaagcgctggaacccagagattcagtacacctccaactttgacaaacagactggagtggactttgctgttgacagccagggtgtttactctgagcct

SEQ ID NO: 18 - protein, 644 aa, Artificial Sequence
  Description of Artificial Sequence: Synthetic polypeptide
KAYDQQLKAGDNPYLRYNHADAEFQECLQEDTSFGGNLGRAVFQAKKRVLEPLGLVETPAKTAPGKKRPVDSPDSTSGIGKKGQQPAKKRLNFGQTGDSESVPDPQPIGEPPAGPSGLGSGTMVAGGGAPMADNNEGADGVGNASGNWHCDSTWLGDRVITTSTRTWALPTYNNHLYKQISSQSAGSTNDNVYFGYSTPWGYFDFNRFHCHFSPRDWQRLINNNWGFRPKKLNFKLFNIQVKEVTTNDGVTTIANNLTSTVQVFSDSEYQLPYVLGSAHQGCLPPFPADVFMIPQYGYLTLNNGSQSVGRSSFYCLEYFPSQMLRTGNNFTFSYTFEDVPFHSSYAHSQSLDRLMNPLIDQYLYYLARTQSNAGGTAGNRELQFYQGGPTTMAEQAKNWLPGPCFRQQRVSKTLDQNNNSNFAWTGATKYHLNGRNSLVNPGVAMATHKDDEERFSPSSGVLIFGKTGAANKTTLENVLMTNEEEIRPTNPVATEEYGIVSSNLQAASTAAQTQVVNNQGALPGMVWQNRDVYLQGPIWAKIPHTDGNFHPSPLMGGFGLKHPPPQILIKNTPVPANPPEVFTPAKFASFITQYSTGQVSVEIEWELQKENSKRWNPEIQYTSNFDKQTGVDFAVDSQGVYSEP

SEQ ID NO: 19 - DNA, 1933 bp, Adeno-associated virus
caaggcctacgaccagcagctcaaagcgggtgacaatccgtacctgcggtataaccacgccgacgccgagtttcaggagcgtcttcaagaagatacgtcttttgggggcaacctcgggcgagcagtcttccaggccaaaaagcgggttctcgaacctcttggtctggttgagacgccagctaagacggcacctggaaagaagcgaccggtagactcgccagactccacctcgggcatcggcaagaaaggccagcagcccgcgaaaaagagactcaactttgggcagactggcgactcagagccagtccccgaccctcaaccaatcggagaaccaccagcaggcccctctggtctgggatctggtacaatggctgcaggcggtggcgcaccaatggctgacaataacgagggcgccgacggagtgggtaatgcctcaggaaattggcattgcgattccacacggctgggcgacagagtcatcaccaccagcacccgaacctgggccctgcccacctacaacaaccacctctacaagcaaatctccagtcagtcagcagggagcaccaacgataacgtctatttcggctacagcaccccctgggggtattttgacttcaacagattccattgccacttctcaccacgtgactggcagcgacttatcaacaacaactggggattccggcccaagaagctcaacttcaagctcttcaacatccaggtcaaggaggtcacgacgaatgacggcgtcacaaccatcgctaataaccttaccagcacggttcaggtcttttcggactcggaatatcaactgccgtacgtcctcggctccgcgcaccagggctgcctgcctccgttcccggcagacgtgttcatgattccgcagtacggatacctgactctgaacaatggcagccaatcggtaggccgttcctccttctactgcctggagtactttccttctcagatgctgagaacgggcaacaacttcacctttagctacaccttcgaggacgtgcctttccacagcagctacgcgcacagccagagtctgggccggctgatgaatcccctcatcgaccagtacctgtactacttggccagaacacagagcaacgcaggaggtactgctggcaatcgggaactgcagttttatcagggcggacctaccaccatggccgaacaagcaaagaactggctgcccggaccttgcttccggcaacagagagtatccaagacgctggatcaaaataacaacagcaactttgcctggactggtgccacaaaataccatttaaatggaagaaattcattggttaatcccggtgtcgccatggcaacccacaaggacgacgaggaacgcttcttcccttcgagcggagttctaatttttggcaaaactggagcagctaataaaactacattagaaaacgtgctcatgacaaatgaagaagaaattcgtcctaccaacccggtagctaccgaggaatacgggattgtaagcagcaacttgcaggcggctagcaccgcagcccagacacaagttgttaacaaccagggagccttacctggcatggtctggcagaaccgggacgtgtacctgcaaggtcccatttgggccaagattcctcacacggacggcaactttcacccgtctcctctaatgggtggctttggactgaaacacccgcctccccagatcctgatcaaaaacacaccggtacctgctaatcctccagaagtgtttactcctgccaagtttgcttccttcatcacgcagtacagcaccgggcaagtcagcgttgagatcgaatgggagctgcagaaagagaacagcaagcgctggaacccagagattcagtacacctccaactttgacaaacagactggagtggactttgctgttgacagccagggtgtttactctgagcct

SEQ ID NO: 20 - protein, 644 aa, Artificial Sequence
  Description of Artificial Sequence: Synthetic polypeptide
KAYDQQLKAGDNPYLRYNHADAEFQERLQEDTSFGGNLGRAVFQAKKRVLEPLGLVETPAKTAPGKKRPVDSPDSTSGIGKKGQQPAKKRLNFGQTGDSEPVPDPQPIGEPPAGPSGLGSGTMAAGGGAPMADNNEGADGVGNASGNWHCDSTRLGDRVITTSTRTWALPTYNNHLYKQISSQSAGSTNDNVYFGYSTPWGYFDFNRFHCHFSPRDWQRLINNNWGFRPKKLNFKLFNIQVKEVTTNDGVTTIANNLTSTVQVFSDSEYQLPYVLGSAHQGCLPPFPADVFMIPQYGYLTLNNGSQSVGRSSFYCLEYFPSQMLRTGNNFTFSYTFEDVPFHSSYAHSQSLGRLMNPLIDQYLYYLARTQSNAGGTAGNRELQFYQGGPTTMAEQAKNWLPGPCFRQQRVSKTLDQNNNSNFAWTGATKYHLNGRNSLVNPGVAMATHKDDEERFFPSSGVLIFGKTGAANKTTLENVLMTNEEEIRPTNPVATEEYGIVSSNLQAASTAAQTQVVNNQGALPGMVWQNRDVYLQGPIWAKIPHTDGNFHPSPLMGGFGLKHPPPQILIKNTPVPANPPEVFTPAKFASFITQYSTGQVSVEIEWELQKENSKRWNPEIQYTSNFDKQTGVDFAVDSQGVYSEP

SEQ ID NO: 21 - DNA, 1933 bp, Adeno-associated virus; identical to SEQ ID NO: 19

SEQ ID NO: 22 - protein, 644 aa, Artificial Sequence; identical to SEQ ID NO: 20
  Description of Artificial Sequence: Synthetic polypeptide

SEQ ID NO: 23 - DNA, 1933 bp, Adeno-associated virus
caaggcctacgaccagcagctcaaagcgggtgacaatccgtacctgcggtataaccacgccgacgccgagtttcaggagcgtcttcaagaagatacgtcttttgggggcaacctcgggcgagcagtcttccaggccaaaaagcgggttctcgaacctcttggtctggttgagacgccagctaagacggcacctggaaagaagcgaccggtagactcgccagactccacctcgggcatcggcaagaaaggccagcagcccgcgaaaaagagactcaactttgggcagactggcgactcagagtcagtccccgaccctcaaccaatcggagaaccaccagcaggcccctctggtctgggatctggtacaatggctgcaggcggtggcgcaccaatggctgacaatagcgagggcgccgacggagtgggtaatgcctcaggaaattggcattgcgattccacatggctgggcgacagagtcatcaccaccagcacccgaacctgggccctgcccacctacaacaaccacctctacaagcaaatctccagtcagtcagcagggagcaccaacgataacgtctatttcggctacagcaccccctgggggtattttgacttcaacagattccattgccacttctcaccacgtgactggcagcgacttatcaacaacaactggggattccggcccaagaagctcaacttcaagctcttcaacatccaggtcaaggaggtcacgacgaatgacggtgtcacaaccatcgctaataaccttaccagcacggttcaggtcttttcggactcggaatatcaactgccgtacgtcctcggctccgcgcaccagggctgcctgcctccgttcccggcagacgtgttcatgattccgcagtacggatacctgactctgaacaatggcagccaatcggtaggccgttcctccttctactgcctggagtactttccttctcagatgctgagaacgggcaacaacttcacctttagctacaccttcgaggacgtgcctttccacagcagctacgcgcacagccagagtctggaccggctgatgaatcccctcatcgaccagtacctgtactacttggccagaacacagagcaacgcaggaggtactgctggcaatcgggaactgcagttttatcagggcggacctaccaccatggccgaacaagcaaagaactggctgcccggaccttgcttccggcaacagagagtatccaagacgctggatcaaaataacaacagcaactttgcctggactggtgccacaaaataccatttaaatggaagaaattcattggttaatcccggtgtcgccatggcaacccacaaggacgacgaggaacgcttcttcccttcgagcggagttctaatttttggcaaaactggagcagctaataaaactacattagaaaacgtgctcatgacaaatgaagaagaaattcgtcctaccaacccggtagctaccgaggaatacgggattgtaagcagcaacttgcaggcggctagcaccgcagcccagacacaagttgttaacaaccagggagccttacctggcatggtctggcagaaccgggacgtgtacctgcaaggtcccatttgggccaagattcctcacacggacggcaactttcacccgtctcctctaatgggtggctttggactgaaacacccgcctccccagatcctgatcaaaaacacaccggtacctgctaatcctccagaagtgtttactcctgccaagcttgcttccttcatcacgcagtacagcaccgggcaagtcagcgttgagatcgagtgggagctgcagaaagagaacagcaagcgctggaacccagagattcagtacacctccaactttgacaaacagactggagtggactttgctgttgacagccagggtgtttactctgagcct

SEQ ID NO: 24 - protein, 644 aa, Artificial Sequence
  Description of Artificial Sequence: Synthetic polypeptide
KAYDQQLKAGDNPYLRYNHADAEFQERLQEDTSFGGNLGRAVFQAKKRVLEPLGLVETPAKTAPGKKRPVDSPDSTSGIGKKGQQPAKKRLNFGQTGDSESVPDPQPIGEPPAGPSGLGSGTMAAGGGAPMADNSEGADGVGNASGNWHCDSTWLGDRVITTSTRTWALPTYNNHLYKQISSQSAGSTNDNVYFGYSTPWGYFDFNRFHCHFSPRDWQRLINNNWGFRPKKLNFKLFNIQVKEVTTNDGVTTIANNLTSTVQVFSDSEYQLPYVLGSAHQGCLPPFPADVFMIPQYGYLTLNNGSQSVGRSSFYCLEYFPSQMLRTGNNFTFSYTFEDVPFHSSYAHSQSLDRLMNPLIDQYLYYLARTQSNAGGTAGNRELQFYQGGPTTMAEQAKNWLPGPCFRQQRVSKTLDQNNNSNFAWTGATKYHLNGRNSLVNPGVAMATHKDDEERFFPSSGVLIFGKTGAANKTTLENVLMTNEEEIRPTNPVATEEYGIVSSNLQAASTAAQTQVVNNQGALPGMVWQNRDVYLQGPIWAKIPHTDGNFHPSPLMGGFGLKHPPPQILIKNTPVPANPPEVFTPAKLASFITQYSTGQVSVEIEWELQKENSKRWNPEIQYTSNFDKQTGVDFAVDSQGVYSEP

SEQ ID NO: 25 - DNA, 1933 bp, Adeno-associated virus
caaggcctacgaccagcagctcaaagcgggtgacaatccgtacctgcggtataaccacgccgacgccgagtttcaggagcgtcttcaagaagatacgtcttttgggggcaacctcgggcgagcagtcttccaggccaaaaagcgggttctcgaacctcttggtctggttgagacgccagctaagacggcacctggaaagaagcgaccggtagactcgccagactccacctcgggcatcggcaagaaaggccagcagcccgcgaaaaagagactcaactttgggcagactggcgactcagagtcagtccccgaccctcaaccaatcggagaaccaccagcaggcccctctggtctgggatctggtacaatggctgcaggcggtggcgcaccaatggctgacaataacgagggcgccgacggagtgggtaatgcctcaggaaattggcattgcgattccacatggctgggcgacagagtcatcaccaccagcacccgaacctgggccctgcccacctacaacaaccacctctacaagcaaatctccagtcagtcagcagggagcaccaacgataacgtctatttcggctacagcaccccctgggggtattttgacttcaacagattccattgccacttctcaccacgtgactggcagcgacttatcaacaacaactggggattccggcccaagaagctcaacttcaagctcttcaacatccaggtcaaggaggtcacgacgaatgacggcgtcacaaccatcgctaataaccttaccagcacggttcaggtcttttcggacccggaatatcaactgccgtacgtcctcggctccgcgcaccagggctgcctgcctccgttcccggcagacgtgttcatgattccgcagtacggatacctgactctgaacaatggcagccaatcggtaggccgttcctccttctactgcctggagtactttccttctcagatgctgagaacgggcaacaacttcacctttagctacaccttcgaggacgtgcctttccacagcagctacgcgcacagccagagtctggaccggctgatgaatcccctcatcgaccagtacctgtactacttggccagaacacagagcaacgcaggaggtactgctggcaatcgggaactgcagttttatcagggcggacctaccaccatggccgaacaagcaaagaactggctgcccggaccttgcttccggcaacagagagtatccaagacgctggatcaaaataacaacagcaactttgcctggactggtgccacaaaataccatttaaatggaagaaattcattggttaatcccggtgtcgccatggcaacccacaaggacgacgaggaacgcttcttcccttcgagcggagttctaatttttggcaaaactggagcagctaataaaactacattagaaaacgtgctcatgacaaatgaagaagaaattcgtcctaccaacccggtagctaccgaggaatacgggattgtaagcagcaacttgcaggcggctagcaccgcagcccagacacaagttgttaacaaccagggagccttacctggcatggtctggcagaaccgggacgtgtacctgcaaggtcccatttgggccaagattcctcacacggacggcaactttcacccgtctcctctaatgggtggctttggactgaaacacccgcctccccagatcctgatcaaaaacacaccggtacctgctaatcctccagaagtgtttactcctgccaagattgcttccttcatcacgcagtacagcaccgggcaagtcagcgttgagatcgagtgggagctgcagaaagagaacagcaagcgctggaacccagagattcagtacacctccaactttgacaaacagactggagtggactttgctgttgacagccagggtgtttactctgagcct

SEQ ID NO: 26 - protein, 644 aa, Artificial Sequence
  Description of Artificial Sequence: Synthetic polypeptide
KAYDQQLKAGDNPYLRYNHADAEFQERLQEDTSFGGNLGRAVFQAKKRVLEPLGLVETPAKTAPGKKRPVDSPDSTSGIGKKGQQPAKKRLNFGQTGDSESVPDPQPIGEPPAGPSGLGSGTMAAGGGAPMADNNEGADGVGNASGNWHCDSTWLGDRVITTSTRTWALPTYNNHLYKQISSQSAGSTNDNVYFGYSTPWGYFDFNRFHCHFSPRDWQRLINNNWGFRPKKLNFKLFNIQVKEVTTNDGVTTIANNLTSTVQVFSDPEYQLPYVLGSAHQGCLPPFPADVFMIPQYGYLTLNNGSQSVGRSSFYCLEYFPSQMLRTGNNFTFSYTFEDVPFHSSYAHSQSLDRLMNPLIDQYLYYLARTQSNAGGTAGNRELQFYQGGPTTMAEQAKNWLPGPCFRQQRVSKTLDQNNNSNFAWTGATKYHLNGRNSLVNPGVAMATHKDDEERFFPSSGVLIFGKTGAANKTTLENVLMTNEEEIRPTNPVATEEYGIVSSNLQAASTAAQTQVVNNQGALPGMVWQNRDVYLQGPIWAKIPHTDGNFHPSPLMGGFGLKHPPPQILIKNTPVPANPPEVFTPAKIASFITQYSTGQVSVEIEWELQKENSKRWNPEIQYTSNFDKQTGVDFAVDSQGVYSEP

SEQ ID NO: 27 - protein, 738 aa, Artificial Sequence
  Description of Artificial Sequence: Synthetic polypeptide
MAADGYLPDWLEDNLSEGIREWWALKPGAPKPKANQQKQDDGRGLVLPGYKYLGPFNGLDKGEPVNAADAAALEHDKAYDQQLKAGDNPYLRYNHADAEFQERLQEDTSFGGNLGRAVFQAKKRVLEPLGLVEEGAKTAPGKKRPVEPSPQRSPDSTTGIGKKGQQPAKKRLNFGQTGDSESVPDPQPIGEPPAGPSGLGSGTMAAGGGAPMADNNEGADGVGSSSGNWHCDSTWLGDRVITTSTRTWALPTYNNHLYKQISNGTSGGSTNDNTYFGYSTPWGYFDFNRFHCHFSPRDWQRLINNNWGFRPKRLNFKLFNIQVKEVTQNEGTKTIANNLTSTIQVFTDSEYQLPYVLGSARQGCLPPFPADVFMIPQYGYLTLNNGSQAVGRSSFYCLEYFPSQMLRTGNNFEFSYQFEDVPFHSSYAHSQSLDRLMNPLIDQYLYYLSRTQSTGGTAGTQQLLFSQAGPNNMSAQAKNWLPGPCYRQQRVSTTLSQNNNSNFAWTGATKYHLNGRDSLVNPGVAMATHKDDEERFFPSSGVLMFGKQGAGKGNVDYSSVMLTSEEEIKTTNPVATEQYGVVADNLQQQNAAPIVGAVNSQGALPGMVWQNRDVYLQGPIWAKIPHTDGNFHPSPLMGGFGLKHPPPQILIKNTPVPADPPTTFSQAKLASFITQYSTGQVSVEIEWELQKENSKRWNPEIQYTSNYYKSTNVDFAVNTDGTYSEPRPIGTRYLTRNL

SEQ ID NO: 28 - DNA, 3121 bp, Adeno-associated virus
gaattcgcccttctacggctgcgtcaactggaccaatgagaactttcccttcaacgactgtgtcgacaagatggtgatctggtgggaggaggggaagatgaccgccaaggtcgtggagtcggccaaagccattctcggaggaagcaaggtgcgcgtggaccagaaatgcaagtcctcggcccagatagacccgactcccgtgatcgtcacctccaacaccaacatgtgcgccgtgattgacgggaactcaacgaccttcgaacaccagcagccgttgcaagaccggatgttcaaatttgaactcacccgccgtctggatcatgactttgggaaggtcaccaagcaggaagtcaaagactttttccggtgggcaaaggatcacgtggttgaggtggagcacgaattctacgtcaaaaagggtggagccaagaaaagacccgcccccagtgacgcagatataagtgagcccaaacgggtgcgcgagtcagttgcgcagccatcgacgtcagacgcggaagcttcgatcaactacgcagacaggtaccaaaacaaatgttctcgtcacgcgggcatgaatctgatgctgtttccctgcagacaatgcgagagaatgaatcagaattcaaatatctgcttcactcacggacagaaagactgtttagagtgctttcccgtgtcagaatctcaacccgtttctgtcgtcaaaaaggcgtatcagaaactgtgctacattcatcatatcatgggaaaggtgccagacgcttgcactgcctgcgatctggtcgatgtggatttggatgactgcatctttgaacaataaatgatttaaatcaggtatggctgccgatggttatcttccagattggctcgaggacaacctctctgagggcattcgcgagtggtgggcgctgaaacctggagccccgaagcccaaagccaaccagcaaaagcaggacggcggccggggtctggtgcttcctggctacaagtacctcggacccttcaacggactcgacaagggggagcccgtcaacgcggcggacgcagcggccctcgagcacgacaaggcctacgaccagcagctcaaagcgggtgacaatccgtacctgcggtataaccacgccgacgccgagtttcaggagcgtctgcaagaagatacgtcttttgggggcaacctcgggcgagcagtcttccaggccaagaagcgggttctcgaacctctcggtctggttgaggaaggcgctaagacggctcctggaaagaagagaccggtagagccatcaccccagcgttctccagactcctctacgggcatcggcaagaaaggccagcagcccgcgaaaaagagactcaactttgggcagactggcgactcagagtcagtgcccgaccctcaaccaatcggagaaccccccgcaggcccctctggtctgggatctggtacaatggctgcaggcggtggcgctccaatggcagacaataacgaaggcgccgacggagtgggtagttcctcaggaaattggcattgcgattccacatggctgggcgactgagtcatcaccaccagcacccgaacctgggccctccccacctacaacaaccacctctacaagcaaatctccaacgggacttcgggaggaagcaccaacgacaacacctacttcggctacagcaccccctgggggtattttgactttaacagattccactgccacttctcaccacgtgactggcagcgactcatcaacaacaactggggattccggcccaagagactcaacttcaagctcttcaacatccaggtcaaggaggtcacgcagaatgaaggcaccaagaccatcgccaataaccttaccagcacgattcaggtctttacggactcggaataccagctcccgtacgtcctcggctctgcgcaccagggctgcctgcctccgttcccggcggacgtcttcatgattcctcagtacgggtacctgactctgaacaatggcagtcaggccgtgggccgttcctccttctactgcctggagtactttccttctcaaatgctgagaacgggcaacaactttgagttcagctaccagtttgaggacgtgccttttcacagcagctacgcgcacagccaaagcctggaccggctgatgaaccccctcatcgaccagtacctgtactacctgtctcggactcagtccacgggaggtaccgcaggaactcagcagttgctattttctcaggccgggcctaataacatgtcggctcaggccaaaaactggctacccgggccctgctaccggcagtaacgcgtctccacgacactgtcgcaaaataacaacagcaactttgtctggaccggtgccaccaagtatcatctgaatggcagagactctctggtagatcccggtgtcgctatggcaacccacaaggacgacgaagagcgattttttccgtccagcggagtcataatgtttgggaaacagggagctggaaaagacaacgtggactatagcagcgtcatgctaaccagtgaggaagaaattaaaaccaccaacccagtggccacagaacagtacggcgtggtggccgataacctgcaacagcaaaacgccgctcctattgtaggggccgtcaacagtcaaggagccttacctggcatggtctggcagaaccgggacgtgtacctgcagggtcctacctgggccaagattcctcacacggacggaaactttcatccctcgccgctgatgggaggctttggactgaaacacccgcctcctcagatcctgattaagaatacacctgttcccgcggatcctccaactaccttcagtcaagctaagctggcgtcgttcatcacgcagtacagcaccggacaggtcagcgtggaaattgaatgggagctgcaggaagaaaacagcaaacgctggaacccagagattcaatacacttccaactactacaaatctacaaatgtggactttgctgttaacacagatggcacttattctgagcctcgccccatcggcacccgttacctcacccgtaatctgtaattgcttgttaatcaataaaccggttgattcgtttcagttgaactttggtctctgcgaagggcgaattc

SEQ ID NO: 29 - protein, 738 aa, Artificial Sequence
  Description of Artificial Sequence: Synthetic polypeptide
MAADGYLPDWLEDNLSEGIREWWALKPGAPKPKANQQKQDDGRGLVLPGYKYLGPFNGLDKGEPVNAADAAALEHDKAYDQQLKAGDNPYLRYNHADAEFQERLQEDTSFGGNLGRAVFQAKKRVLEPLGLVEEGAKTAPGKKRPVEPSPQRSPDSSTGIGKKGQQPAKKRLNFGQTGDSESVPDPQPIGEPPAGPSGLGSGTMAAGGGAPMADNNEGADGVGSSSGNWHCDSTWLGDGVITTSTRTWALPTYNNHLYKQISNGTSGGSTNDNTYFGYSTPWGYFDFNRFHCHFSPRDWQRLINNNWGFRPKSLNFKLFNIQVKEVTQNEGTKTIANNLTSTIQVFTDSEYQLPYVLGSAHQGCLPPFPADVFMIPQYGYLTLNNGSQAVGRSSFYCLEYFPSQMLRTGNNFEFSYQFEDVPFHSSYAHSQSLDRLMNPLIDQYLYYLSRTQSTGGTAGTQQLLFSQAGPNNMSAQAKNWLPGPCYRQQRVSTTLSQNDNSNFAWTGATKYHLNGRDSLVNPGVAMATHKDDEERFFPSSGVLMFGKQGAGKDNVDYSSVMLTSEEEIKTTNPVATEQYGVVADNLQQQNAAPIVGAVNSQGALPGMVWQNRDVYLQGPIWAKIPHTDGNFHPSPLMGGFGLKHPPPQILIKNTPVPADPPTTFSQAKLASFITQYSTGQVSVEIEWELQKENSKRWNPEIQYTSNYYKSTNVDFAVNTDGTYSEPRPIGTRYLTRNL

SEQ ID NO: 30 - DNA, 3121 bp, Adeno-associated virus
gaattcgcccttcgcgagaccaaagttcaactgaaacgaatcaaccggtttattgattaacaagcaattacagattacgggtgaggtaacgggtgccgatggggcgaggctcagaataagtgccatctgtgttaacagcaaagtccacatttgtagatttgtagtagttggaagtgtattgaatctctgggttccagcgtttgctgttttctttctgcagctcccattcaatttccacgctgacctgtccggtgctgtactgcgtgatgaacgacgccagcttagcttgactgaaggtagttggaggatccgcgggaacaggtgtattcttaatcaggatctgaggaggcgggtgtttcagtccaaagcctcccatcagcggcgagggatgaaagtttccgtccgtgtgaggaatcttggcccagataggaccctgcaggtacacgtcccggttctgccagaccatgccaggtaaggctccttgactgttgacggcccctacaataggagcggcgttttgctgttgcaggttatcggccaccacgccgtactgttctgtggccactgggttggtggttttaatttcttcctcactggttagcataacgctgctatagtccacgttgtcttttccagctccctgtttcccaaacattaagactccgctggacggaaaaaatcgctcttcgtcgtccttgtgggttgccatagcgacaccgggatttaccagagagtctctgccattcagatgatacttggtggcaccggtccaggcaaagttgctgttgtcattttgcgacagtgtcgtggagacgcgttgctgccggtagcagggcccgggtagccagtttttggcctgagccgacatgttattaggcccggcctgagaaaatagcaactgctgagttcctgcggtacctcccgtggactgagtccgagacaggtagtacaggtactggtcgatgagggggttcatcagccggtccaggctttggctgtgcgcgtagctgctgtgaaaaggcacgtcctcaaactggtagctgaactcaaagttgttgcccgttctcagcatttgagaaggaaagtactccaggcagtagaaggaggaacggcccacggcctgactgccattgttcagagtcaggtacccgtactgaggaatcatgaagacgtccgccgggaacggaggcaggcagccctggtgcgcagagccgaggacgtacgggagctggtattccgagtccgtaaagacctgaatcgtgctggtaaggttattggcgatggtcttggtgccttcattctgcgtgacctccttgacctggatgttgaagagcttgaagttgaggctcttgggccggaatccccagttgttgttgatgagtcgctgccagtcacgtggtgagaagtggcagtggaatctgttaaagtcaaaatacccccagggggtgctgtagccgaagtaggtgttgtcgttggtgcttcctcccgaagtcccgttggagatttgcttgtagaggtggttgttgtaggtggggagggcccaggttcgggtgctggtggtgatgactccgtcgcccagccatgtggaatcgcaatgccaatttcctgaggaactacccactccgtcggcgccttcgttattgtctgccattggagcgccaccgcctgcagccattgtaccagatcccagaccagaggggcctgcggggggttctccgattggttgagggtcgggcactgactctgagtcgccagtctgcccaaagttgagtctctttttcgcgggctgctggcctttcttgccgatgcccgtagaggagtctggagaacgctggggtgatggctctaccggtctcttctttccaggagccgtcttagcgccttcctcaaccagaccgagaggttcgagaacccgcttcttggcctggaagactgctcgcccgaggttgcccccaaaagacgtatcttcttgcagacgctcctgaaactcggcgtcggcgtggttataccgcaggtacggattgtcacccgctttgagctgctggtcgtaggccttgtcgtgctcgagggccgctgcgtccgccgcgttgacgggctcccccttgtcgagtccgttgaagggtccgaggtacttgtagccaggaagcaccagaccccggccgtcgtcctgcttttgctggttggctttgggcttcggggctccaggtttcagcgcccaccactcgcgaatgccctcagagaggttgtcctcgagccaatctggaagataaccatcggcagccatacctgatttaaatcatttattgttcaaagatgcagtcatccaaatccacattgaccagatcgcaggcagtgcaagcgtctggcacctttcccatgatatgatgaatgtagcacagtttctgatacgcctttttgacgacagaaacgggttgagattctgacacgggaaagcactctaaacagtctttctgtccgtgagtgaagcagatatttgaattctgattcattctctcgcattgtctgcagggaaacagcatcagattcatgcccacgtgacgagaacatttgttttggtacctgtctgcgtagttgatcgaagcttccgcgtctgacgtcgatggctgcgcaactgactcgcgcacccgtttgggctcacttatatctgcgtcactgggggcgggtcttttcttggctccaccctttttgacgtagaattcatgctccacctcaaccacgtgatcctttgcccaccggaaaaagtctttgacttcctgcttggtgaccttcccaaagtcatgatccagacggcgggtgagttcaaatttgaacatccggtcttgcaacggctgctggtgttcgaaggtcgttgagttcccgtcaatcacggcgcacatgttggtgttggaggtgacgatcacgggagtcgggtctatctgggccgaggacttgcatttctggtccacgcgcaccttgcttcctccgagaatggctttggccgactccacgaccttggcggtcatcttcccctcctcccaccagatcaccatcttgtcgacacagtcgttgaagggaaagttctcattggtccagttgacgcagccgtagaaagggcgaattc

SEQ ID NO: 31 - DNA, 2211 bp, Adeno-associated virus
atggctgctgacggttatcttccagattggctcgaggacaacctttctgaaggcattcgtgagtggtgggctctgaaacctggagtccctcaacccaaagcgaaccaacaacaccaggacaaccgtcggggtcttgtgcttccgggttacaaatacctcggacccggtaacggactcgacaaaggagagccggtcaacgaggcggacgcggcagccctcgaacacgacaaagcttacgaccagcagctcaaggccggtgacaacccgtacctcaagtacaaccacgccgacgccgagtttcaggagcgtcttcaagaagatacgtcttttgggggcaaccttggcagagcagtcttccaggccaaaaagaggatccttgagcctcttggtctggttgaggaagcagctaaaacggctcctggaaagaagggggctgtagatcagtctcctcaggaaccggactcatcatctggtgttggcaaatcgggcaaacagcctgccagaaaaagactaaatttcggtcagactggagactcagagtcagtcccagaccctcaacctctcggagaaccaccagcagcccccacaagtttgggatctaatacaatggcttcaggcggtggcgcaccaatggcagacaataacgagggtgccgatggagtgggtaattcctcaggaaattggcattgcgattcccaatggctgggcgacagagtcatcaccaccagcaccagaacctgggccctgcccacttacaacaaccatctctacaagcaaatctccagccaatcaggagcttcaaacgacaaccactactttggctacagcaccccttgggggtattttgactttaacagattccactgccacttctcaccacgtgactggcagcgactcattaacaacaactggggattccggcccaagaaactcagcttcaagctcttcaacatccaagttagaggggtcacgcagaacgatggcacgacgactattgccaataaccttaccagcacggttcaagtgtttacggactcggagtatcagctcccgtacgtgctcgggtcggcgcaccaaggctgtctcccgccgtttccagcggacgtcttcatggtccctcagtatggatacctcaccctgaacaacggaagtcaagcggtgggacgctcatccttttactgcctggagtacttcccttcgcagatgctaaggactggaaataacttccaattcagctataccttcgaggatgtaccttttcacagcagctacgctcacagccagagtttggatcgcttgatgaatcctcttattgatcagtatctgtactacctgaacagaacgcaaggaacaacctctggaacaaccaaccaatcacggctgctttttagccaggctgggcctcagtctatgtctttgcaggccagaaattggctacctgggccctgctaccggcaacagagactttcaaagactgctaacgacaacaacaacagtaactttccttggacagcggccagcaaatatcatctcaatggccgcgactcgctggtgaatccaggaccagctatggccagtcacaaggacgatgaagaaaaatttttccctatgcacggcaatctaatatttggcaaagaagggacaacggcaagtaacgcagaattagataatgtaatgattacggatgaagaagagattcgtaccaccaatcctgtggcaacagagcagtatggaactgtggcaaataacttgcagagctcaaatacagctcccacgactggaactgtcaatcatcagggggccttacctggcatggtgtggcaagatcgtgacgtgtaccttcaaggacctatctgggcaaagattcctcacacggatggacactttcatccttctcctctgatgggaggctttggactgaaacatccgcctcctcaaatcatgatcaaaaatactccggtaccggcaaatcctccgacgactttcagcccggccaagtttgcttcatttatcactcagtactccactggacaggtcagcgtggaaattgagtgggagctacagaaagaaaacagcaaacgttggaatccagagattcagtacacttccaactacaacaagtctgttaatgtggactttactgtagacactaatggtgtttatagtgaacctcgccctattggaacccggtatctcacacgaaacttgtga

SEQ ID NO: 32 - protein, 736 aa, Adeno-associated virus 3
MAADGYLPDWLEDNLSEGIREWWALKPGVPQPKANQQHQDNRRGLVLPGYKYLGPGNGLDKGEPVNEADAAALEHDKAYDQQLKAGDNPYLKYNHADAEFQERLQEDTSFGGNLGRAVFQAKKRILEPLGLVEEAAKTAPGKKGAVDQSPQEPDSSSGVGKSGKQPARKRLNFGQTGDSESVPDPQPLGEPPAAPTSLGSNTMASGGGAPMADNNEGADGVGNSSGNWHCDSQWLGDRVITTSTRTWALPTYNNHLYKQISSQSGASNDNHYFGYSTPWGYFDFNRFHCHFSPRDWQRLINNNWGFRPKKLSFKLFNIQVRGVTQNDGTTTIANNLTSTVQVFTDSEYQLPYVLGSAHQGCLPPFPADVFMVPQYGYLTLNNGSQAVGRSSFYCLEYFPSQMLRTGNNFQFSYTFEDVPFHSSYAHSQSLDRLMNPLIDQYLYYLNRTQGTTSGTTNQSRLLFSQAGPQSMSLQARNWLPGPCYRQQRLSKTANDNNNSNFPWTAASKYHLNGRDSLVNPGPAMASHKDDEEKFFPMHGNLIFGKEGTTASNAELDNVMITDEEEIRTTNPVATEQYGTVANNLQSSNTAPTTGTVNHQGALPGMVWQDRDVYLQGPIWAKIPHTDGHFHPSPLMGGFGLKHPPPQIMIKNTPVPANPPTTFSPAKFASFITQYSTGQVSVEIEWELQKENSKRWNPEIQYTSNYNKSVNVDFTVDTNGVYSEPRPIGTRYLTRNL

SEQ ID NO: 33 - DNA, 4726 bp, Adeno-associated virus 3
ttggccactccctctatgcgcactcgctcgctcggtggggcctggcgaccaaaggtcgccagacggacgtgctttgcacgtccggccccaccgagcgagcgagtgcgcatagagggagtggccaactccatcactagaggtatggcagtgacgtaacgcgaagcgcgcgaagcgagaccacgcctaccagctgcgtcagcagtcaggtgacccttttgcgacagtttgcgacaccacgtggccgctgagggtatatattctcgagtgagcgaaccaggagctccattttgaccgcgaaatttgaacgagcagcagccatgccggggttctacgagattgtcctgaaggtcccgagtgacctggacgagcgcctgccgggcatttctaactcgtttgttaactgggtggccgagaaggaatgggacgtgccgccggattctgacatggatccgaatctgattgagcaggcacccctgaccgtggccgaaaagcttcagcgcgagttcctggtggagtggcgccgcgtgagtaaggccccggaggccctcttttttgtccagttcgaaaagggggagacctacttccacctgcacgtgctgattgagaccatcggggtcaaatccatggtggtcggccgctacgtgagccagattaaagagaagctggtgacccgcatctaccgcggggtcgagccgcagcttccgaactggttcgcggtgaccaaaacgcgaaatggcgccgggggcgggaacaaggtggtggacgactgctacatccccaactacctgctccccaagacccagcccgagctccagtgggcgtggactaacatggaccagtatttaagcgcctgtttgaatctcgcggagcgtaaacggctggtggcgcagcatctgacgcacgtgtcgcagacgcaggagcagaacaaagagaatcagaaccccaattctgacgcgccggtcatcaggtcaaaaacctcagccaggtacatggagctggtcgggtggctggtggaccgcgggatcacgtcagaaaagcaatggattcaggaggaccaggcctcgtacatctccttcaacgccgcctccaactcgcggtcccagatcaaggccgcgctggacaatgcctccaagatcatgagcctgacaaagacggctccggactacctggtgggcagcaacccgccggaggacattaccaaaaatcggatctaccaaatcctggagctgaacgggtacgatccgcagtacgcggcctccgtcttcctgggctgggcgcaaaagaagttcgggaagaggaacaccatctggctctttgggccggccacgacgggtaaaaccaacatcgcggaagccatcgcccacgccgtgcccttctacggctgcgtaaactggaccaatgagaactttcccttcaacgattgcgtcgacaagatggtgatctggtgggaggagggcaagatgacggccaaggtcgtggagagcgccaaggccattctgggcggaagcaaggtgcgcgtggaccaaaagtgcaagtcatcggcccagatcgaacccactcccgtgatcgtcacctccaacaccaacatgtgcgccgtgattgacgggaacagcaccaccttcgagcatcagcagccgctgcaggaccggatgtttgaatttgaacttacccgccgtttggaccatgactttgggaaggtcaccaaacaggaagtaaaggactttttccggtgggcttccgatcacgtgactgacgtggctcatgagttctacgtcagaaagggtggagctaagaaacgccccgcctccaatgacgcggatgtaagcgagccaaaacgggagtgcacgtcacttgcgcagccgacaacgtcagacgcggaagcaccggcggactacgcggacaggtaccaaaacaaatgttctcgtcacgtgggcatgaatctgatgctttttccctgtaaaacatgcgagagaatgaatcaaatttccaatgtctgttttacgcatggtcaaagagactgtggggaatgcttccctggaatgtcagaatctcaacccgtttctgtcgtcaaaaagaagacttatcagaaactgtgtccaattcatcatatcctgggaagggcacccgagattgcctgttcggcctgcgatttggccaatgtggacttggatgactgtgtttctgagcaataaatgacttaaaccaggtatggctgctgacggttatcttccagattggctcgaggacaacctttctgaaggcattcgtgagtggtgggctctgaaacctggagtccctcaacccaaagcgaaccaacaacaccaggacaaccgtcggggtcttgtgcttccgggttacaaatacctcggacccggtaacggactcgacaaaggagagccggtcaacgaggcggacgcggcagccctcgaacacgacaaagcttacgaccagcagctcaaggccggtgacaacccgtacctcaagtacaaccacgccgacgccgagtttcaggagcgtcttcaagaagatacgtcttttgggggcaaccttggcagagcagtcttccaggccaaaaagaggatccttgagcctcttggtctggttgaggaagcagctaaaacggctcctggaaagaagggggctgtagatcagtctcctcaggaaccggactcatcatctggtgttggcaaatcgggcaaacagcctgccagaaaaagactaaatttcggtcagactggagactcagagtcagtcccagaccctcaacctctcggagaaccaccagcagcccccacaagtttgggatctaatacaatggcttcaggcggtggcgcaccaatggcagacaataacgagggtgccgatggagtgggtaattcctcaggaaattggcattgcgattcccaatggctgggcgacagagtcatcaccaccagcaccagaacctgggccctgcccacttacaacaaccatctctacaagcaaatctccagccaatcaggagcttcaaacgacaaccactactttggctacagcaccccttgggggtattttgactttaacagattccactgccacttctcaccacgtgactggcagcgactcattaacaacaactggggattccggcccaagaaactcagcttcaagctcttcaacatccaagttagaggggtcacgcagaacgatggcacgacgactattgccaataaccttaccagcacggttcaagtgtttacggactcggagtatcagctcccgtacgtgctcgggtcggcgcaccaaggctgtctcccgccgtttccagcggacgtcttcatggtccctcagtatggatacctcaccctgaacaacggaagtcaagcggtgggacgctcatccttttactgcctggagtacttcccttcgcagatgctaaggactggaaataacttccaattcagctataccttcgaggatgtaccttttcacagcagctacgctcacagccagagtttggatcgcttgatgaatcctcttattgatcagtatctgtactacctgaacagaacgcaaggaacaacctctggaacaaccaaccaatcacggctgctttttagccaggctgggcctcagtctatgtctttgcaggccagaaattggctacctgggccctgctaccggcaacagagactttcaaagactgctaacgacaacaacaacagtaactttccttggacagcggccagcaaatatcatctcaatggccgcgactcgctggtgaatccaggaccagctatggccagtcacaaggacgatgaagaaaaatttttccctatgcacggcaatctaatatttggcaaagaagggacaacggcaagtaacgcagaattagataatgtaatgattacggatgaagaagagattcgtaccaccaatcctgtggcaacagagcagtatggaactgtggcaaataacttgcagagctcaaatacagctcccacgactggaactgtcaatcatcagggggccttacctggcatggtgtggcaagatcgtgacgtgtaccttcaaggacctatctgggcaaagattcctcacacggatggacactttcatccttctcctctgatgggaggctttggactgaaacatccgcctcctcaaatcatgatcaaaaatactccggtaccggcaaatcctccgacgactttcagcccggccaagtttgcttcatttatcactcagtactccactggacaggtcagcgtggaaattgagtgggagctacagaaagaaaacagcaaacgttggaatccagagattcagtacacttccaactacaacaagtctgttaatgtggactttactgtagacactaatggtgtttatagtgaacctcgccctattggaacccggtatctcacacgaaacttgtgaatcctggttaatcaataaaccgtttaattcgtttcagttgaactttggctcttgtgcacttctttatctttatcttgtttccatggctactgcgtagataagcagcggcctgcggcgcttgcgcttcgcggtttacaactgctggttaatatttaactctcgccatacctctagtgatggagttggccactccctctatgcgcactcgctcgctcggtggggcctggcgaccaaaggtcgccagacggacgtgctttgcacgtccggccccaccgagcgagcgagtgcgcatagagggagtggccaa

SEQ ID NO: 34 - protein, 737 aa, Artificial Sequence
  Description of Artificial Sequence: Synthetic polypeptide
MAADGYLPDWLEDNLSEGIREWWDLKPGAPKPKANQQKQDNGRGLVLPGYKYLGPFNGLDKGEPVNAADAAALEHDKAYDQQLNAGDNPYLRYNHADAEFQERLQEDTSFGGNLGRAVFQAKKRVLEPLGLVEEGAKTAPAKKRPVEPSPQRSPDSSTGIGKKGQQPARKRLNFGQTGDSESVPDPQPLGEPPAAPSSVGSGTVAAGGGAPMADNNEGADGVGNASGNWHCDSTWLGDRVITTSTRTWALPTYNNHLYEQISSETAGSTNDNTYFGYSTPWGYFDFNRFHCHFSPRDWQRLINNNWGFRPKKLRFKLFNIQVKEVTTNDGVTTIANNLTSTIQVFSDSEYQLPYVLGSAHQGCLPPFPADVFMIPQYGYLTLNNGSQSVGRSSFYCLEYFPSQMLRTGNNFEFSYSFEDVPFHSSYAHSQSLDRLMNPLIDQYLYYLARTQSDPGGTAGNRELQFYQGGPSTMAEQAKNWLPGPCFRQQRVSKTLDQNNNSNFAWTGATKYHLNGRNSLVNPGVAMATHKDDEDRFFPSSGVLIFGKTGATNKTTLENVLMTNEEEIRPTNPVATEEYGIVSSNLQAANTAAQTQVVNNQGALPGMVWQNRDVYLQGPIWAKIPHTDGNFHPSPLMGGFGLKHPPPQILIKNTPVPANPPEVFTPAKFASFITQYSTGQVSVEIEWELQKENSKRWDPEIQYTSNFEKQTGVDFAVDSQGVYSEPRPIGTRYLTRNL

SEQ ID NO: 35 - DNA, 2211 bp, Adeno-associated virus
atggctgctgacggttatcttccagattggctcgaggacaacctttctgaaggcattcgtgagtggtgggctctgaaacctggagtccctcaacccaaagcgaaccaacaacaccaggacaaccgtcggggtcttgtgcttccgggttacaaatacctcggacccggtaacggactcgacaaaggagagccggtcaacgaggcggacgcggcagccctcgaacacgacaaagcttacgaccagcagctcaaggccggtgacaacccgtacctcaagtacaaccacgccgacgccgagtttcaggagcgtcttcaagaagatacgtcttttgggggcaaccttggcagagcagtcttccaggccaaaaagaggatccttgagcctcttggtctggttgaggaagcagctaaaacggctcctggaaagaagggggctgtagatcagtctcctcaggaaccggactcatcatctggtgttggcaaatcgggcaaacagcctgccagaaaaagactaaatttcggtcagactggagactcagagtcagtcccagaccctcaacctctcggagaaccaccagcagcccccacaagtttgggatctaatacaatggcttcaggcggtggcgcaccaatggcagacaataacgagggtgccgatggagtgggtaattcctcaggaaattggcattgcgattcccaatggctgggcgacagagtcatcaccaccagcaccagaacctgggccctgcccacttacaacaaccatctctacaagcaaatctccagccaatcaggagcttcaaacgacaaccactactttggctacagcaccccttgggggtattttgactttaacagattccactgccacttctcaccacgtgactggcagcgactcattaacaacaactggggattccggcccaagaaactcagcttcaagctcttcaacatccaagttagaggggtcacgcagaacgatggcacgacgactattgccaataaccttaccagcacggttcaagtgtttacggactcggagtatcagctcccgtacgtgctcgggtcggcgcaccaaggctgtctcccgccgtttccagcggacgtcttcatggtccctcagtatggatacctcaccctgaacaacggaagtcaagcggtgggacgctcatccttttactgcctggagtacttcccttcgcagatgctaaggactggaaataacttccaattcagctataccttcgaggatgtaccttttcacagcagctacgctcacagccagagtttggatcgcttgatgaatcctcttattgatcagtatctgtactacctgaacagaacgcaaggaacaacctctggaacaaccaaccaatcacggctgctttttagccaggctgggcctcagtctatgtctttgcaggccagaaattggctacctgggccctgctaccggcaacagagactttcaaagactgctaacgacaacaacaacagtaactttccttggacagcggccagcaaatatcatctcaatggccgcgactcgctggtgaatccaggaccagctatggccagtcacaaggacgatgaagaaaaatttttccctatgcacggcaatctaatatttggcaaagaagggacaacggcaagtaacgcagaattagataatgtaatgattacggatgaagaagagattcgtaccaccaatcctgtggcaacagagcagtatggaactgtggcaaataacttgcagagctcaaatacagctcccacgactggaactgtcaatcatcagggggccttacctggcatggtgtggcaagatcgtgacgtgtaccttcaaggacctatctgggcaaagattcctcacacggatggacactttcatccttctcctctgatgggaggctttggactgaaacatccgcctcctcaaatcatgatcaaaaatactccggtaccggcaaatcctccgacgactttcagcccggccaagtttgcttcatttatcactcagtactccactggacaggtcagcgtggaaattgagtgggagctacagaaagaaaacagcaaacgttggaatccagagattcagtacacttccaactacaacaagtctgttaatgtggactttactgtagacactaatggtgtttatagtgaacctcgccctattggaacccggtatctcacacgaaacttgtaa

SEQ ID NO: 36 - protein, 736 aa, Adeno-associated virus; identical to SEQ ID NO: 32

SEQ ID NO: 37 - protein, 736 aa, Adeno-associated virus 3A; identical to SEQ ID NO: 32

SEQ ID NO: 38 - protein, 624 aa, Adeno-associated virus 3A
MPGFYEIVLKVPSDLDERLPGISNSFVNWVAEKEWDVPPDSDMDPNLIEQAPLTVAEKLQREFLVEWRRVSKAPEALFFVQFEKGETYFHLHVLIETIGVKSMVVGRYVSQIKEKLVTRIYRGVEPQLPNWFAVTKTRNGAGGGNKVVDDCYIPNYLLPKTQPELQWAWTNMDQYLSACLNLAERKRLVAQHLTHVSQTQEQNKENQNPNSDAPVIRSKTSARYMELVGWLVDRGITSEKQWIQEDQASYISFNAASNSRSQIKAALDNASKIMSLTKTAPDYLVGSNPPEDITKNRIYQILELNGYDPQYAASVFLGWAQKKFGKRNTIWLFGPATTGKTNIAEAIAHAVPFYGCVNWTNENFPFNDCVDKMVIWWEEGKMTAKVVESAKAILGGSKVRVDQKCKSSAQIEPTPVIVTSNTNMCAVIDGNSTTFEHQQPLQDRMFEFELTRRLDHDFGKVTKQEVKDFFRWASDHVTDVAHEFYVRKGGAKKRPASNDADVSEPKRECTSLAQPTTSDAEAPADYADRYQNKCSRHVGMNLMLFPCKTCERMNQISNVCFTHGQRDCGECFPGMSESQPVSVVKKKTYQKLCPIHHILGRAPEIACSACDLANVDLDDCVSEQ

SEQ ID NO: 39 - protein, 736 aa, Adeno-associated virus 3B
MAADGYLPDWLEDNLSEGIREWWALKPGVPQPKANQQHQDNRRGLVLPGYKYLGPGNGLDKGEPVNEADAAALEHDKAYDQQLKAGDNPYLKYNHADAEFQERLQEDTSFGGNLGRAVFQAKKRILEPLGLVEEAAKTAPGKKRPVDQSPQEPDSSSGVGKSGKQPARKRLNFGQTGDSESVPDPQPLGEPPAAPTSLGSNTMASGGGAPMADNNEGADGVGNSSGNWHCDSQWLGDRVITTSTRTWALPTYNNHLYKQISSQSGASNDNHYFGYSTPWGYFDFNRFHCHFSPRDWQRLINNNWGFRPKKLSFKLFNIQVKEVTQNDGTTTIANNLTSTVQVFTDSEYQLPYVLGSAHQGCLPPFPADVFMVPQYGYLTLNNGSQAVGRSSFYCLEYFPSQMLRTGNNFQFSYTFEDVPFHSSYAHSQSLDRLMNPLIDQYLYYLNRTQGTTSGTTNQSRLLFSQAGPQSMSLQARNWLPGPCYRQQRLSKTANDNNNSNFPWTAASKYHLNGRDSLVNPGPAMASHKDDEEKFFPMHGNLIFGKEGTTASNAELDNVMITDEEEIRTTNPVATEQYGTVANNLQSSNTAPTTRTVNDQGALPGMVWQDRDVYLQGPIWAKIPHTDGHFHPSPLMGGFGLKHPPPQIMIKNTPVPANPPTTFSPAKFASFITQYSTGQVSVEIEWELQKENSKRWNPEIQYTSNYNKSVNVDFTVDTNGVYSEPRPIGTRYLTRNL

SEQ ID NO: 40 - protein, 624 aa, Adeno-associated virus 3B
MPGFYEIVLKVPSDLDEHLPGISNSFVNWVAEKEWELPPDSDMDPNLIEQAPLTVAEKLQREFLVEWRRVSKAPEALFFVQFEKGETYFHLHVLIETIGVKSMVVGRYVSQIKEKLVTRIYRGVEPQLPNWFAVTKTRNGAGGGNKVVDDCYIPNYLLPKTQPELQWAWTNMDQYLSACLNLAERKRLVAQHLTHVSQTQEQNKENQNPNSDAPVIRSKTSARYMELVGWLVDRGITSEKQWIQEDQASYISFNAASNSRSQIKAALDNASKIMSLTKTAPDYLVGSNPPEDITKNRIYQILELNGYDPQYAASVFLGWAQKKFGKRNTIWLFGPATTGKTNIAEAIAHAVPFYGCVNWTNENFPFNDCVDKMVIWWEEGKMTAKVVESAKAILGGSKVRVDQKCKSSAQIEPTPVIVTSNTNMCAVIDGNSTTFEHQQPLQDRMFKFELTRRLDHDFGKVTKQEVKDFFRWASDHVTDVAHEFYVRKGGAKKRPASNDADVSEPKRQCTSLAQPTTSDAEAPADYADRYQNKCSRHVGMNLMLFPCKTCERMNQISNVCFTHGQRDCGECFPGMSESQPVSVVKKKTYQKLCPIHHILGRAPEIACSACDLANVDLDDCVSEQ

SEQ ID NO: 41 - DNA, 4722 bp, Adeno-associated virus 3B
tggccactccctctatgcgcactcgctcgctcggtggggcctggcgaccaaaggtcgccagacggacgtgctttgcacgtccggccccaccgagcgagcgagtgcgcatagagggagtggccaactccatcactagaggtatggcagtgacgtaacgcgaagcgcgcgaagcgagaccacgcctaccagctgcgtcagcagtcaggtgacccttttgcgacagtttgcgacaccacgtggccgctgagggtatatattctcgagtgagcgaaccaggagctccattttgaccgcgaaatttgaacgagcagcagccatgccggggttctacgagattgtcctgaaggtcccgagtgacctggacgagcacctgccgggcatttctaactcgtttgttaactgggtggccgagaaggaatgggagctgccgccggattctgacatggatccgaatctgattgagcaggcacccctgaccgtggccgaaaagcttcagcgcgagttcctggtggagtggcgccgcgtgagtaaggccccggaggccctcttttttgtccagttcgaaaagggggagacctacttccacctgcacgtgctgattgagaccatcggggtcaaatccatggtggtcggccgctacgtgagccagattaaagagaagctggtgacccgcatctaccgcggggtcgagccgcagcttccgaactggttcgcggtgaccaaaacgcgaaatggcgccgggggcgggaacaaggtggtggacgactgctacatccccaactacctgctccccaagacccagcccgagctccagtgggcgtggactaacatggaccagtatttaagcgcctgtttgaatctcgcggagcgtaaacggctggtggcgcagcatctgacgcacgtgtcgcagacgcaggagcagaacaaagagaatcagaaccccaattctgacgcgccggtcatcaggtcaaaaacctcagccaggtacatggagctggtcgggtggctggtggaccgcgggatcacgtcagaaaagcaatggattcaggaggaccaggcctcgtacatctccttcaacgccgcctccaactcgcggtcccagatcaaggccgcgctggacaatgcctccaagatcatgagcctgacaaagacggctccggactacctggtgggcagcaacccgccggaggacattaccaaaaatcggatctaccaaatcctggagctgaacgggtacgatccgcagtacgcggcctccgtcttcctgggctgggcgcaaaagaagttcgggaagaggaacaccatctggctctttgggccggccacgacgggtaaaaccaacatcgcggaagccatcgcccacgccgtgcccttctacggctgcgtaaactggaccaatgagaactttcccttcaacgattgcgtcgacaagatggtgatctggtgggaggagggcaagatgacggccaaggtcgtggagagcgccaaggccattctgggcggaagcaaggtgcgcgtggaccaaaagtgcaagtcatcggcccagatcgaacccactcccgtgatcgtcacctccaacaccaacatgtgcgccgtgattgacgggaacagcaccaccttcgagcatcagcagccgctgcaggaccggatgtttaaatttgaacttacccgccgtttggaccatgactttgggaaggtcaccaaacaggaagtaaaggactttttccggtgggcttccgatcacgtgactgacgtggctcatgagttctacgtcagaaagggtggagctaagaaacgccccgcctccaatgacgcggatgtaagcgagccaaaacggcagtgcacgtcacttgcgcagccgacaacgtcagacgcggaagcaccggcggactacgcggacaggtaccaaaacaaatgttctcgtcacgtgggcatgaatctgatgctttttccctgtaaaacatgcgagagaatgaatcaaatttccaatgtctgttttacgcatggtcaaagagactgtggggaatgcttccctggaatgtcagaatctcaacccgtttctgtcgtcaaaaagaagacttatcagaaactgtgtccaattcatcatatcctgggaagggcacccgagattgcctgttcggcctgcgatttggccaatgtggacttggatgactgtgtttctgagcaataaatgacttaaaccaggtatggctgctgacggttatcttccagattggctcgaggacaacctttctgaaggcattcgtgagtggtgggctctgaaacctggagtccctcaacccaaagcgaaccaacaacaccaggacaaccgtcggggtcttgtgcttccgggttacaaatacctcggacccggtaacggactcgacaaaggagagccggtcaacgaggcggacgcggcagccctcgaacacgacaaagcttacgaccagcagctcaaggccggtgacaacccgtacctcaagtacaaccacgccgacgccgagtttcaggagcgtcttcaagaagatacgtcttttgggggcaaccttggcagagcagtcttccaggccaaaaagaggatccttgagcctcttggtctggttgaggaagcagctaaaacggctcctggaaagaagaggcctgtagatcagtctcctcaggaaccggactcatcatctggtgttggcaaatcgggcaaacagcctgccagaaaaagactaaatttcggtcagactggcgactcagagtcagtcccagaccctcaacctctcggagaaccaccagcagcccccacaagtttgggatctaatacaatggcttcaggcggtggcgcaccaatggcagacaataacgagggtgccgatggagtgggtaattcctcaggaaattggcattgcgattcccaatggctgggcgacagagtcatcaccaccagcaccagaacctgggccctgcccacttacaacaaccatctctacaagcaaatctccagccaatcaggagcttcaaacgacaaccactactttggctacagcaccccttgggggtattttgactttaacagattccactgccacttctcaccacgtgactggcagcgactcattaacaacaactggggattccggcccaagaaactcagcttcaagctcttcaacatccaagttaaagaggtcacgcagaacgatggcacgacgactattgccaataaccttaccagcacggttcaagtgtttacggactcggagtatcagctcccgtacgtgctcgggtcggcgcaccaaggctgtctcccgccgtttccagcggacgtcttcatggtccctcagtatggatacctcaccctgaacaacggaagtcaagcggtgggacgctcatccttttactgcctggagtacttcccttcgcagatgctaaggactggaaataacttccaattcagctataccttcgaggatgtaccttttcacagcagctacgctcacagccagagtttggatcgcttgatgaatcctcttattgatcagtatctgtactacctgaacagaacgcaaggaacaacctctggaacaaccaaccaatcacggctgctttttagccaggctgggcctcagtctatgtctttgcaggccagaaattggctacctgggccctgctaccggcaacagagactttcaaagactgctaacgacaacaacaacagtaactttccttggacagcggccagcaaatatcatctcaatggccgcgactcgctggtgaatccaggaccagctatggccagtcacaaggacgatgaagaaaaatttttccctatgcacggcaatctaatatttggcaaagaagggacaacggcaagtaacgcagaattagataatgtaatgattacggatgaagaagagattcgtaccaccaatcctgtggcaacagagcagtatggaactgtggcaaataacttgcagagctcaaatacagctcccacgactagaactgtcaatgatcagggggccttacctggcatggtgtggcaagatcgtgacgtgtaccttcaaggacctatctgggcaaagattcctcacacggatggacactttcatccttctcctctgatgggaggctttggactgaaacatccgcctcctcaaatcatgatcaaaaatactccggtaccggcaaatcctccgacgactttcagcccggccaagtttgcttcatttatcactcagtactccactggacaggtcagcgtggaaattgagtgggagctacagaaagaaaacagcaaacgttggaatccagagattcagtacacttccaactacaacaagtctgttaatgtggactttactgtagacactaatggtgtttatagtgaacctcgccctattggaacccggtatctcacacgaaacttgtaatcctggttaatcaataaaccgtttaattcgtttcagttgaactttggctcttgtgcacttcttatcttatcttgtttccatggctactgcgtagataagcagcggcctgcggcgcttgcgcttcgcggtttacaactgctggttaatatttaactctcgccatacctctagtgatggagttggccactccctctatgcgcactcgctcgctcggtggggccggacgtgcaaagcacgtccgtctggcgacctttggtcgccaggccccaccgagcgagcgagtgcgcatagagggagtggccaa

SEQ ID NO: 42 - DNA, 1800 bp, Adeno-associated virus 4
  modified_base (342)..(342): a, t, c, or g
acggctcctggaaagaagagaccgttgattgaatccccccagcagcccgactcctccacgggtatcggcaaaaaaggcaagcagccggctaaaaagaagctcgttttcgaagacgaaactggagcaggcgacggaccccctgagggatcaacttccggagccatgtctgatgacagtgagatgcgtgcagcagctggcggagctgcagtcgagggsggacaaggtgccgatggagtgggtaatgcctcgggtgattggcattgcgattccacctggtctgagggccacgtcacgaccaccagcaccagaacctgggtcttgcccacctacaacaaccacctntacaagcgactcggagagagcctgcagtccaacacctacaacggattctccaccccctggggatactttgacttcaaccgcttccactgccacttctcaccacgtgactggcagcgactcatcaacaacaactggggcatgcgacccaaagccatgcgggtcaaaatcttcaacatccaggtcaaggaggtcacgacgtcgaacggcgagacaacggtggctaataaccttaccagcacggttcagatctttgcggactcgtcgtacgaactgccgtacgtgatggatgcgggtcaagagggcagcctgcctccttttcccaacgacgtctttatggtgccccagtacggctactgtggactggtgaccggcaacacttcgcagcaacagactgacagaaatgccttctactgcctggagtactttccttcgcagatgctgcggactggcaacaactttgaaattacgtacagttttgagaaggtgcctttccactcgatgtacgcgcacagccagagcctggaccggctgatgaaccctctcatcgaccagtacctgtggggactgcaatcgaccaccaccggaaccaccctgaatgccgggactgccaccaccaactttaccaagctgcggcctaccaacttttccaactttaaaaagaactggctgcccgggccttcaatcaagcagcagggcttctcaaagactgccaatcaaaactacaagatccctgccaccgggtcagacagtctcatcaaatacgagacgcacagcactctggacggaagatggagtgccctgacccccggacctccaatggccacggctggacctgcggacagcaagttcagcaacagccagctcatctttgcggggcctaaacagaacggcaacacggccaccgtacccgggactctgatcttcacctctgaggaggagctggcagccaccaacgccaccgatacggacatgtggggcaacctacctggcggtgaccagagcaacagcaacctgccgaccgtggacagactgacagccttgggagccgtgcctggaatggtctggcaaaacagagacatttactaccagggtcccatttgggccaagattcctcataccgatggacactttcacccctcaccgctgattggtgggtttgggctgaaacacccgcctcctcaaatttttatcaagaacaccccggtacctgcgaatcctgcaacgaccttcagctctactccggtaaactccttcattactcagtacagcactggccaggtgtcggtgcagattgactgggagatccagaaggagcggtccaaacgctggaaccccgaggtccagtttacctccaactacggacagcaaaactctctgttgtgggctcccgatgcggctgggaaatacactgagcctagggctatcggtacccgctacctcacccaccacctgtaataa

SEQ ID NO: 43 - DNA, 2208 bp, Adeno-associated virus 4
  modified_base (750)..(750): a, t, c, or g
atgactgacggttaccttccagattggctagaggacaacctctctgaaggcgttcgagagtggtgggcgctgcaacctggagcccctaaacccaaggcaaatcaacaacatcaggacaacgctcggggtcttgtgcttccgggttacaaatacctcggacccggcaacggactcgacaagggggaacccgtcaacgcagcggacgcggcagccctcgagcacgacaaggcctacgaccagcagctcaaggccggtgacaacccctacctcaagtacaaccacgccgacgcggagttccagcagcggcttcagggcgacacatcgtttgggggcaacctcggcagagcagtcttccaggccaaaaagagggttcttgaacctcttggtctggttgagcaagcgggtgagacggctcctggaaagaagagaccgttgattgaatccccccagcagcccgactcctccacgggtatcggcaaaaaaggcaagcagccggctaaaaagaagctcgttttcgaagacgaaactggagcaggcgacggaccccctgagggatcaacttccggagccatgtctgatgacagtgagatgcgtgcagcagctggcggagctgcagtcgagggsggacaaggtgccgatggagtgggtaatgcctcgggtgattggcattgcgattccacctggtctgagggccacgtcacgaccaccagcaccagaacctgggtcttgcccacctacaacaaccacctntacaagcgactcggagagagcctgcagtccaacacctacaacggattctccaccccctggggatactttgacttcaaccgcttccactgccacttctcaccacgtgactggcagcgactcatcaacaacaactggggcatgcgacccaaagccatgcgggtcaaaatcttcaacatccaggtcaaggaggtcacgacgtcgaacggcgagacaacggtggctaataaccttaccagcacggttcagatctttgcggactcgtcgtacgaactgccgtacgtgatggatgcgggtcaagagggcagcctgcctccttttcccaacgacgtctttatggtgccccagtacggctactgtggactggtgaccggcaacacttcgcagcaacagactgacagaaatgccttctactgcctggagtactttccttcgcagatgctgcggactggcaacaactttgaaattacgtacagttttgagaaggtgcctttccactcgatgtacgcgcacagccagagcctggaccggctgatgaaccctctcatcgaccagtacctgtggggactgcaatcgaccaccaccggaaccaccctgaatgccgggactgccaccaccaactttaccaagctgcggcctaccaacttttccaactttaaaaagaactggctgcccgggccttcaatcaagcagcagggcttctcaaagactgccaatcaaaactacaagatccctgccaccgggtcagacagtctcatcaaatacgagacgcacagcactctggacggaagatggagtgccctgacccccggacctccaatggccacggctggacctgcggacagcaagttcagcaacagccagctcatctttgcggggcctaaacagaacggcaacacggccaccgtacccgggactctgatcttcacctctgaggaggagctggcagccaccaacgccaccgatacggacatgtggggcaacctacctggcggtgaccagagcaacagcaacctgccgaccgtggacagactgacagccttgggagccgtgcctggaatggtctggcaaaacagagacatttactaccagggtcccatttgggccaagattcctcataccgatggacactttcacccctcaccgctgattggtgggtttgggctgaaacacccgcctcctcaaatttttatcaagaacaccccggtacctgcgaatcctgcaacgaccttcagctctactccggtaaactccttcattactcagtacagcactggccaggtgtcggtgcagattgactgggagatccagaaggagcggtccaaacgctggaaccccgaggtccagtttacctccaactacggacagcaaaactctctgttgtgggctcccgatgcggctgggaaatacactgagcctagggctatcggtacccgctacctcacccaccacctgtaataa

SEQ ID NO: 44 - DNA, 1872 bp, Adeno-associated virus 4
atgccggggttctacgagatcgtgctgaaggtgcccagcgacctggacgagcacctgcccggcatttctgactcttttgtgagctgggtggccgagaaggaatgggagctgccgccggattctgacatggacttgaatctgattgagcaggcacccctgaccgtggccgaaaagctgcaacgcgagttcctggtcgagtggcgccgcgtgagtaaggccccggaggccctcttctttgtccagttcgagaagggggacagctacttccacctgcacatcctggtggagaccgtgggcgtcaaatccatggtggtgggccgctacgtgagccagattaaagagaagctggtgacccgcatctaccgcggggtcgagccgcagcttccgaactggttcgcggtgaccaagacgcgtaatggcgccggaggcgggaacaaggtggtggacgactgctacatccccaactacctgctccccaagacccagcccgagctccagtgggcgtggactaacatggaccagtatataagcgcctgtttgaatctcgcggagcgtaaacggctggtggcgcagcatctgacgcacgtgtcgcagacgcaggagcagaacaaggaaaaccagaaccccaattctgacgcgccggtcatcaggtcaaaaacctccgccaggtacatggagctggtcgggtggctggtggaccgcgggatcacgtcagaaaagcaatggatccaggaggaccaggcgtcctacatctccttcaacgccgcctccaactcgcggtcacaaatcaaggccgcgctggacaatgcctccaaaatcatgagcctgacaaagacggctccggactacctggtgggccagaacccgccggaggacatttccagcaaccgcatctaccgaatcctcgagatgaacgggtacgatccgcagtacgcggcctccgtcttcctgggctgggcgcaaaagaagttcgggaagaggaacaccatctggctctttgggccggccacgacgggtaaaaccaacatcgcggaagccatcgcccacgccgtgcccttctacggctgcgtgaactggaccaatgagaactttccgttcaacgattgcgtcgacaagatggtgatctggtgggaggagggcaagatgacggccaaggtcgtagagagcgccaaggccatcctgggcggaagcaaggtgcgcgtggaccaaaagtgcaagtcatcggcccagatcgacccaactcccgtgatcgtcacctccaacaccaacatgtgcgcggtcatcgacggaaactcgaccaccttcgagcaccaacaaccactccaggaccggatgttcaagttcgagctcaccaagcgcctggagcacgactttggcaaggtcaccaagcaggaagtcaaagactttttccggtgggcgtcagatcacgtgaccgaggtgactcacgagttttacgtcagaaagggtggagctagaaagaggcccgcccccaatgacgcagatataagtgagcccaagcgggcctgtccgtcagttgcgcagccatcgacgtcagacgcggaagctccggtggactacgcggacaggtaccaaaacaaatgttctcgtcacgtgggtatgaatctgatgctttttccctgccggcaatgcgagagaatgaatcagaatgtggacatttgcttcacgcacggggtcatggactgtgccgagtgcttccccgtgtcagaatctcaacccgtgtctgtcgtcagaaagcggacgtatcagaaactgtgtccgattcatcacatcatggggagggcgcccgaggtggcctgctcggcctgcgaactggccaatgtggacttggatgactgtgacatggaacaataa

SEQ ID NO: 45 - DNA, 1611 bp, Adeno-associated virus 4
atgccggggttctacgagatcgtgctgaaggtgcccagcgacctggacgagcacctgcccggcatttctgactcttttgtgagctgggtggccgagaaggaatgggagctgccgccggattctgacatggacttgaatctgattgagcaggcacccctgaccgtggccgaaaagctgcaacgcgagttcctggtcgagtggcgccgcgtgagtaaggccccggaggccctcttctttgtccagttcgagaagggggacagctacttccacctgcacatcctggtggagaccgtgggcgtcaaatccatggtggtgggccgctacgtgagccagattaaagagaagctggtgacccgcatctaccgcggggtcgagccgcagcttccgaactggttcgcggtgaccaagacgcgtaatggcgccggaggcgggaacaaggtggtggacgactgctacatccccaactacctgctccccaagacccagcccgagctccagtgggcgtggactaacatggaccagtatataagcgcctgtttgaatctcgcggagcgtaaacggctggtggcgcagcatctgacgcacgtgtcgcagacgcaggagcagaacaaggaaaaccagaaccccaattctgacgcgccggtcatcaggtcaaaaacctccgccaggtacatggagctggtcgggtggctggtggaccgcgggatcacgtcagaaaagcaatggatccaggaggaccaggcgtcctacatctccttcaacgccgcctccaactcgcggtcacaaatcaaggccgcgctggacaatgcctccaaaatcatgagcctgacaaagacggctccggactacctggtgggccagaacccgccggaggacatttccagcaaccgcatctaccgaatcctcgagatgaacgggtacgatccgcagtacgcggcctccgtcttcctgggctgggcgcaaaagaagttcgggaagaggaacaccatctggctctttgggccggccacgacgggtaaaaccaacatcgcggaagccatcgcccacgccgtgcccttctacggctgcgtgaactggaccaatgagaactttccgttcaacgattgcgtcgacaagatggtgatctggtgggaggagggcaagatgacggccaaggtcgtagagagcgccaaggccatcctgggcggaagcaaggtgcgcgtggaccaaaagtgcaagtcatcggcccagatcgacccaactcccgtgatcgtcacctccaacaccaacatgtgcgcggtcatcgacggaaactcgaccaccttcgagcaccaacaaccactccaggaccggatgttcaagttcgagctcaccaagcgcctggagcacgactttggcaaggtcaccaagcaggaagtcaaagactttttccggtgggcgtcagatcacgtgaccgaggtgactcacgagttttacgtcagaaagggtggagctagaaagaggcccgcccccaatgacgcagatataagtgagcccaagcgggcctgtccgtcagttgcgcagccatcgacgtcagacgcggaagctccggtggactacgcggacagattggctagaggacaacctctctga

SEQ ID NO: 46 - DNA, 1872 bp, Adeno-associated virus 4; identical to SEQ ID NO: 44

SEQ ID NO: 47 - DNA, 1617 bp, Adeno-associated virus 4
  modified_base (162)..(162): a, t, c, or g
atgcgtgcagcagctggcggagctgcagtcgagggsggacaaggtgccgatggagtgggtaatgcctcgggtgattggcattgcgattccacctggtctgagggccacgtcacgaccaccagcaccagaacctgggtcttgcccacctacaacaaccacctntacaagcgactcggagagagcctgcagtccaacacctacaacggattctccaccccctggggatactttgacttcaaccgcttccactgccacttctcaccacgtgactggcagcgactcatcaacaacaactggggcatgcgacccaaagccatgcgggtcaaaatcttcaacatccaggtcaaggaggtcacgacgtcgaacggcgagacaacggtggctaataaccttaccagcacggttcagatctttgcggactcgtcgtacgaactgccgtacgtgatggatgcgggtcaagagggcagcctgcctccttttcccaacgacgtctttatggtgccccagtacggctactgtggactggtgaccggcaacacttcgcagcaacagactgacagaaatgccttctactgcctggagtactttccttcgcagatgctgcggactggcaacaactttgaaattacgtacagttttgagaaggtgcctttccactcgatgtacgcgcacagccagagcctggaccggctgatgaaccctctcatcgaccagtacctgtggggactgcaatcgaccaccaccggaaccaccctgaatgccgggactgccaccaccaactttaccaagctgcggcctaccaacttttccaactttaaaaagaactggctgcccgggccttcaatcaagcagcagggcttctcaaagactgccaatcaaaactacaagatccctgccaccgggtcagacagtctcatcaaatacgagacgcacagcactctggacggaagatggagtgccctgacccccggacctccaatggccacggctggacctgcggacagcaagttcagcaacagccagctcatctttgcggggcctaaacagaacggcaacacggccaccgtacccgggactctgatcttcacctctgaggaggagctggcagccaccaacgccaccgatacggacatgtggggcaacctacctggcggtgaccagagcaacagcaacctgccgaccgtggacagactgacagccttgggagccgtgcctggaatggtctggcaaaacagagacatttactaccagggtcccatttgggccaagattcctcataccgatggacactttcacccctcaccgctgattggtgggtttgggctgaaacacccgcctcctcaaatttttatcaagaacaccccggtacctgcgaatcctgcaacgaccttcagctctactccggtaaactccttcattactcagtacagcactggccaggtgtcggtgcagattgactgggagatccagaaggagcggtccaaacgctggaaccccgaggtccagtttacctccaactacggacagcaaaactctctgttgtgggctcccgatgcggctgggaaatacactgagcctagggctatcggtacccgctacctcacccaccacctgtaa

SEQ ID NO: 48 - DNA, 939 bp, Adeno-associated virus 4
atggagctggtcgggtggctggtggaccgcgggatcacgtcagaaaagcaatggatccaggaggaccaggcgtcctacatctccttcaacgccgcctccaactcgcggtcacaaatcaaggccgcgctggacaatgcctccaaaatcatgagcctgacaaagacggctccggactacctggtgggccagaacccgccggaggacatttccagcaaccgcatctaccgaatcctcgagatgaacgggtacgatccgcagtacgcggcctccgtcttcctgggctgggcgcaaaagaagttcgggaagaggaacaccatctggctctttgggccggccacgacgggtaaaaccaacatcgcggaagccatcgcccacgccgtgcccttctacggctgcgtgaactggaccaatgagaactttccgttcaacgattgcgtcgacaagatggtgatctggtgggaggagggcaagatgacggccaaggtcgtagagagcgccaaggccatcctgggcggaagcaaggtgcgcgtggaccaaaagtgcaagtcatcggcccagatcgacccaactcccgtgatcgtcacctccaacaccaacatgtgcgcggtcatcgacggaaactcgaccaccttcgagcaccaacaaccactccaggaccggatgttcaagttcgagctcaccaagcgcctggagcacgactttggcaaggtcaccaagcaggaagtcaaagactttttccggtgggcgtcagatcacgtgaccgaggtgactcacgagttttacgtcagaaagggtggagctagaaagaggcccgcccccaatgacgcagatataagtgagcccaagcgggcctgtccgtcagttgcgcagccatcgacgtcagacgcggaagctccggtggactacgcggacagattggctagaggacaacctctctga

SEQ ID NO: 49 - DNA, 1197 bp, Adeno-associated virus 4
atggagctggtcgggtggctggtggaccgcgggatcacgtcagaaaagcaatggatccaggaggaccaggcgtcctacatctccttcaacgccgcctccaactcgcggtcacaaatcaaggccgcgctggacaatgcctccaaaatcatgagcctgacaaagacggctccggactacctggtgggccagaacccgccggaggacatttccagcaaccgcatctaccgaatcctcgagatgaacgggtacgatccgcagtacgcggcctccgtcttcctgggctgggcgcaaaagaagttcgggaagaggaacaccatctggctctttgggccggccacgacgggtaaaaccaacatcgcggaagccatcgcccacgccgtgcccttctacggctgcgtgaactggaccaatgagaactttccgttcaacgattgcgtcgacaagatggtgatctggtgggaggagggcaagatgacggccaaggtcgtagagagcgccaaggccatcctgggcggaagcaaggtgcgcgtggaccaaaagtgcaagtcatcggcccagatcgacccaactcccgtgatcgtcacctccaacaccaacatgtgcgcggtcatcgacggaaactcgaccaccttcgagcaccaacaaccactccaggaccggatgttcaagttcgagctcaccaagcgcctggagcacgactttggcaaggtcaccaagcaggaagtcaaagactttttccggtgggcgtcagatcacgtgaccgaggtgactcacgagttttacgtcagaaagggtggagctagaaagaggcccgcccccaatgacgcagatataagtgagcccaagcgggcctgtccgtcagttgcgcagccatcgacgtcagacgcggaagctccggtggactacgcggacaggtaccaaaacaaatgttctcgtcacgtgggtatgaatctgatgctttttccctgccggcaatgcgagagaatgaatcagaatgtggacatttgcttcacgcacggggtcatggactgtgccgagtgcttccccgtgtcagaatctcaacccgtgtctgtcgtcagaaagcggacgtatcagaaactgtgtccgattcatcacatcatggggagggcgcccgaggtggcctgctcggcctgcgaactggccaatgtggacttggatgactgtgacatggaacaa

SEQ ID NO: 50 - DNA, 245 bp, Adeno-associated virus 4
ctccatcatctaggtttgcccactgacgtcaatgtgacgtcctagggttagggaggtccctgtattagcagtcacgtgagtgtcgtatttcgcggagcgtagcggagcgcataccaagctgccacgtcacagccacgtggtccgtttgcgacagtttgcgacaccatgtggtcaggagggtatataaccgcgagtgagccagcgaggagctccattttgcccgcgaattttgaacgagcagcagc

SEQ ID NO: 51 - protein, 313 aa, Adeno-associated virus 4
  MOD_RES (313)..(313): Any amino acid
MELVGWLVDRGITSEKQWIQEDQASYISFNAASNSRSQIKAALDNASKIMSLTKTAPDYLVGQNPPEDISSNRIYRILEMNGYDPQYAASVFLGWAQKKFGKRNTIWLFGPATTGKTNIAEAIAHAVPFYGCVNWTNENFPFNDCVDKMVIWWEEGKMTAKVVESAKAILGGSKVRVDQKCKSSAQIDPTPVIVTSNTNMCAVIDGNSTTFEHQQPLQDRMFKFELTKRLEHDFGKVTKQEVKDFFRWASDHVTEVTHEFYVRKGGARKRPAPNDADISEPKRACPSVAQPSTSDAEAPVDYADRLARGQPLX

SEQ ID NO: 52 - protein, 399 aa, Adeno-associated virus 4
MELVGWLVDRGITSEKQWIQEDQASYISFNAASNSRSQIKAALDNASKIMSLTKTAPDYLVGQNPPEDISSNRIYRILEMNGYDPQYAASVFLGWAQKKFGKRNTIWLFGPATTGKTNIAEAIAHAVPFYGCVNWTNENFPFNDCVDKMVIWWEEGKMTAKVVESAKAILGGSKVRVDQKCKSSAQIDPTPVIVTSNTNMCAVIDGNSTTFEHQQPLQDRMFKFELTKRLEHDFGKVTKQEVKDFFRWASDHVTEVTHEFYVRKGGARKRPAPNDADISEPKRACPSVAQPSTSDAEAPVDYADRYQNKCSRHVGMNLMLFPCRQCERMNQNVDICFTHGVMDCAECFPVSESQPVSVVRKRTYQKLCPIHHIMGRAPEVACSACELANVDLDDCDMEQ

SEQ ID NO: 53 - protein, 623 aa, Adeno-associated virus 4
MPGFYEIVLKVPSDLDEHLPGISDSFVSWVAEKEWELPPDSDMDLNLIEQAPLTVAEKLQREFLVEWRRVSKAPEALFFVQFEKGDSYFHLHILVETVGVKSMVVGRYVSQIKEKLVTRIYRGVEPQLPNWFAVTKTRNGAGGGNKVVDDCYIPNYLLPKTQPELQWAWTNMDQYISACLNLAERKRLVAQHLTHVSQTQEQNKENQNPNSDAPVIRSKTSARYMELVGWLVDRGITSEKQWIQEDQASYISFNAASNSRSQIKAALDNASKIMSLTKTAPDYLVGQNPPEDISSNRIYRILEMNGYDPQYAASVFLGWAQKKFGKRNTIWLFGPATTGKTNIAEAIAHAVPFYGCVNWTNENFPFNDCVDKMVIWWEEGKMTAKVVESAKAILGGSKVRVDQKCKSSAQIDPTPVIVTSNTNMCAVIDGNSTTFEHQQPLQDRMFKFELTKRLEHDFGKVTKQEVKDFFRWASDHVTEVTHEFYVRKGGARKRPAPNDADISEPKRACPSVAQPSTSDAEAPVDYADRYQNKCSRHVGMNLMLFPCRQCERMNQNVDICFTHGVMDCAECFPVSESQPVSVVRKRTYQKLCPIHHIMGRAPEVACSACELANVDLDDCDMEQ

SEQ ID NO: 54 - protein, 537 aa, Adeno-associated virus 4
  MOD_RES (537)..(537): Any amino acid
MPGFYEIVLKVPSDLDEHLPGISDSFVSWVAEKEWELPPDSDMDLNLIEQAPLTVAEKLQREFLVEWRRVSKAPEALFFVQFEKGDSYFHLHILVETVGVKSMVVGRYVSQIKEKLVTRIYRGVEPQLPNWFAVTKTRNGAGGGNKVVDDCYIPNYLLPKTQPELQWAWTNMDQYISACLNLAERKRLVAQHLTHVSQTQEQNKENQNPNSDAPVIRSKTSARYMELVGWLVDRGITSEKQWIQEDQASYISFNAASNSRSQIKAALDNASKIMSLTKTAPDYLVGQNPPEDISSNRIYRILEMNGYDPQYAASVFLGWAQKKFGKRNTIWLFGPATTGKTNIAEAIAHAVPFYGCVNWTNENFPFNDCVDKMVIWWEEGKMTAKVVESAKAILGGSKVRVDQKCKSSAQIDPTPVIVTSNTNMCAVIDGNSTTFEHQQPLQDRMFKFELTKRLEHDFGKVTKQEVKDFFRWASDHVTEVTHEFYVRKGGARKRPAPNDADISEPKRACPSVAQPSTSDAEAPVDYADRLARGQPLX

SEQ ID NO: 55 - protein, 623 aa, Adeno-associated virus 4; identical to SEQ ID NO: 53

SEQ ID NO: 56 - protein, 544 aa, Adeno-associated virus 4
MSDDSEMRAAAGGAAVEGGQGADGVGNASGDWHCDSTWSEGHVTTTSTRTWVLPTYNNHLYKRLGESLQSNTYNGFSTPWGYFDFNRFHCHFSPRDWQRLINNNWGMRPKAMRVKIFNIQVKEVTTSNGETTVANNLTSTVQIFADSSYELPYVMDAGQEGSLPPFPNDVFMVPQYGYCGLVTGNTSQQQTDRNAFYCLEYFPSQMLRTGNNFEITYSFEKVPFHSMYAHSQSLDRLMNPLIDQYLWGLQSTTTGTTLNAGTATTNFTKLRPTNFSNFKKNWLPGPSIKQQGFSKTANQNYKIPATGSDSLIKYETHSTLDGRWSALTPGPPMATAGPADSKFSNSQLIFAGPKQNGNTATVPGTLIFTSEEELAATNATDTDMWGNLPGGDQSNSNLPTVDRLTALGAVPGMVWQNRDIYYQGPIWAKIPHTDGHFHPSPLIGGFGLKHPPPQIFIKNTPVPANPATTFSSTPVNSFITQYSTGQVSVQIDWEIQKERSKRWNPEVQFTSNYGQQNSLLWAPDAAGKYTEPRAIGTRYLTHHL

SEQ ID NO: 57 - protein, 734 aa, Adeno-associated virus 4
MTDGYLPDWLEDNLSEGVREWWALQPGAPKPKANQQHQDNARGLVLPGYKYLGPGNGLDKGEPVNAADAAALEHDKAYDQQLKAGDNPYLKYNHADAEFQQRLQGDTSFGGNLGRAVFQAKKRVLEPLGLVEQAGETAPGKKRPLIESPQQPDSSTGIGKKGKQPAKKKLVFEDETGAGDGPPEGSTSGAMSDDSEMRAAAGGAAVEGGQGADGVGNASGDWHCDSTWSEGHVTTTSTRTWVLPTYNNHLYKRLGESLQSNTYNGFSTPWGYFDFNRFHCHFSPRDWQRLINNNWGMRPKAMRVKIFNIQVKEVTTSNGETTVANNLTSTVQIFADSSYELPYVMDAGQEGSLPPFPNDVFMVPQYGYCGLVTGNTSQQQTDRNAFYCLEYFPSQMLRTGNNFEITYSFEKVPFHSMYAHSQSLDRLMNPLIDQYLWGLQSTTTGTTLNAGTATTNFTKLRPTNFSNFKKNWLPGPSIKQQGFSKTANQNYKIPATGSDSLIKYETHSTLDGRWSALTPGPPMATAGPADSKFSNSQLIFAGPKQNGNTATVPGTLIFTSEEELAATNATDTDMWGNLPGGDQSNSNLPTVDRLTALGAVPGMVWQNRDIYYQGPIWAKIPHTDGHFHPSPLIGGFGLKHPPPQIFIKNTPVPANPATTFSSTPVNSFITQYSTGQVSVQIDWEIQKERSKRWNPEVQFTSNYGQQNSLLWAPDAAGKYTEPRAIGTRYLTHHL

SEQ ID NO: 58 - protein, 598 aa, Adeno-associated virus 4
TAPGKKRPLIESPQQPDSSTGIGKKGKQPAKKKLVFEDETGAGDGPPEGSTSGAMSDDSEMRAAAGGAAVEGGQGADGVGNASGDWHCDSTWSEGHVTTTSTRTWVLPTYNNHLYKRLGESLQSNTYNGFSTPWGYFDFNRFHCHFSPRDWQRLINNNWGMRPKAMRVKIFNIQVKEVTTSNGETTVANNLTSTVQIFADSSYELPYVMDAGQEGSLPPFPNDVFMVPQYGYCGLVTGNTSQQQTDRNAFYCLEYFPSQMLRTGNNFEITYSFEKVPFHSMYAHSQSLDRLMNPLIDQYLWGLQSTTTGTTLNAGTATTNFTKLRPTNFSNFKKNWLPGPSIKQQGFSKTANQNYKIPATGSDSLIKYETHSTLDGRWSALTPGPPMATAGPADSKFSNSQLIFAGPKQNGNTATVPGTLIFTSEEELAATNATDTDMWGNLPGGDQSNSNLPTVDRLTALGAVPGMVWQNRDIYYQGPIWAKIPHTDGHFHPSPLIGGFGLKHPPPQIFIKNTPVPANPATTFSSTPVNSFITQYSTGQVSVQIDWEIQKERSKRWNPEVQFTSNYGQQNSLLWAPDAAGKYTEPRAIGTRYLTHHL

SEQ ID NO: 59 - DNA, 129 bp, Adeno-associated virus 4
ttggccactccctctatgcgcgctcgctcactcactcggccctgcggccagaggccggcagtctggagacctttggtgtccagggcagggccgagtgagtgagcgagcgcgcatagagggagtggccaa

SEQ ID NO: 60 - DNA, 125 bp, Adeno-associated virus 4
ttggccactccctctatgcgcgctcgctcactcactcggccctggagaccaaaggtctccagactgccggcctctggccggcagggccgagtgagtgagcgagcgcgcatagagggagtggccaa

SEQ ID NO: 61 - DNA, 4768 bp, Adeno-associated virus 4
  modified_base (3009)..(3009): a, t, c, or g
ttggccactccctctatgcgcgctcgctcactcactcggccctggagaccaaaggtctccagactgccggcctctggccggcagggccgagtgagtgagcgagcgcgcatagagggagtggccaactccatcatctaggtttgcccactgacgtcaatgtgacgtcctagggttagggaggtccctgtattagcagtcacgtgagtgtcgtatttcgcggagcgtagcggagcgcataccaagctgccacgtcacagccacgtggtccgtttgcgacagtttgcgacaccatgtggtcaggagggtatataaccgcgagtgagccagcgaggagctccattttgcccgcgaattttgaacgagcagcagccatgccggggttctacgagatcgtgctgaaggtgcccagcgacctggacgagcacctgcccggcatttctgactcttttgtgagctgggtggccgagaaggaatgggagctgccgccggattctgacatggacttgaatctgattgagcaggcacccctgaccgtggccgaaaagctgcaacgcgagttcctggtcgagtggcgccgcgtgagtaaggccccggaggccctcttctttgtccagttcgagaagggggacagctacttccacctgcacatcctggtggagaccgtgggcgtcaaatccatggtggtgggccgctacgtgagccagattaaagagaagctggtgacccgcatctaccgcggggtcgagccgcagcttccgaactggttcgcggtgaccaagacgcgtaatggcgccggaggcgggaacaaggtggtggacgactgctacatccccaactacctgctccccaagacccagcccgagctccagtgggcgtggactaacatggaccagtatataagcgcctgtttgaatctcgcggagcgtaaacggctggtggcgcagcatctgacgcacgtgtcgcagacgcaggagcagaacaaggaaaaccagaaccccaattctgacgcgccggtcatcaggtcaaaaacctccgccaggtacatggagctggtcgggtggctggtggaccgcgggatcacgtcagaaaagcaatggatccaggaggaccaggcgtcctacatctccttcaacgccgcctccaactcgcggtcacaaatcaaggccgcgctggacaatgcctccaaaatcatgagcctgacaaagacggctccggactacctggtgggccagaacccgccggaggacatttccagcaaccgcatctaccgaatcctcgagatgaacgggtacgatccgcagtacgcggcctccgtcttcctgggctgggcgcaaaagaagttcgggaagaggaacaccatctggctctttgggccggccacgacgggtaaaaccaacatcgcggaagccatcgcccacgccgtgcccttctacggctgcgtgaactggaccaatgagaactttccgttcaacgattgcgtcgacaagatggtgatctggtgggaggagggcaagatgacggccaaggtcgtagagagcgccaaggccatcctgggcggaagcaaggtgcgcgtggaccaaaagtgcaagtcatcggcccagatcgacccaactcccgtgatcgtcacctccaacaccaacatgtgcgcggtcatcgacggaaactcgaccaccttcgagcaccaacaaccactccaggaccggatgttcaagttcgagctcaccaagcgcctggagcacgactttggcaaggtcaccaagcaggaagtcaaagactttttccggtgggcgtcagatcacgtgaccgaggtgactcacgagttttacgtcagaaagggtggagctagaaagaggcccgcccccaatgacgcagatataagtgagcccaagcgggcctgtccgtcagttgcgcagccatcgacgtcagacgcggaagctccggtggactacgcggacaggtaccaaaacaaatgttctcgtcacgtgggtatgaatctgatgctttttccctgccggcaatgcgagagaatgaatcagaatgtggacatttgcttcacgcacggggtcatggactgtgccgagtgcttccccgtgtcagaatctcaacccgtgtctgtcgtcagaaagcggacgtatcagaaactgtgtccgattcatcacatcatggggagggcgcccgaggtggcctgctcggcctgcgaactggccaatgtggacttggatgactgtgacatggaacaataaatgactcaaaccagatatgactgacggttaccttccagattggctagaggacaacctctctgaaggcgttcgagagtggtgggcgctgcaacctggagcccctaaacccaaggcaaatcaacaacatcaggacaacgctcggggtcttgtgcttccgggttacaaatacctcggacccggcaacggactcgacaagggggaacccgtcaacgcagcggacgcggcagccctcgagcacgacaaggcctacgaccagcagctcaaggccggtgacaacccctacctcaagtacaaccacgccgacgcggagttccagcagcggcttcagggcgacacaccgtttgggggcaacctcggcagagcagtcttccaggccaaaaagagggttcttgaacctcttggtctggttgagcaagcgggtgagacggctcctggaaagaagagaccgttgattgaatccccccagcagcccgactcctccacgggtatcggcaaaaaaggcaagcagccggctaaaaagaagctcgttttcgaagacgaaactggagcaggcgacggaccccctgagggatcaacttccggagccatgtctgatgacagtgagatgcgtgcagcagctggcggagctgcagtcgagggsggacaaggtgccgatggagtgggtaatgcctcgggtgattggcattgcgattccacctggtctgagggccacgtcacgaccaccagcaccagaacctgggtcttgcccacctacaacaaccacctntacaagcgactcggagagagcctgcagtccaacacctacaacggattctccaccccctggggatactttgacttcaaccgcttccactgccacttctcaccacgtgactggcagcgactcatcaacaacaactggggcatgcgacccaaagccatgcgggtcaaaatcttcaacatccaggtcaaggaggtcacgacgtcgaacggcgagacaacggtggctaataaccttaccagcacggttcagatctttgcggactcgtcgtacgaactgccgtacgtgatggatgcgggtcaagagggcagcctgcctccttttcccaacgacgtctttatggtgccccagtacggctactgtggactggtgaccggcaacacttcgcagcaacagactgacagaaatgccttctactgcctggagtactttccttcgcagatgctgcggactggcaacaactttgaaattacgtacagttttgagaaggtgcctttccactcgatgtacgcgcacagccagagcctggaccggctgatgaaccctctcatcgaccagtacctgtggggactgcaatcgaccaccaccggaaccaccctgaatgccgggactgccaccaccaactttaccaagctgcggcctaccaacttttccaactttaaaaagaactggctgcccgggccttcaatcaagcagcagggcttctcaaagactgccaatcaaaactacaagatccctgccaccgggtcagacagtctcatcaaatacgagacgcacagcactctggacggaagatggagtgccctgacccccggacctccaatggccacggctggacctgcggacagcaagttcagcaacagccagctcatctttgcggggcctaaacagaacggcaacacggccaccgtacccgggactctgatcttcacctctgaggaggagctggcagccaccaacgccaccgatacggacatgtggggcaacctacctggcggtgaccagagcaacagcaacctgccgaccgtggacagactgacagccttgggagccgtgcctggaatggtctggcaaaacagagacatttactaccagggtcccatttgggccaagattcctcataccgatggacactttcacccctcaccgctgattggtgggtttgggctgaaacacccgcctcctcaaatttttatcaagaacaccccggtacctgcgaatcctgcaacgaccttcagctctactccggtaaactccttcattactcagtacagcactggccaggtgtcggtgcagattgactgggagatccagaaggagcggtccaaacgctggaaccccgaggtccagtttacctccaactacggacagcaaaactctctgttgtgggctcccgatgcggctgggaaatacactgagcctagggctatcggtacccgctacctcacccaccacctgtaataacctgttaatcaataaaccggtttattcgtttcagttgaactttggtctccgtgtccttcttatcttatctcgtttccatggctactgcgtacataagcagcggcctgcggcgcttgcgcttcgcggtttacaactgccggttaatcagtaacttctggcaaaccatgatgatggagttggccactccctctatgcgcgctcgctcactcactcggccctggagaccaaaggtctccagactgccggcctctggccggcagggccgagtgagtgagcgagcgcgcatagagggagtggccaa

SEQ ID NO: 62 - DNA, 3098 bp, Adeno-associated virus
gaattcgccctttctacggctgcgtcaactggaccaatgagaactttcccttcaacgattgcgtcgacaagatggtgatctggtgggaggagggcaagatgacggccaaggtcgtggagtccgccaaggccattctcggcggcagcaaggtgcgcgtggaccaaaagtgcaagtcttccgcccagatcgatcccacccccgtgatcgtcacttccaacaccaacatgtgcgctgtgattgacgggaacagcaccaccttcgagcaccagcagccgttacaagaccggatgttcaaatttgaactcacccgccgtctggagcacgactttggcaaggtgacaaagcaggaagtcaaagagttcttccgctgggcgcaggatcacgtgaccgaggtggcgcatgagttctacgtcagaaagggtggagccaacaagagacccgcccccgatgacgcggataaaagcgagcccaagcgggcctgcccctcagtcgcggatccatcgacgtcagacgcggaaggagctccggtggactttgccgacaggtaccaaaacaaatgttctcgtcacgcgggcatgcttcagatgctgtttccctgcaagacatgcgagagaatgaatcagaatttcaacatttgcttcacgcacgggaccagagactgttcagaatgtttccccggcgtgtcagaatctcaaccggtcgtcagaaagaggacgtatcggaaactctgtgccattcatcatctgctggggcgggctcccgagattgcttgctcggcctgcgatctggtcaacgtggacctggatgaccgtgtttctgagcaataaatgacttaaaccaggtatggctgccgatggttatcttccagattggctcgaggacaacctctctgagggcattcgcgagtggtgggacttgaaacctggagccccgaaacccaaagccaaccagcaaaagcaggacgacggccggggtctggtgcttcctggctacaagtacctcggacccttcaacggactcgacaagggagagccggtcaacgaggcagacgccgcggccctcgagcacgacaaggcctacgacaagcagctcgagcagggggacaacccgtacctcaagtacaaccacgccgacgccgagtttcaggagcgtcttcaagaagatacgtcttttgggggcaacctcgggcgagcagtcttccaggccaagaagcgggttctcgaacctctcggtctggttgaggaaggcgctaagacggctcctggaaagaagagacccatagaatcccccgactcctccacgggcatcggcaagaaaggccagcagcccgctaaaaagaagctcaactttgggcagactggcgactcagagtcagtgcccgacccccaacctctcggagaacctcccgccgcgccctcaggtctgggatctggtacaatggctgcaggcggtggcgcaccaatggcagacaataacgaaggcgccgacggagtgggtaatgcctccggaaattggcattgcgattccacatggctgggcgacagagtcatcaccaccagcacccgcacctgggccctgcccacctacaacaaccacctctacaagcagatatcaagtcagagcggggctaccaacgacaaccacttcttcggctacagcaccccctggggctattttgacttcaacagattccactgccacttctcaccacgtgactggcagcgactcatcaacaacaactggggattccggcccagaaagctgcggttcaagttgttcaacatccaggtcaaggaggtcacgacgaacgacggcgttacgaccatcgctaataaccttaccagcacgattcaggtcttctcggactcggagtaccaactgccgtacgtcctcggctctgcgcaccagggctgcctccctccgttccctgcggacgtgttcatgattcctcagtacggatatctgactctaaacaacggcagtcagtctgtgggacgttcctccttctactgcctggagtactttccttctcagatgctgagaacgggcaataactttgaattcagctacacctttgaggaagtgcctttccacagcagctatgcgcacagccagagcctggaccggctgatgaatcccctcatcgaccagtacctgtactacctggcccggacccagagcactacggggtccacaagggagctgcagttccatcaggctgggcccaacaccatggccgagcaatcaaagaactggctgcccggaccctgttatcggcagcagagactgtcaaaaaacatagacagcaacaacaacagtaactttgcctggaccggggccactaaataccatctgaatggtagaaattcattaaccaacccgggcgtagccatggccaccaacaaggacgacgaggaccagttctttcccatcaacggagtgctggtttttggcgaaacgggggctgccaacaagacaacgctggaaaacgtgctaatgaccagcgaggaggagatcaaaaccaccaatcccgtggctacagaagaatacggtgtggtctccagcaacctgcaatcgtctacggccggaccccagacacagactgtcaacagccagggggctctgcccggcatggtctggcagaaccgggacgtgtacctgcagggtcccatctgggccaaaattcctcacacggacggcaactttcacccgtctcccctgatgggcggatttggactcaaacacccgcctcctcaaattctcatcaaaaacaccccggtacctgctaatcctccagaggtgtttactcctgccaagtttgcctcatttatcacgcagtacagcaccggccaggtcagcgtggagatcgagtgggaactgcagaaagaaaacagcaaacgctggaatccagagattcagtacacctcaaattatgccaagtctaataatgtggaatttgctgtcaacaacgaaggggtttatactgagcctcgccccattggcacccgttacctcacccgtaacctgtaattgcctgttaatcaataaaccggttaattcgtttcagttgaactttggtctctgcgaagggcgaattc

SEQ ID NO: 63 - protein, 728 aa, Artificial Sequence
  Description of Artificial Sequence: Synthetic polypeptide
MAADGYLPDWLEDNLSEGIREWWDLKPGAPKPKANQQKQDDGRGLVLPGYKYLGPFNGLDKGEPVNEADAAALEHDKAYDKQLEQGDNPYLKYNHADAEFQERLQEDTSFGGNLGRAVFQAKKRVLEPLGLVEEGAKTAPGKKRPIESPDSSTGIGKKGQQPAKKKLNFGQTGDSESVPDPQPLGEPPAAPSGLGSGTMAAGGGAPMADNNEGADGVGNASGNWHCDSTWLGDRVITTSTRTWALPTYNNHLYKQISSQSGATNDNHFFGYSTPWGYFDFNRFHCHFSPRDWQRLINNNWGFRPRKLRFKLFNIQVKEVTTNDGVTTIANNLTSTIQVFSDSEYQLPYVLGSAHQGCLPPFPADVFMIPQYGYLTLNNGSQSVGRSSFYCLEYFPSQMLRTGNNFEFSYTFEEVPFHSSYAHSQSLDRLMNPLIDQYLYYLARTQSTTGSTRELQFHQAGPNTMAEQSKNWLPGPCYRQQRLSKNIDSNNNSNFAWTGATKYHLNGRNSLTNPGVAMATNKDDEDQFFPINGVLVFGETGAANKTTLENVLMTSEEEIKTTNPVATEEYGVVSSNLQSSTAGPQTQTVNSQGALPGMVWQNRDVYLQGPIWAKIPHTDGNFHPSPLMGGFGLKHPPPQILIKNTPVPANPPEVFTPAKFASFITQYSTGQVSVEIEWELQKENSKRWNPEIQYTSNYAKSNNVEFAVNNEGVYTEPRPIGTRYLTRNL

SEQ ID NO: 64 - DNA, 2495 bp, Adeno-associated virus
gaattcgccctttctacggctgcgtcaactagaccaatgagaactttcccttcaacgattgcgtcgacaagatggtgatctggtgggaggagggcaagatgacggccaaggtcgtggagtccgccaaggccattcatcatctgctggggcgggctcccgagattgcttgctcggcctgcgatctggtcaacgtggacctggatgactgtgtttctgagcaataaatgacttaaaccaggtatggctgccgatggttatcttccagattggctcgaggacaacctctctgagggcattcgcgagtggtgggacttgaaacctggagccccgaaacccaaagccaaccagcaaaagcaggacgacggccggggtctggtgcttcctggctacaagtacctcggacccttcaacggactcgacaagggagagccggtcaacgaggcagacgccgcggccctcgagcacgacaaggcctacgacaagcagctcgagcagggggacaacccgtacctcaagtacaaccacgccgacgccgagtttcaggagcgtcttcaagaagatacgtcttttgggggcaacctcgggcgagcagtcttccaggccaagaagcgggttctcgaacctctcggtctggttgaggaaggcgctaagacggctcctggaaagaagagacccatagaatcccccgactcctccacgggcatcggcaagaaaggccagcagcccgctaaaaagaagctcaactttgggcagactggcgactcagagtcagtgcccgaccctcaaccaatcggagaaccccccgcaggcccctctggtctgggatctggtacaatggctgcaggcggtggcgctccaatggcagacaataacgaaggcgccgacggagtgggtaatgcctccggaaattggcattgcgattccacatggctgggcgacagagtcatcaccaccagcacccgcacctgggccctgcccacctacaacaaccacctctacaagcagatatcaagtcagagcggggctaccaacgacaaccacttcttcggctacagcaccccctggggctattttgacttcaacagattccactgccacttctcaccacgtgactggcagcgactcatcaacaacaactggggattccggcccagaaagctgcggttcaagttgttcaacatccaggtcaaggaggtcacgacgaacgacggcgttacgaccatcgctaataaccttaccagcacgattcaggtcttctcggactcggagtaccaactgccgtacgtcctcggctctgcgcaccagggctgcctccctccgttccctgcggacgtgttcatgattcctcagtacggatatctgactctaaacaacggcagtcagtctgtgggacgttcctccttctactgcctggagtactttccttctcagatgctgagaacgggcaataactttgaattcagctacacctttgaggaagtgcctttccacagcagctatgcgcacagccagagcctggaccggctgatgaatcccctcatcgaccagtacctgtactacctggcccggacccagagcactacggggtccacaagggagctgcagttccatcaggctgggcccaacaccatggccgagcaatcaaagaactggctgcccggaccctgttatcggcagcagagactgtcaaaaaacatagacagcaacaacaccagtaactttgcctggaccggggccactaaataccatctgaatggtagaaattcattaaccaacccgggcgtagccatggccaccaacaaggacgacgaggaccagttctttcccatcaacggagtgctggtttttggcaaaacgggggctgccaacaagacaacgctggaaaacgtgctaatgaccagcgaggaggagatcaaaaccaccaatcccgtggctacagaacagtacggtgtggtctccagcaacctgcaatcgtctacggccggaccccagacacagactgtcaacagccagggggctctgcccggcatggtctggcagaaccgggacgtgtacctgcagggtcccatctgggccaaaattcctcacacggacggcaactttcacccgtctcccctgatgggcggatttggactcaaacacccgcctcctcaaattctcatcaaaaacaccccggtacctgctaatcctccagaggtgtttactcctgccaagtttgcctcatttatcacgcagtacagcaccggccaggtcagcgtggagatcgagtgggaactgcagaaagaaaacagcaaacgctggaatccagagattcagtacacctcaaattatgccaagtctaataatgtggaatttgctgtcaacaacgaaggggtttatactgagcctcgccccattggcacccgttacctcacccgtaacctgtaattgcctgttaatcaataaaccggttaattcgtttcagttgaactttggtctctgcgaagggcgaattc

SEQ ID NO: 65 - protein, 728 aa, Artificial Sequence
  Description of Artificial Sequence: Synthetic polypeptide
MAADGYLPDWLEDNLSEGIREWWDLKPGAPKPKANQQKQDDGRGLVLPGYKYLGPFNGLDKGEPVNEADAAALEHDKAYDKQLEQGDNPYLKYNHADAEFQERLQEDTSFGGNLGRAVFQAKKRVLEPLGLVEEGAKTAPGKKRPIESPDSSTGIGKKGQQPAKKKLNFGQTGDSESVPDPQPIGEPPAGPSGLGSGTMAAGGGAPMADNNEGADGVGNASGNWHCDSTWLGDRVITTSTRTWALPTYNNHLYKQISSQSGATNDNHFFGYSTPWGYFDFNRFHCHFSPRDWQRLINNNWGFRPRKLRFKLFNIQVKEVTTNDGVTTIANNLTSTIQVFSDSEYQLPYVLGSAHQGCLPPFPADVFMIPQYGYLTLNNGSQSVGRSSFYCLEYFPSQMLRTGNNFEFSYTFEEVPFHSSYAHSQSLDRLMNPLIDQYLYYLARTQSTTGSTRELQFHQAGPNTMAEQSKNWLPGPCYRQQRLSKNIDSNNTSNFAWTGATKYHLNGRNSLTNPGVAMATNKDDEDQFFPINGVLVFGKTGAANKTTLENVLMTSEEEIKTTNPVATEQYGVVSSNLQSSTAGPQTQTVNSQGALPGMVWQNRDVYLQGPIWAKIPHTDGNFHPSPLMGGFGLKHPPPQILIKNTPVPANPPEVFTPAKFASFITQYSTGQVSVEIEWELQKENSKRWNPEIQYTSNYAKSNNVEFAVNNEGVYTEPRPIGTRYLTRNL

SEQ ID NO: 66 - DNA, 2504 bp, Adeno-associated virus
gaattcgccctttctacggctgcgtcaactggaccaatgagaactttcccttcaacgattgcgtcgacaagatggtgatctggtgggaggagggcaagatgacggccaaggtcgtggagtccgccaaggccattcatcatctgctggggcgggctcccgagattgcttgctcggcctgcgatctggtcaacgtggacctggatgactgtgtttctgagcaataaatgacttaaaccaggtatggctgccgatggttatcttccagattggctcgaggacaacctctctgagggcattcgcgagtggtgggacttgaaacctggagccccgaaacccaaagccaaccagcaaaagcaggacgacggccggggtctggtgcttcctggctacaagtacctcggacccttcaacggactcgacaagggagagccggtcaacgaggcagacgccgcggccctcgagcacgacaaggcctacgacaagcagctcgagcagggggacaacccgtacctcaagtacaaccacgccgacgccgagtttcaggagcgtcttcaagaagatacgtcttttgggggcaacctcgggcgagcagtcttccaggccaagaagcgggttctcgaacctctcggtctggttgaggaaggcgctaagacggctcctggaaagaagagacccatagaatcccccgactcctccacgggcatcggcaagaaaggccagcagcccgctaaaaagaagctcaactttgggcagactggcgactcagagtcagtgcccgaccctcaaccaatcggagaaccccccgcaggcccctctggtctgggatctggtacaatggctgcaggcggtggcgctccaatggcagacaataacgaaggcgccgacggagtgggtaatgcctccggaaattggcattgcgattccacatggctgggcgacagagtcatcaccaccagcacccgcacctgggccctgcccacctacaacaaccacctctacaagcagatatcaagtcagagcggggctaccaacgacaaccacttcttcggctacagcaccccctggggctattttgacttcaacagattccactgccacttctcatcacgtgactggcagcgactcatcaacaacaactggggattccggcccaagagactcaacttcaagctcttcaacatccaggtcaaggaggtcacgcagaatgaaggcaccaagaccatcgccaataaccttaccagcacgattcaggtctttacggactcggaataccggctcccgtacgtcctcggctctgcgcaccagggctgcctgcctccgttcccggcggacgtcttcatgattcctcagtacgggtacctgactctgaacaacggcagtcaggccgtgggccgttcctccttctactgcctggagtactttccttctcaaatgctgagaacgggcaacaactttgagttcagctaccagtttgaggacgtgccttttcacagcagctacgcgcacagccaaagcctggaccggctgatgaaccccctcatcgaccagtacctgtactacctgtctcggactcagtccacgggaggtaccgcaggaactcagcagttgctattttctcaggccgggcctaataacatgtcggctcaggccaaaaactggctacccgggccctgctaccggcagcaacgcgtctccacgacactgtcgcaaaataacaacagcaactttgcttggaccggtgccaccaagtatcatctgaatggcagagactctctggtaaatcccggtgtcgctatggcaacgcacaaggacgacgaagagcgattttttccatccagcggagtcttgatgtttgggaaacagggagctggaaaagacaacgtggactatagcagcgttatgctaaccagtgaggaagaaatcaaaaccaccaacccagtggccacagaacagtacggcgtggtggccgataacctgcaacagcaaaacgccgctcctattgtaggggccgtcaacagtcaaggagccttacctggcatggtctggcagaaccgggacgtgtacctgcagggtcctatctgggccaagattcctcacacggacggcaactttcatccttcgccgctgatgggaggctttggactgaaacacccgcctcctcagatcctgattaagaatacacctgttcccgcggatcctccaactaccttcagtcaagccaagccggcgtcgttcatcacgcagtacagcaccggacaggtcagcgtggaaattgaatgggagctgcagaaagagaacagcaagcgctggaacccagagattcagtatacttccaactactacaaatctacaaatgtggactttgctgtcaatactgagggtacttattcagagcctcgccccattggcacccgttacctcacccgtaacctgtaattgcctgttaatcaataaaccggttaattcgtttcagttgaactttggtctctgcgaagggcgaattc

SEQ ID NO: 67 - protein, 731 aa, Artificial Sequence
  Description of Artificial Sequence: Synthetic polypeptide
MAADGYLPDWLEDNLSEGIREWWDLKPGAPKPKANQQKQDDGRGLVLPGYKYLGPFNGLDKGEPVNEADAAALEHDKAYDKQLEQGDNPYLKYNHADAEFQERLQEDTSFGGNLGRAVFQAKKRVLEPLGLVEEGAKTAPGKKRPIESPDSSTGIGKKGQQPAKKKLNFGQTGDSESVPDPQPIGEPPAGPSGLGSGTMAAGGGAPMADNNEGADGVGNASGNWHCDSTWLGDRVITTSTRTWALPTYNNHLYKQISSQSGATNDNHFFGYSTPWGYFDFNRFHCHFSSRDWQRLINNNWGFRPKRLNFKLFNIQVKEVTQNEGTKTIANNLTSTIQVFTDSEYRLPYVLGSAHQGCLPPFPADVFMIPQYGYLTLNNGSQAVGRSSFYCLEYFPSQMLRTGNNFEFSYQFEDVPFHSSYAHSQSLDRLMNPLIDQYLYYLSRTQSTGGTAGTQQLLFSQAGPNNMSAQAKNWLPGPCYRQQRVSTTLSQNNNSNFAWTGATKYHLNGRDSLVNPGVAMATHKDDEERFFPSSGVLMFGKQGAGKDNVDYSSVMLTSEEEIKTTNPVATEQYGVVADNLQQQNAAPIVGAVNSQGALPGMVWQNRDVYLQGPIWAKIPHTDGNFHPSPLMGGFGLKHPPPQILIKNTPVPADPPTTFSQAKPASFITQYSTGQVSVEIEWELQKENSKRWNPEIQYTSNYYKSTNVDFAVNTEGTYSEPRPIGTRYLTRNL

SEQ ID NO: 68 - DNA, 3128 bp, Adeno-associated virus
gaattcgccctttctacggctgcgtcaactggaccaatgagaactttcccttcaacgattgcgtcgacaagatggtgatctggtgggaggagggcaagatgacggccaaggtcgtggagtccgccaaggccattctcggcggcagcaaggtgcgcgtggaccaaaagtgcaagtcttccgcccagatcgatcccacccccgtgatcgtcacttccaacaccaacatgtgcgccgtgattgacgggaacagcaccaccttcgagcaccagcagccgttacaagaccggatgttcaaatttgaactcacccgccgtctggagcacgactttggcaaggtgacaaagcaggaagtcaaagagttcttccgctgggcgcaggatcacgtgaccgaggtggcgcatgagttctacgtcagaaagggtggagccaacaagagacccgcccccgatgacgcggataaaagcgagcccaagcgggcctgcccctcagtcgcggatccatcgacgtcagacgcggaaggagctccggtggactttgccgacaggtaccaaaacaaatgttctcgtcacgcgggcatgcttcagatgctgtttccctgcaagacatgcgagagaatgaatcagaatttcaacatttgcttcacgcacgggaccagagactgttcagaatgtttccccggcgtgtcagaatctcaaccggtcgtcagaaagaggacgtatcggaaactctgtgccattcatcatctgctagggcgggctcccgagattgcttgctcggcctgcgatctggtcaacgtggacctggatgactgtgtttctgagcaataaatgacttaaaccaggtatggctgccgatggttatcttccagattggctcgaggacaacctctctgagggcattcgcgagtggtgggacttgaaacctggagccccgaaacccaaagccaaccagcaaaagcaggacgacggccggggtctggtgcttcctggctacaagtacctcggacccttcaacggactcgacaagggggagcccgtcaacgcggcggacgcagcggccctcgagcacgacaaggcctacgaccagcagctcaaagcgggtgacaatccgtacctgcggtataaccacgccgacgccgagtttcaggagcgtctgcaagaagatacgtcttttgggggcaacctcgggcgagcagtcttccaggccaagaagcgggttctcgaacctctcggtctggttgaggaaggcgctaagacggctcctggaaagaagagaccggtagagccatcaccccagcgttctccagactcctctacgggcatcggcaagacaggccagcagcccgcgaaaaagagactcaactttgggcagactggcgactcagagtcagtgcccgaccctcaaccaatcggagaaccccccgcaggcccctctggtctgggatctggtacaatggctgcaggcggtggcgctccaatggcagacaataacgaaggcgccgacggagtgggtagttcctcaggaaattggcattgcgattccacatggctgggcgacagagtcatcaccaccagcacccgaacctgggccctccccacctacaacaaccacctctacaagcaaatctccaacgggacatcgggaggaagcaccaacgacaacacctacttcggctacagcaccccctgggggtattttgactttaacagattccactgccacttctcaccacgtgactggcagcgactcatcaacaacaactggggattccggcccaagagactcaacttcaagctcttcaacatccaggtcaaggaggtcacgcagaatgaaggcaccaagaccatcgccaataaccttaccagcacgattcaggtctttacggactcggaataccagctcccgtacgtcctcggctctgcgcaccagggctgcctgcctccgttcccggcggacgtcttcatgattcctcagtacgggtacctgactctgaacaacggcagtcaggccgtgggccgttcctccttctactgcctggagtactttccttctcaaatgctgagaacgggcaacaactttgagttcagctaccagtttgaggacgtgccttttcacagcagctacgcgcacagccaaagcctggaccggctgatgaaccccctcatcgaccagtacctgtactacctgtctcggactcagtccacgggaggtaccgcaggaactcagcagttgctattttctcaggccgggcctaataacatgtcggctcaggccaaaaactggctacccgggccctgctaccggcagcaacgcgtctccacgacactgtcgcaaaataacaacagcaactttgcttggaccggtgccaccaagtatcatctgaatggcagagactctctggtaaatcccggtgtcgctatggcaacgcacaaggacgacgaagagcgattttttccatccagcggagtcttgatgtttgggaaacagggagctggaaaagacaacgtggactatagcagcgttatgctaaccagtgaggaagaaatcaaaaccaccaacccagtggccacagaacagtacggcgtggtggccgataacctgcaacagcaaaacgccgctcctattgtaggggccgtcaacagtcaaggagccttacctggcatggtctggcagaaccgggacgtgtacctgcagggtcctatctgggccaagattcctcacacggacggcaactttcatccttcgccgctgatgggaggctttggactgaaacacccgcctcctcagatcctgattaagaatacacctgttcccgcggatcctccaactaccttcagtcaagccaagctggcgtcgttcatcacgcagtacagcaccggacaggtcagcgtggaaattgaatgggagctgcagaaagagaacagcaagcgctggaacccagagattcagtatacttccaactactacaaatctacaaatgtggactttgctgtcaatactgagggtacttattcagagcctcgccccattggcacccgttacctcacccgtaacctgtaattgcctgttaatcaataaaccggctaattcgtttcagttgaactttggtctctgcgaagggcgaattc

SEQ ID NO: 69 - protein, 738 aa, Artificial Sequence
  Description of Artificial Sequence: Synthetic polypeptide
MAADGYLPDWLEDNLSEGIREWWDLKPGAPKPKANQQKQDDGRGLVLPGYKYLGPFNGLDKGEPVNAADAAALEHDKAYDQQLKAGDNPYLRYNHADAEFQERLQEDTSFGGNLGRAVFQAKKRVLEPLGLVEEGAKTAPGKKRPVEPSPQRSPDSSTGIGKTGQQPAKKRLNFGQTGDSESVPDPQPIGEPPAGPSGLGSGTMAAGGGAPMADNNEGADGVGSSSGNWHCDSTWLGDRVITTSTRTWALPTYNNHLYKQISNGTSGGSTNDNTYFGYSTPWGYFDFNRFHCHFSPRDWQRLINNNWGFRPKRLNFKLFNIQVKEVTQNEGTKTIANNLTSTIQVFTDSEYQLPYVLGSAHQGCLPPFPADVFMIPQYGYLTLNNGSQAVGRSSFYCLEYFPSQMLRTGNNFEFSYQFEDVPFHSSYAHSQSLDRLMNPLIDQYLYYLSRTQSTGGTAGTQQLLFSQAGPNNMSAQAKNWLPGPCYRQQRVSTTLSQNNNSNFAWTGATKYHLNGRDSLVNPGVAMATHKDDEERFFPSSGVLMFGKQGAGKDNVDYSSVMLTSEEEIKTTNPVATEQYGVVADNLQQQNAAPIVGAVNSQGALPGMVWQNRDVYLQGPIWAKIPHTDGNFHPSPLMGGFGLKHPPPQILIKNTPVPADPPTTFSQAKLASFITQYSTGQVSVEIEWELQKENSKRWNPEIQYTSNYYKSTNVDFAVNTEGTYSEPRPIGTRYLTRNL

SEQ ID NO: 70 - DNA, 3084 bp, Adeno-associated virus
gaattcgccctttctacggctgcatcaactggaccaatgagaactttcccttcaacgattgcgtcgacaagatggtgatctggtgggaggagggcaagatgacggccaaggtcgtggagtccgccaaggccattctcggcggcagcaaggtgcgcgtggaccaaaagtgcaagtcgtccgcccagatcgaccccacccccgtgatcgtcacctccaacaccaacatgtgcgccgtgattgacgggaacagcaccaccttcgagcaccagcagccgttgcaggaccggatgttcaagttcgaactcacccgccgtctggagcacgactttggcaaggtgaccaagcaggaagtcaaagagttcttccgctgggcgcaggatcacgtgaccgaggtggcgcatgagttctacgtcagaaagggcggagccagcaaaagacccgcccccgatgacgcggatataagcgagcccaagcgggcctgcccctcagtcgcggatccatcgacgtcagacgcggaaggagctccggtggactttgccgacaggtaccaaaacaaatgttctcgtcacgcgggcatgcttcagatgctgtttccctgcaaaacgtgcgagaaaatgaatcagaatttcaacatttgcttcacgcacggggtcagagactgctcagaatgtttccccggtgcatcagaatctcaaccggtcgtcagaaaaaaaacgtatcagaaactgtgtgccattcatcatctgctggggcgggcacccgagattgcttgctcggcctgcgatctggtcaacgtggacctggacgactgtgtttctgagcaataaatgacttaaaccaggtatggctgccgatggttatcttccagattggcttgaggacaacctctctgagggcattcgcgagtggtgggacctgaaacctggagccccgaaacccaaagccaaccagcaaaagcaggacgacggccggggtctggtgcttcctggctacaagtacctcggacccttcaacggactcgacaagggggagcccgtcaacgcggcggacgcagcggccctcgagcacgacaaggcctacgaccagcagctcaaagcgggtgacaatccgtacctgcggtataaccacgccgacgccgagtttcaggagcgtctgcaagaagatacgtcttttgggggcaacctcgggcgagcagtcttccaggccaagaagcgggttctcgaacctctcggtctggttgaggaaggcgctaagacggctcctggaaagaagagaccggtagagccatcacctcagcgttcccccgactcctccacgggcatcggcaagaaaggccaccagcccgcgagaaagagactgaactttgggcagactggcgactcggagtcagtccccgaccctcaaccaatcggagaaccaccagcaggcccctctggtctgggatctggtacaatggctgcaggcggtggcgctccaatggcagacaataacgaaggcgccgacggagtgggtagttcctcaggaaattggcattgcgattccacatggctgggcgacagagtcatcaccaccagcacccgaacctgggccctgcccacctacaacaaccatctctacaagcaaatctccaacgggacatcgggaggaagcactaacgacaacacctactttggctacagcaccccctgggggtattttgacttcaacagattccactgccacttctcaccacgtgactggcagcgactcatcaacaataactggggattccggcccaagagactcaacttcaagctcttcaacatccaggtcaaggaggtcacgcagaatgaaggcaccaagaccatcgccaataaccttaccagcacgattcaggtgtttacggactcggaataccagctcccgtacgtccccggctctgcgcaccagggctgcctccctccgttcccggcggacgtcttcatgattcctcagtacgggtatctgaccctaaacaatggcagtcaggctgtgggccgttcctccttctactgcctggaatacttcccttctcaaatgctgaggacgggcaacaactttgaattcagctacaccttcgaggacgtgcctttccacagcagctacgcgcacagccagagcctggaccggctgatgaaccctctcatcgaccagtacctgtattacttatccagaactcagtccacaggaggaactcaaggtactcagcaattgttattttctcaagccgggcccgcaaacatgtcggctcaggccaagaactggctacctggaccgtgttaccgtcagcaacgagtttccacgacactgtcgcaaaacaacaacagcaattttgcttggaccggtgccaccaagtatcacctgaatggcagagactccctggttaatcccggcgttgccatggctacccacaaggacgacgaggagcgcttcttcccgtcaagcggagttctaatgtttggcaagcagggggctggaaaagacaatgtggactacagcagcgtgatgctcaccagcgaagaagaaattaaaactactaacccagtggctacagagcagtatggtgtggtggcagacaacctgcagcagaccaacggagctcccattgtgggaactgtcaacagccagggggccttacctggtatggtctggcaaaaccgggacgtgtacctgcagggccccatctgggccaaaattcctcacacggacggcaactttcatccttcgccgctgatgggaggctttggactgaaacacccgcctcctcagatcctggtgaaaaacactcctgttcctgcggatcctccgaccaccttcagccaggccaagctggcttcttttatcacgcagtacagcaccggacaggtcagcgtggaaatcgaatgggagctgcagaaagaaaacagcaagcgctggaacccagagattcagtatacttccaactactacaaatctacaaatgtggactttgctgtcaatactgagggtacttattcagagcctcgccccattggcactcgttatctcacccgtaatctgtaattgcttgttaatcaataaaccggt

SEQ ID NO: 71 - protein, 738 aa, Artificial Sequence
  Description of Artificial Sequence: Synthetic polypeptide
MAADGYLPDWLEDNLSEGIREWWDLKPGAPKPKANQQKQDDGRGLVLPGYKYLGPFNGLDKGEPVNAADAAALEHDKAYDQQLKAGDNPYLRYNHADAEFQERLQEDTSFGGNLGRAVFQAKKRVLEPLGLVEEGAKTAPGKKRPVEPSPQRSPDSSTGIGKKGHQPARKRLNFGQTGDSESVPDPQPIGEPPAGPSGLGSGTMAAGGGAPMADNNEGADGVGSSSGNWHCDSTWLGDRVITTSTRTWALPTYNNHLYKQISNGTSGGSTNDNTYFGYSTPWGYFDFNRFHCHFSPRDWQRLINNNWGFRPKRLNFKLFNIQVKEVTQNEGTKTIANNLTSTIQVFTDSEYQLPYVPGSAHQGCLPPFPADVFMIPQYGYLTLNNGSQAVGRSSFYCLEYFPSQMLRTGNNFEFSYTFEDVPFHSSYAHSQSLDRLMNPLIDQYLYYLSRTQSTGGTQGTQQLLFSQAGPANMSAQAKNWLPGPCYRQQRVSTTLSQNNNSNFAWTGATKYHLNGRDSLVNPGVAMATHKDDEERFFPSSGVLMFGKQGAGKDNVDYSSVMLTSEEEIKTTNPVATEQYGVVADNLQQTNGAPIVGTVNSQGALPGMVWQNRDVYLQGPIWAKIPHTDGNFHPSPLMGGFGLKHPPPQILVKNTPVPADPPTTFSQAKLASFITQYSTGQVSVEIEWELQKENSKRWNPEIQYTSNYYKSTNVDFAVNTEGTYSEPRPIGTRYLTRNL

SEQ ID NO: 72 - DNA, 3123 bp, Adeno-associated virus
gaattcgcccttggctgcgtcaactggaccaatgagaactttcccttcaacgattgcgtcgacaagatggtgatctggtgggaggagggcaagatgacggccaaggtcgtggagtccgccaaggccattctcggcggcagcaaggtgcgcgtggaccaaaagtgcaagtcgtccgcccagatcgaccccacccccgtgatcgtcacctccaacaccaacatgtgcgccgtgattgacgggaacagcaccaccttcgagcaccagcagccgttgcaggaccggatgttcaagttcgaactcacccgccgtctggagcacgactttggcaaggtgaccaagcaggaagtcaaagagttcttccgctgggcgcaggatcacgtgaccgaggtggcgcatgagttctacgtcagaaagggcggagccagcaaaagacccgcccccgatgacgcggatataagcgagcccaagcgggcctgcccctcagtcgcggatccatcgacgtcagacgcggaaggagctccggtggactttgccgacaggtaccaaaacaaatgttctcgtcacgcgggcatgctccagatgctgtttccctgcaaaacgtgcgagagaatgaatcagaatttcaacatttgcttcacgcacggggtcagagactgctcagaatgtttccccggtgcatcagaatctcaaccggtcgtcagaaaaaaaacgtatcagaaactgtgtgccattcatcatctgctggggcgggcacccgagattgcttgctcggcctgcgatctggtcaacgtggacctggacgactgtgtttctgagcaataaatgacttaaaccaggtatggctgccgatggttatcttccagattggcttgaggacaacctctctgagggcattcgcgagtggtgggacctgaaacctggagccccgaaacccaaagccaaccagcaaaagcaggacgacggccggggtctggtgcttcctggctacaagtacctcggacccttcaacggactcgacaagggggagcccgtcaacgcggcggacgcagcggccctcgagcacgacaaggcctacgaccagcagctcaaagcgggtgacaatccgtacctgcggtataaccacgccgacgccgagtttcaggagcgtctgcaagaagatacgtcttttgggggcaacctcgggcgagcagtcttccaggccaagaagcgggttctcgaacctctcggtctggttgaggaaggcgctaagacggctcctggaaagaagagaccggtagagccatcacctcagcgttcccccgactcctccacgggcatcggcaagaaaggccaccagcccgcgagaaagagactgaactttgggcagactggcgactcggagtcagtccccgaccctcaaccaatcggagaaccaccagcaggcccctctggtctgggatctggtacaatggctgcaggcggtggcgctccaatggcagacaataacgaaggcgccgacggagtgggtagttcctcaggaaattggcattgcgattccacatggctgggcgacagagtcatcaccaccagcacccgaacctgggccctgcccacctacaacaaccatctctacaagcaaatctccaacgggacatcgggaggaagcactaacgacaacacctactttggctacagcaccccctgggggtattttgacttcaacagattccactgccacttctcaccacgtgactggcagcgactcatcaacaataactggggattccggcccaagagactcaacttcaagctcttcaacatccaggtcaaggaggtcacgcagaatgaaggcaccaagaccatcgccaataaccttaccagcacgattcaggtgtttacggactcggaataccagctcccgtacgtcctcggctctgcgcaccagggctgcctccctccgttcccggcggacgtcttcatgattcctcagtacgggtatctgaccctaaacaatggcagtcaggctgtgggccgttcctccttctactgcctggaatacttcccttctcaaatgctgaggacgggcaacaactttgaattcagctacaccttcgaggacgtgcctttccacagcagctacgcgcacagccagagcctggaccggctgatgaaccctctcatcgaccagtacctgtattacttatccagaactcagtccacaggaggaactcaaggtactcagcaattgttattttctcaagccgggcccgcaaacatgtcggctcaggccaagaactggctacctggaccgtgttaccgtcagcaacgagtttccacgacactgtcgcaaaacaacaacagcaattttgcttggaccggtgccaccaagtatcacctgaatggcagagactccctggttaatcccggcgttgccatggctacccacaaggacgacgaggagcgcttcttcccgtcaagcggagttctaatgtttggcaagcagggggctggaaaagacaatgtggactacagcagcgtgatgctcaccagcgaagaagaaattaaaactactaacccagtggctacagagcagtatggtgtggtggcagacaacctgcagcagaccaacggagctcccattgtgggaactgtcaacagccagggggccttacctggtatggtctggcaaaaccgggacgtgtacctgcagggccccatctgggccaaaattcctcacacggacggcaactttcatccttcgccgctgatgggaggctttggactgaaacacccgcctcctcagatcctggtgaaaaacactcctgttcctgcggatcctccgaccaccttcagccaggccaagctggcttcttttatcacgcagtacagcaccggacaggtcagcgtggaaatcgaatgggagctgcagaaagaaaacagcaagcgctggaacccagagattcagtatacttccaactactacaaatctacaaatgtggactttgctgtcaatactgagggtacttattcagagcctcgccccattggcactcgttatctcacccgtaatctgtaattgcttgttaatcaataaaccggttaattcgtttcagttgaactttggtctctgcgaagggcgaattc

SEQ ID NO: 73 - protein, 738 aa, Artificial Sequence
  Description of Artificial Sequence: Synthetic polypeptide
MAADGYLPDWLEDNLSEGIREWWDLKPGAPKPKANQQKQDDGRGLVLPGYKYLGPFNGLDKGEPVNAADAAALEHDKAYDQQLKAGDNPYLRYNHADAEFQERLQEDTSFGGNLGRAVFQAKKRVLEPLGLVEEGAKTAPGKKRPVEPSPQRSPDSSTGIGKKGHQPARKRLNFGQTGDSESVPDPQPIGEPPAGPSGLGSGTMAAGGGAPMADNNEGADGVGSSSGNWHCDSTWLGDRVITTSTRTWALPTYNNHLYKQISNGTSGGSTNDNTYFGYSTPWGYFDFNRFHCHFSPRDWQRLINNNWGFRPKRLNFKLFNIQVKEVTQNEGTKTIANNLTSTIQVFTDSEYQLPYVLGSAHQGCLPPFPADVFMIPQYGYLTLNNGSQAVGRSSFYCLEYFPSQMLRTGNNFEFSYTFEDVPFHSSYAHSQSLDRLMNPLIDQYLYYLSRTQSTGGTQGTQQLLFSQAGPANMSAQAKNWLPGPCYRQQRVSTTLSQNNNSNFAWTGATKYHLNGRDSLVNPGVAMATHKDDEERFFPSSGVLMFGKQGAGKDNVDYSSVMLTSEEEIKTTNPVATEQYGVVADNLQQTNGAPIVGTVNSQGALPGMVWQNRDVYLQGPIWAKIPHTDGNFHPSPLMGGFGLKHPPPQILVKNTPVPADPPTTFSQAKLASFITQYSTGQVSVEIEWELQKENSKRWNPEIQYTSNYYKSTNVDFAVNTEGTYSEPRPIGTRYLTRNL

SEQ ID NO: 74 - DNA, 3122 bp, Adeno-associated virus
gaattcgccctttctacggctgcgtcaactggaccaatgagaactttcccttcaacgattgcgtcgacaagatggtgatctggtgggaggagggcaagatgacggccaaggtcgtggagtccgccaaggccattctcggcggcagcaaggtgcgtgtggaccaaaagtgcaagtcttccgcccagatcgatcccacccccgtgatcgtcacctccaacaccaacatgtgcgccgtgattgacgggaacagcgccaccttcgagcaccagcagccgttgcaggaccggatgttcaaatttgaactcacccgccgtctggagcatgactttggcaaggtgacgaagcaggaagtcaaagagttcttccgctgggcgcaggatcacgtgaccgaggtggcgcatgagttccacgtcagaaagggtggagccaacaagagacccgcccccgatgacgcggatataagcgagcccaagcgggcctgcccctcagtcgcggatccatcgacgtcagacgcggaaggagctccggtggactttgccgacaggtaccaaaacaaatgttctcgtcacgcgggcatgcttcagatgctgtttccctgcaagacatgcgagagaatgaatcagaatttcaacatttgcttcacgcacgggaccagagactgttcagaatgtttccccggcgtgtcagaatctcaaccggtcgtcagaaagaggacgtatcggaaactctgtgcgattcatcatctgctggggcgggctcccgagattgcttgctcggcctgcgatctggtcaacgtggacctggatgactgtgtttctgagcaataaatgacttaaaccaggtatggctgccgatggttatcttccagattggctcgaggacaacctctctgagggcattcgcgagtggtgggacttgaaacctggagccccgaaacccaaagccaaccagcaaaagcaggacgacggccggggtctggtgcttcctggctacaagtacctcggacccttcaacggactcgacaagggggagcccgtcaacgcggcggacgcagcggccctcgagcacgacaaagcctacgaccagcagctcaaagcgggtgacaatccgtacctgcggtataatcacgccgacgccgagtttcaggagcgtctgcaagaagatacgtcttttgggggcaacctcgggcgagcagtcttccaggccaagaagcgggttctcgaacctctcggtctggttgaggaaggcgctaagacggctcctggaaagaagagactggtagagcagtcgccacaagagccagactcctcctcgggcatcggcaagacaggccagcagcccgctaaaaagagactcaattttggtcagactggcgactcagagtcagtccccgacccacaacctctcggagaacctccagcagccccctcaggtctgggacctaatacaatggcttcaggcggtggcgctccaatggcagacaataacgaaggcgccgacggagtgggtaattcctcgggaaattggcattgcgattccacatggctgggggacagagtcatcaccaccagcacccgaacctgggccctgcccacctacaacaaccacctctacaagcaaatctccaacggcacctcgggaggaagcaccaacgacaacacctattttggctacagcaccccctgggggtattttgacttcaacagattccactgtcacttttcaccacgtgactggcaacgactcatcaacaacaattggggattccggcccaaaagactcaacttcaagctgttcaacatccaggtcaaggaagtcacgacgaacgaaggcaccaagaccatcgccaataatctcaccagcaccgtgcaggtctttacggactcggagtaccagttaccgtacgtgctaggatccgctcaccagggatgtctgcctccgttcccggcggacgtcttcacggttcctcagtacggctatttaactttaaacaatggaagccaagccctgggacgttcctccttctactgtctggagtatttcccatcgcagatgctgagaaccggcaacaactttcagttcagctacaccttcgaggacgtgcctttccacagcagctacgcgcacagccagagcctggacaggctgatgaatcccctcatcgaccagtacctgtactacctggtcagaacgcaaacgactggaactggagggacgcagactctggcattcagccaagcgggtcctagctcaatggccaaccaggctagaaattgggtgcccggaccttgctaccggcagcagcgcgtctccacgacaaccaaccagaacaacaacagcaactttgcctggacgggagctgccaagtttaagctgaacggccgagactctctaatgaatccgggcgtggcaatggcttcccacaaggatgacgacgaccgcttcttcccttcgagcggggtcctgatttttggcaagcaaggagccgggaacgatggagtggattacagccaagtgctgattacagatgaggaagaaatcaaggctaccaaccccgtggccacagaagaatatggagcagtggccatcaacaaccaggccgccaatacgcaggcgcagaccggactcgtgcacaaccagggggtgattcccggcatggtgtggcagaatagagacgtgtacctgcagggtcccatctgggccaaaattcctcacacggacggcaactttcacccgtctcccctgatgggcggctttggactgaagcacccgcctcctcaaattctcatcaagaacacaccggttccagcggacccgccgcttaccttcaaccaggccaagctgaactctttcatcacgcagtacagcaccggacaggtcagcgtggaaatcgagtgggagctgcagaaagaaaacagcaaacgctggaatccagagattcaatacacttccaactactacaaatctacaaatgtggactttgctgtcaacacggaaggagtttatagcgagcctcgccccattggcacccgttacctcacccgcaacctgtaattacatgttaatcaataaaccggttaattcgtttcagttgaactttggtctctgcgaagggcgaattc

SEQ ID NO: 75 - protein, 736 aa, Artificial Sequence
  Description of Artificial Sequence: Synthetic polypeptide
MAADGYLPDWLEDNLSEGIREWWDLKPGAPKPKANQQKQDDGRGLVLPGYKYLGPFNGLDKGEPVNAADAAALEHDKAYDQQLKAGDNPYLRYNHADAEFQERLQEDTSFGGNLGRAVFQAKKRVLEPLGLVEEGAKTAPGKKRLVEQSPQEPDSSSGIGKTGQQPAKKRLNFGQTGDSESVPDPQPLGEPPAAPSGLGPNTMASGGGAPMADNNEGADGVGNSSGNWHCDSTWLGDRVITTSTRTWALPTYNNHLYKQISNGTSGGSTNDNTYFGYSTPWGYFDFNRFHCHFSPRDWQRLINNNWGFRPKRLNFKLFNIQVKEVTTNEGTKTIANNLTSTVQVFTDSEYQLPYVLGSAHQGCLPPFPADVFTVPQYGYLTLNNGSQALGRSSFYCLEYFPSQMLRTGNNFQFSYTFEDVPFHSSYAHSQSLDRLMNPLIDQYLYYLVRTQTTGTGGTQTLAFSQAGPSSMANQARNWVPGPCYRQQRVSTTTNQNNNSNFAWTGAAKFKLNGRDSLMNPGVAMASHKDDDDRFFPSSGVLIFGKQGAGNDGVDYSQVLITDEEEIKATNPVATEEYGAVAINNQAANTQAQTGLVHNQGVIPGMVWQNRDVYLQGPIWAKIPHTDGNFHPSPLMGGFGLKHPPPQILIKNTPVPADPPLTFNQAKLNSFITQYSTGQVSVEIEWELQKENSKRWNPEIQYTSNYYKSTNVDFAVNTEGVYSEPRPIGTRYLTRNL

SEQ ID NO: 76 - DNA, 3117 bp, Adeno-associated virus
gaattcgcccttggctgcgtcaactggaccaatgagaactttcccttcaacgattgcgtcgacaagatggtgatctggtgggaggagggcaagatgacggccaaggtcgtggagtccgccaaggccattctcggcggcagcaaggtgcgtgtggaccaaaagtgcaagtcttccgcccagatcgatcccacccccgtgatcgtcacctccaacaccaacatgtgcgccgtgattgacgggaacagcaccaccttcgagcaccagcagccgttgcaggaccggatgttcaaatttgaactcacccgccgtctggagcatgactttggcaaggtgacgaagcaggaagtcaaagagttcttccgctgggcgcaggatcacgtgaccgaggtggcgcatgagttccacgtcagaaagggtggagccaacaagagacccgcccccgatgacgcggatataagcgagcccaagcgggcctgcccctcagtcgcggatccatcgacgtcagacgcggaaggagctccggtggactttgccgacaggtaccaaaacaaatgttctcgtcacgcgggcatgcttcagatgctgtttccctgcaagacatgcgagagaatgaatcagaatttcaacatttgcttcacgcacgggaccagagactgttcagaatgtttccccggcgtgtcagaatctcaaccggtcgtcagaaagaggacgtatcggaaactctgtgcgattcatcatctgctggggcgggctcccgagattgcttgctcggcctgcgatctggtcaacgtggacctggatgactgtgtttctgagcaataaatgacttaaaccaggtatggctgccgatggttatcttccagattggctcgaggacaacctctctgagggcattcgcgagtggtgggacttgaaacctggagccccgaaacccaaagccaaccagcaaaagcaggacgacggccggggtctggtgcttcctggctacaagtacctcggacccttcaacggactcgacaagggggagcccgtcaacgcggcggacgcagcggccctcgagcacgacaaagcctacgaccagcagctcaaagcgggtgacaatccgtacctgcggtataatcacgccgacgccgagtttcaggagcgtctgcaagaagatacgtcttttgggggcaacctcgggcgagcagtcttccaggccaagaagcgggttctcgaacctctcggtctggttgaggaaggcgctaagacggctcctggaaagaagagaccggtagagcagtcgccacaagagccagactcctcctcgggcatcggcaagacaggccagcagcccgctaaaaagagactcaattttggtcagactggcgactcagagtcagtccccgacccacaacctctcggagaacctccagcagccccctcaggtctgggacctaatacaatggcttcaggcggtggcgctccaatggcagacaataacgaaggcgccgacggagtgggtaattcctcgggaaattggcattgcgattccacatggctgggggacagagtcatcaccaccagcacccgaacctgggccctgcccacctacaacaaccacctctacaagcaaatctccaacggcacctcgggaggaagcaccaacgacaacacctattttggctacagcaccccctgggggtattttgacttcaacagattccactgtcacttttcaccacgtgactggcaacgactcatcaacaacaattggggattccggcccaaaagactcaacttcaagctgttcaacatccaggtcaaggaagtcacgacgaacgaaggcaccaagaccatcgccaataatctcaccagcaccgtgcgggtctttacggactcggagtaccagttaccgtacgtgctaggatccgctcaccagggatgtctgcctccgttcccggcggacgtcttcatggttcctcagtacggctatttaactttaaacaatggaagccaagccctgggacgttcctccttctactgtctggagtatttcccatcgcagatgctgagaaccggcaacaactttcagttcagctacaccttcgaggacgtgcctttccacagcagctacgcgcacagccagagcctggacaggctgatgaatcccctcatcgaccagtacctgtactacctggtcagaacgcaaacgactggaactggagggacgcagactctggcattcagccaagcgggtcctagctcaatggccaaccaggctagaaattgggtgcccggaccttgctaccggcagcagcgcgtctccacgacaaccaaccagagcaacaacagcaactttgcctggacgggagctgccaagtttaagctgaacggccgagactctctaatgaatccgggcgtggcaatggcttcccacaaggatgacgacgaccgcttcttcccttcgagcggggtcctgatttttggcaagcaaggagccgggaacgatggagtggattacagccaagtgctgattacagatgaggaagaaatcaaggctaccaaccccgtggccacagaagaatatggagcagtggccatcaacaaccaggccgccaatacgcaggcgcagaccggactcgtgcacaaccagggggtgattcccggcatggtgtggcagaatagagacgtgtacctgcagggtcccatctgggccaaaattcctcacacggacggcaactttcacccgtctcccctgatgggcggctttggactgaagcacccgcctcctcaaattctcatcaagaacacaccggttccagcggacccgccgcttaccttcaaccaggccaagctgaactctttcatcacgcagtacagcaccggacaggtcagcgtggaaatcgagtgggagctgcagaaagaaaacagcaaacgctggaatccagagattcaatacacttccaactactacaaatctacaaatgtggactttgctgtcaacacggaaggagtttatagcgagcctcgccccattggcacccgttacctcacccgcaacctgtaattacatgttaatcaataaaccggttaattcgtttcagttgaactttggtctctgcgaagggcgaattc

SEQ ID NO: 77 - protein, 736 aa, Artificial Sequence
  Description of Artificial Sequence: Synthetic polypeptide
MAADGYLPDWLEDNLSEGIREWWDLKPGAPKPKANQQKQDDGRGLVLPGYKYLGPFNGLDKGEPVNAADAAALEHDKAYDQQLKAGDNPYLRYNHADAEFQERLQEDTSFGGNLGRAVFQAKKRVLEPLGLVEEGAKTAPGKKRPVEQSPQEPDSSSGIGKTGQQPAKKRLNFGQTGDSESVPDPQPLGEPPAAPSGLGPNTMASGGGAPMADNNEGADGVGNSSGNWHCDSTWLGDRVITTSTRTWALPTYNNHLYKQISNGTSGGSTNDNTYFGYSTPWGYFDFNRFHCHFSPRDWQRLINNNWGFRPKRLNFKLFNIQVKEVTTNEGTKTIANNLTSTVRVFTDSEYQLPYVLGSAHQGCLPPFPADVFMVPQYGYLTLNNGSQALGRSSFYCLEYFPSQMLRTGNNFQFSYTFEDVPFHSSYAHSQSLDRLMNPLIDQYLYYLVRTQTTGTGGTQTLAFSQAGPSSMANQARNWVPGPCYRQQRVSTTTNQSNNSNFAWTGAAKFKLNGRDSLMNPGVAMASHKDDDDRFFPSSGVLIFGKQGAGNDGVDYSQVLITDEEEIKATNPVATEEYGAVAINNQAANTQAQTGLVHNQGVIPGMVWQNRDVYLQGPIWAKIPHTDGNFHPSPLMGGFGLKHPPPQILIKNTPVPADPPLTFNQAKLNSFITQYSTGQVSVEIEWELQKENSKRWNPEIQYTSNYYKSTNVDFAVNTEGVYSEPRPIGTRYLTRNL

SEQ ID NO: 78 - DNA, 3121 bp, Adeno-associated virus
gaattcgcccttctacggctgcgtcaactggaccaatgagaactttcccttcaacgattgcgtcgacaagatggtgatctggtgggaggagggcaagatgacggccaaggtcgtggagtccgccaaggccattctcggcggcagcaaggtgcgtgtggaccaaaagtgcaagtcttccgcccagatcgatcccacccccgtgatcgtcacctccaacaccaacatgtgcgccgtgattgacgggaacagcaccaccttcgagcaccagcagccgttgcaggaccggatgttcaaatttgaactcacccgccgtctggagcatgactttggcaaggtgacgaagcaggaagtcaaagagttcttccgctgggcgcaggatcacgtgaccgaggtggcgcatgagttccacgtcagaaagggtggcgccaacaagagacccgcccccgatgacgcggatataagcgagcccaagcgggcctgcccctcagtcgcggatccatcgacgtcagacgcggaaggagctccggtggactttgccgacaggtaccaaaacaaatgttctcgtcacgcgggcatgcttcagatgctgtttccctgcaagacatgcgagagaatgaatcagaatttcaacatttgcttcacgcacgggaccagagactgttcagaatgtttccccggcgtgtcagaatctcaaccggtcgtcagaaagaggacgtatcggaaactctgtgcgattcatcatctgctggggcgggctcccgagattgcttgctcggcctgcgatctggtcaacgtggacctggatgactgtgtttctgagcaataaatgacttaaaccaggtatggctgccgatggttatcttccagattggctcgaggacaacctctctgagggcattcgcgagtggtgggacttgaaacctggagccccgaaacccaaagccaaccagcaaaagcaggacgacggccggggtctggtgcttcctggctacaagtacctcggacccttcaacggactcgacaagggggagcccgtcaacgcggcggacgcagcggccctcgagcacgacaaagcctacgaccagcagctcaaagcgggtgacaatccgtacctgcggtataatcacgccgacgccgagtttcaggagcgtctgcaagaagatacgtcctttgggggcaacctcgggcgagcagtcttccaggccaagaagcgggttctcgaacctctcggtctggttgaggaaggcgctaagacggctcctggaaagaagagaccggtagagcagtcgccacaagagccagactcctcctcgggcatcggcaagacaggccagcagcccgctaaaaagagactcaattttggtcagactggcgactcagagtcagtccccgacccacaacctctcggagaacctccagcagccccctcaggtctgggacctaatacaatggcttcaggcggtggcgctccaatggcagacaataacgaaggcgccgacggagtgggtaattcctcgggaaattggcattgcgattccacatggctgggggacagagtcatcaccaccagcacccgaacctgggccctgcccacctacaacaaccacctctacaagcaaatctccaacggcacctcgggaggaagcaccaacgacaacacctattttggctacagcaccccctgggggtattttgacttcaacagattccactgtcacttttcaccacgtgactggcaacgactcatcaacaacaattggggattccggcccaaaagactcaacttcaagctgttcaacatccaggtcaaggaagtcacgacgaacgaaggcaccaagaccatcgccaataatctcaccagcaccgtgcaggtctttacggacttggagtaccagttaccgtacgtgctaggatccgctcaccagggatgtctgcctccgttcccggcggacgtcttcatggttcctcagtacggctatttaactttaaacaatggaagccaagccctgggacgttcctccttctactgtctggagtatttcccatcgcagatgccgagaaccggcaacaactttcagttcagctacaccttcgaggacgtgcctttccacagcagctacgcgcacagccagagcctggacaggctgatgaatcccctcatcgaccagtacctgtactacctggtcagaacgcaaacgactggaactggagggacgcagactctggcattcagccaagcgggtcctagctcaatggccaaccaggctagaaattgggtgcccggaccttgctaccggcagcagcgcgtctccacgacaaccaaccagaacaacaacagcaactttgcctggacgggagctgccaagtttaagctgaacggccgagactctctaatgaatccgggcgtggcaatggcttcccacaaggatgacgacgaccgcttcttcccttcgagcggggtcctgatttttggcaagcaaggagccgggaacgatggagtggattacagccaagtgctgattacagatgaggaagaaatcaaggctaccaaccccgtggccacagaagaatatggagcagtggccatcaacaaccaggccgccaatacgcaggcgcagaccggactcgtgcacaaccagggggtgattcccggcatggtgtggcagaatagagacgtgtacctgcagggtcccatctgggccaaaattcctcacacggacggcaactttcacccgtctcccctgatgggcggctttggactgaagcacccgcctcctcaaattctcatcaagaacacaccggttccagcggacccgccgcttaccttcaaccaggccaagctgaactctttcatcacgcagtacagcaccggacaggtcagcgtggaaatcgagtgggagctgcagaaagaaaacagcaaacgctggaatccagagattcaatacacttccaactactacaaatctacaaatgtggactttgctgtcaacacggaaggagtttatagcgagcctcgccccattggcacccgttacctcacccgcaacctgtaattacatgttaatcaataaaccggttaattcgtttcagttgaactttggtctctgcgaagggcgaattc

SEQ ID NO: 79 - protein, 736 aa, Artificial Sequence
  Description of Artificial Sequence: Synthetic polypeptide
MAADGYLPDWLEDNLSEGIREWWDLKPGAPKPKANQQKQDDGRGLVLPGYKYLGPFNGLDKGEPVNAADAAALEHDKAYDQQLKAGDNPYLRYNHADAEFQERLQEDTSFGGNLGRAVFQAKKRVLEPLGLVEEGAKTAPGKKRPVEQSPQEPDSSSGIGKTGQQPAKKRLNFGQTGDSESVPDPQPLGEPPAAPSGLGPNTMASGGGAPMADNNEGADGVGNSSGNWHCDSTWLGDRVITTSTRTWALPTYNNHLYKQISNGTSGGSTNDNTYFGYSTPWGYFDFNRFHCHFSPRDWQRLINNNWGFRPKRLNFKLFNIQVKEVTTNEGTKTIANNLTSTVQVFTDLEYQLPYVLGSAHQGCLPPFPADVFMVPQYGYLTLNNGSQALGRSSFYCLEYFPSQMPRTGNNFQFSYTFEDVPFHSSYAHSQSLDRLMNPLIDQYLYYLVRTQTTGTGGTQTLAFSQAGPSSMANQARNWVPGPCYRQQRVSTTTNQNNNSNFAWTGAAKFKLNGRDSLMNPGVAMASHKDDDDRFFPSSGVLIFGKQGAGNDGVDYSQVLITDEEEIKATNPVATEEYGAVAINNQAANTQAQTGLVHNQGVIPGMVWQNRDVYLQGPIWAKIPHTDGNFHPSPLMGGFGLKHPPPQILIKNTPVPADPPLTFNQAKLNSFITQYSTGQVSVEIEWELQKENSKRWNPEIQYTSNYYKSTNVDFAVNTEGVYSEPRPIGTRYLTRNL

SEQ ID NO: 80 - DNA, 3122 bp, Adeno-associated virus
gaattcgccctttctacggctgcgtcaactggaccaatgagaactttcccttcaacgattgcgtcgacaagatggtgatctggtgggaggagggcaagatgacggccaaggtcgtggagtccgccaaggccattctcggcggcagcaaggtgcgtgtggaccaaaagtgcaagtcttccgcccagatcgatcccacccccgtgatcgtcacctccaacaccaacatgtgcgccgtgattgacgggaacagcaccaccttcgagcaccagcagccgttgcaggaccggatgttcaaatttgaactcacccgccgtctggagcatgactttggcaaggtgacgaagcaggaagtcaaagggttcttccgctgggcgcaggatcacgtgaccgaggtggcgcatgagttccacgtgcgagcccaagcgggcctgcccctcagtcgcggatccatcgacgtcagaccagaaagggtggagccaacaagagacccgcccccgatgacgcggatataagcggaaggagctccggtggactttgccgacaggtaccaaaacaaatgttctcgtcacgcgggcatgcttcagatgctgtttccctgcaagacatgcgagagaatgaatcagaatttcaacatttgcttcacgcacgggaccagagactgttcagaatgtttccccggcgtgtcagaatctcaaccggtcgtcagaaagaggacgtatcggaaactctgtgcgattcatcatctgctggggcgggctcccgagattgcttgctcggcctgcgatctggtcaacgtggacctggatgactgtgtttctgagcaataaatgacttaaaccaggtatggctgccgatggttatcttccagattggctcgaggacaacctctctgagggcattcgcgagtggtgggacttgaaacctggagccccgaaacccaaagccaaccagcaaaagcaggacgacggccggggtctggtgcttcctggctacaagtacctcggacccttcaacggactcgacaagggggagcccgtcaacgcggcggacgcagcggccctcgagcacgacaaagcctacgaccagcagctcaaagcgggtgacaatccgtacctgcggtataatcacgccgacgccgagtttcaggagcgtctgcaagaagatacgtcttttgggggcaacctcgggcgagcagtcttccaggccaagaagcgggttctcgaacctctcggtctggttgaggaaggcgctaagacggctcctggaaagaagagaccggtagagcagtcgccacaagagccagactcctcctcgggcatcggcaagacaggccagcagcccgctaaaaagagactcaattttggtcagactggcgactcagagtcagtccccgacccacaacctctcggagaacctccagcagccccctcaggtctgggacctaatacaatggcttcaggcggtggcgctccaatggcagacaataacgaaggcgccgacggagtgggtaattcctcgggaaattggcattgcgattccacatggctgggggacagagtcatcaccaccagcacccgaacctgggccctgcccacctacaacaaccacctctacaagcaaatctccaacggcacctcgggaggaagcaccaacgacaacacctattttggctacagcaccccctgggggtattttgacttcaacagattccactgtcacttttcaccacgtgactggcaacgactcatcaacaacaattggggattccggcccaaaagactcaacttcaagctgttcaacatccaggtcaaggaagtcacgacgaacgaaggcaccaagaccatcgccaataatctcaccagcaccgtgcaggtctttacggactcggagtaccagttaccgtacgtgctaggatccgctcaccagggatgtctgcctccgttcccggcggacgtcttcatggttcctcagtacggctatttaactttaaacaatggaagccaagccctgggacgttcctccttctactgtctggagtatttcccatcgcagatgctgagaaccggcaacaactttcagttcagctacaccttcgaggacgtgcctttccacagcagctacgcgcacagccagagcctggacaggctgatgaatcccctcatcgaccagtacctgtactacctggtcagaacgcaaacgactggaactggagggacgcagactctggcattcagccaagcgggtcctagctcaatggccaaccaggctagaaattgggtgcccggaccttgctaccggcagcagcgcgtctccacgacaaccaaccagaacaacaacagcaactttgcctggacgggagctgccaagtttaagctgaacggccgagactctctaatgaatccgggcgtggcaatggcttcccacaaggatgacgacgaccgcttcttcccttcgagcggggtcctgatttttggcaagcaaggagccgggaacgatggagtggattacagccaagtgctgattacagatgaggaagaaatcaaggctaccaaccccgtggccacagaagaatatggagcagtggccatcaacaaccaggccgccaatacgcaggcgcagaccggactcgtgcacaaccagggggtgattcccggcatggtgtggcagaatagagacgtgtacctgcagggtcccatctgggccaaaattcctcacacggacggcaactttcacccgtctcccctgatgggcggctttggactgaagcacccgcctcctcaaattctcatcaagaacacaccggttccagcggacccgccgcttaccttcaaccaggccaagctgaactctttcatcacgcagtacagcaccggacaggtcagcgtggaaatcgagtgggagctgcagaaagaaaacagcaaacgctggaatccagagattcaatacacttccaactactacaaatctacaaatgtggactttgctgtcaacacggagggggtttatagcgagcctcgccccattggcacccgttacctcacccgcaacctgtaattacatgttaatcaataaaccggttaattcgtttcagttgaactttggtctctgcgaagggcgaattc

SEQ ID NO: 81 - protein, 736 aa, Artificial Sequence
  Description of Artificial Sequence: Synthetic polypeptide
MAADGYLPDWLEDNLSEGIREWWDLKPGAPKPKANQQKQDDGRGLVLPGYKYLGPFNGLDKGEPVNAADAAALEHDKAYDQQLKAGDNPYLRYNHADAEFQERLQEDTSFGGNLGRAVFQAKKRVLEPLGLVEEGAKTAPGKKRPVEQSPQEPDSSSGIGKTGQQPAKKRLNFGQTGDSESVPDPQPLGEPPAAPSGLGPNTMASGGGAPMADNNEGADGVGNSSGNWHCDSTWLGDRVITTSTRTWALPTYNNHLYKQISNGTSGGSTNDNTYFGYSTPWGYFDFNRFHCHFSPRDWQRLINNNWGFRPKRLNFKLFNIQVKEVTTNEGTKTIANNLTSTVQVFTDSEYQLPYVLGSAHQGCLPPFPADVFMVPQYGYLTLNNGSQALGRSSFYCLEYFPSQMLRTGNNFQFSYTFEDVPFHSSYAHSQSLDRLMNPLIDQYLYYLVRTQTTGTGGTQTLAFSQAGPSSMANQARNWVPGPCYRQQRVSTTTNQNNNSNFAWTGAAKFKLNGRDSLMNPGVAMASHKDDDDRFFPSSGVLIFGKQGAGNDGVDYSQVLITDEEEIKATNPVATEEYGAVAINNQAANTQAQTGLVHNQGVIPGMVWQNRDVYLQGPIWAKIPHTDGNFHPSPLMGGFGLKHPPPQILIKNTPVPADPPLTFNQAKLNSFITQYSTGQVSVEIEWELQKENSKRWNPEIQYTSNYYKSTNVDFAVNTEGVYSEPRPIGTRYLTRNL

SEQ ID NO: 82 - DNA, 2370 bp, Adeno-associated virus
gaattcgccctttctacggctgcgtcaactggaccaatgagaactttcccttcaacgattgcgtcgacaagatggtgatctggtgggaggagggcaagatgacggccaaggtcgtggagtccgccaaggccattctcggcggcagcaaggtgcgcgtggaccaaaagtgcaagtcgtccgcccagatcgaccccacccccgtgatcgtcacctccaacaccaacatgtgcgccgtgattgacgggaacagcaccaccttcgagcaccagcagccgttgcaggaccggatgttcaagttcgaactcacccgccgtctggagcacgactttggcaaggtgaccaagcaggaagtcaaagagttcttccgctgggcgcaggatcacgtgaccgaggtggcgcatgagttctacgtcagaaagggcggagccagcaaaagacccgcccccgatgacgcggatataagcgagcccaagcgggcctgcccctcagtcgcggatccatcgacgtcagacgcggaaggagctccggtggactttgccgacaggtaccaaaacaaatgttctcgtcacgcgggcatgcttcagacgctgtttccctgcaaaacgtgcgagagaatgaatcagaatttcaacatttgcttcacgcacggggtcagagactgctcagaatgtttccccggtgcatcagaatctcaaccggtcgtcagaaaaaaaacgtatcagaaactgtgtgccattcatcatctgctggggcgggcacccgagattgcttgctcggcctgcgatctggtcaacgtggacctggacgactgtgtttctgagcaataaatgacttaaaccaggtatggctgccgatggttatcttccagattggcttgaggacaacctctctgagggcattcgcgagtggtgggacctgaaacctggagccccgaaacccaaagccaaccagcaaaagcaggacgacggccggggtctggtgcttcctggctacaagtacctcggacccttcaacggactcgacaagggggagcccgtcaacgcggcggacgcagcggccctcgagcacgacaaggcctacgaccagcagctcaaagcgggtgacaatccgtacctgcggtataaccacgccgacgccgagtttcaggagcgtctgcaagaagatacgtcttttgggggcaacctcgggcgagcagtcttccaggccaagaagcgggttctcgaacctctcggtctggttgaggaaggcgctaagacggctcctggaaagaagagaccggtagagccatcacctcagcgttcccccgactcctccacgggcatcggcaagaaaggccaccagcccgcgagaaagagactgaactttgggcagactggcgactcggagtcagtccccgaccctcaaccaatcggagaaccaccagcaggcccctctggtctgggatctggtacaatggctgcaggcggtggcgctccaatggcagacaataacgaaggcgccgacggagtgggtagttcctcaggaaattggcattgcgattccacatggctgggcgacagagtcatcaccaccagcacccgaacctgggccctgcccacctacaacaaccatctctacaagcaaatctccaacgggacatcgggaggaagcactaacgacaacacctactttggctacagcaccccctgggggtattttgacttcaacagattccactgccacttctcaccacgtgactggcagcgactcatcaacaataactggggattccggcccaagagactcaacttcaagctcttcaacatccaggtcaaggaggtcacgcagaatgaaggcaccaagaccatcgccaataaccttaccagcacgattcaggtgtttacggactcggaataccagctcccgtacgtcctcggctctgcgcaccagggctgcctccctccgttcccggcggacgtcttcatgattcctcagtacgggtatctgaccctaaacaatggcagtcaggctgtgggccgttcctccttctactgcctggaatacttcccttctcaaatgctgaggacgggcaacaactttgaattcagctacaccttcgaggacgtgcctttccacagcagctacgcgcacagccagagcctggaccggctgatgaaccctctcatcgaccagtacctgtattacttatccagaactcagtccacaggaggaactcaaggtactcagcaattgttattttctcaagccgggcccgcaaacatgtyggctcaggccaagaactggctacctggaccgtgttaccgtcagcaacgagtttccacgacactgtcgcaaaacaacaacagcaattttgctggaccggtgccacca

SEQ ID NO: 83 - protein, 738 aa, Artificial Sequence; identical to SEQ ID NO: 73
  Description of Artificial Sequence: Synthetic polypeptide

SEQ ID NO: 84 - DNA, 2205 bp, Adeno-associated virus
atgactgacggttaccttccagattggctagaggacaacctctctgaaggcgttcgagagtggtgggcgctgcaacctggagcccctaaacccaaggcaaatcaacaacatcaggacaacgctcggggtcttgtgcttccgggttacaaatacctcggacccggcaacggactcgacaagggggaacccgtcaacgcagcggacgcggcagccctcgagcacgacaaggcctacgaccagcagctcaaggccggtgacaacccctacctcaagtacaaccacgccgacgcggagttccagcagcggcttcagggcgacacatcgtttgggggcaacctcggcagagcagtcttccaggccaaaaagagggttcttgaacctcttggtctggttgagcaagcgggtgagacggctcctggaaagaagagaccgttgattgaatccccccagcagcccgactcctccacgggtatcggcaaaaaaggcaagcagccggctaaaaagaagctcgttttcgaagacgaaactggagcaggcgacggaccccctgagggatcaacttccggagccatgtctgatgacagtgagatgcgtgcagcagctggcggagctgcagtcgagggcggacaaggtgccgatggagtgggtaatgcctcgggtgattggcattgcgattccacctggtctgagggccacgtcacgaccaccagcaccagaacctgggtcttgcccacctacaacaaccacctctacaagcgactcggagagagcctgcagtccaacacctacaacggattctccaccccctggggatactttgacttcaaccgcttccactgccacttctcaccacgtgactggcagcgactcatcaacaacaactggggcatgcgacccaaagccatgcgggtcaaaatcttcaacatccaggtcaaggaggtcacgacgtcgaacggcgagacaacggtggctaataaccttaccagcacggttcagatctttgcggactcgtcgtacgaactgccgtacgtgatggatgcgggtcaagagggcagcctgcctccttttcccaacgacgtctttatggtgccccagtacggctactgtggactggtgaccggcaacacttcgcagcaacagactgacagaaatgccttctactgcctggagtactttccttcgcagatgctgcggactggcaacaactttgaaattacgtacagttttgagaaggtgcctttccactcgatgtacgcgcacagccagagcctggaccggctgatgaaccctctcatcgaccagtacctgtggggactgcaatcgaccaccaccggaaccaccctgaatgccgggactgccaccaccaactttaccaagctgcggcctaccaacttttccaactttaaaaagaactggctgcccgggccttcaatcaagcagcagggcttctcaaagactgccaatcaaaactacaagatccctgccaccgggtcagacagtctcatcaaatacgagacgcacagcactctggacggaagatggagtgccctgacccccggacctccaatggccacggctggacctgcggacagcaagttcagcaacagccagctcatctttgcggggcctaaacagaacggcaacacggccaccgtacccgggactctgatcttcacctctgaggaggagctggcagccaccaacgccaccgatacggacatgtggggcaacctacctggcggtgaccagagcaacagcaacctgccgaccgtggacagactgacagccttgggagccgtgcctggaatggtctggcaaaacagagacatttactaccagggtcccatttgggccaagattcctcataccgatggacactttcacccctcaccgctgattggtgggtttgggctgaaacacccgcctcctcaaatttttatcaagaacaccccggtacctgcgaatcctgcaacgaccttcagctctactccggtaaactccttcattactcagtacagcactggccaggtgtcggtgcagattgactgggagatccagaaggagcggtccaaacgctggaaccccgaggtccagtttacctccaactacggacagcaaaactctctgttgtgggctcccgatgcggctgggaaatacactgagcctagggctatcggtacccgctacctcacccaccacctgtaa

SEQ ID NO: 85 - protein, 734 aa, Adeno-associated virus; identical to SEQ ID NO: 57

SEQ ID NO: 86 - DNA, 3128 bp, Adeno-associated virus
gaattcgccctttctacggctgcgtcaactggaccaatgagaactttcccttcaacgattgcgtcgacaagatgttgatctggtgggaggagggcaagatgacggccaaggtcgtggagtccgccaaggccattctcggcggcagcaaagtgcgcgtggaccaaaagtgcaagccgtccgcccagatcgaccccacccccgtgatcgtcacctccaacaccaacatgtgcgccgtgattgacgggaacagcaccaccttcgagcaccagcagccgttgcgggaccggatgttcaagtttgaactcacccgccgtctggagcacgactttggcaaggtgacaaagcaggaagtcagagagttcttccgctgggcgcaggatcacgtgaccgaggtggcgcacgagttctacgtcagaaagggtggagccaacaagagacccgcccccgatgacgcggataaaagcgagcccaagcgggcctgcccctcagtcgcggatccatcgacgtcagacgcggaaggagctccggtggactttgccgacaggtaccaaaacaaatgttctcgtcacgcgggcatgcttcagatgctgtttccctgcaaaacatgcgagagaatgaatcagaatttcaacatttgcttcacgcacgggaccagagactgttcagaatgtttccccggcgtgtcagaatctcaaccggtcgtcagaaaaaagacgtatcggaaactctgtgcgattcatcatctgctggggcgggcacccgagattgcttgctcggcctgcgatctggtcaacgtggacctagatgactgtgtttctgagcaataaatgacttaaaccaggtatggctgccgatggttatcttccagattggctcgaggacaacctctctgagggcattcgcgagtggtgggacttgaaacctggagccccgaaacccaaagccaaccagcaaaagcaggacgacggccggggtctggtgcttcctggctacaagtacctcggacccttcaacggactcgacaagggggagcccgtcaacgcggcggacgcagcggccctcgagcacgacaaggcctacgaccagcagctcaaagcgggtgacaatccgtacctgcggtataaccacgccgacgccgagtttcaggagcgtctgcaagaagatacgtcttttgggggcaacctcgggcgagcagtcttccaggccaagaagcgggttctcgaacctctcggtctggttgaggaaggcgctaagacggctcctggaaagaagagaccggtagagccatcaccccagcgttctccagactcctctacgggcatcggcaagaaaggccagcagcccgcgaaaaagagactcaactttgggcagactggcgactcagagtcagtgcccgaccctcaaccaatcggagaaccccccgcaggcccctctggtctgggatctggtacaatggctgcaggcggtggcgctccaatggcagacaataacgaaggcgccgacggagtgggtagttcctcaggaaattggcattgcgattccacatggctgggcgacagagtcatcaccaccagcacccgaacctgggccctccccacctacaacaaccacctctacaagcaaatctccaacgggacttcgggaggaagcaccaacgacaacacctacttcggctacagcaccccctgggggtattttgactttaacagattccactgccacttctcaccacgtgactggcagcgactcatcaacaacaactggggattccggcccaagagactcaacttcaagctcttcaacatccaggtcaaggaggtcacgcagaatgaaggcaccaagaccatcgccaataaccttaccagcacgattcaggtctttacggactcggaataccagctcccgtacgtcctcggctctgcgcaccagggctgcctgcctccgttcccggcggacgtcttcatgattcctcagtacgggtacctgactctgaacaatggcagtcaggccgtgggccgttcctccttctactgcctggagtactttccttctcaaatgctgagaacgggcaacaactttgagttcagctaccagtttgaggacgtgccttttcacagcagctacgcgcacagccaaagcctggaccggctgatgaaccccctcatcgaccagtacctgtactacctgtctcggactcagtccacgggaggtaccgcaggaactcagcagttgctattttctcaggccgggcctaataacatgtcggctcaggccaaaaactggctacccgggccctgctaccggcagcaacgcgtctccacgacactgtcgcaaaataacaacagcaactgtaaatcccggtgtcgctatggcaacccacaaggacgacgaagagcgattttgcctggaccggtgccaccaagtatcatctgaatggcagagactctctgttttccgtccagcggagtcttaatgtttgggaaacagggagctggaaaagacaacgtggactatagcagcgttatgctaaccagtgaggaagaaattaaaaccaccaacccagtggccacggaacagtacggcgtggtggccgataacctgcaacagcaaaacgccgctcctattgtaggggccgtcaacagtcaaggagccttacctggcatggtctggcagaaccgggacgtgtacctgcagggtcctatctgggccaagattcctcacacggacggaaactttcatccctcgccgctgatgggaggctttggactgaaacacccgcctcctcagatcctgattaagaatacacctgttcccgcggatcctccaactaccttcagtcaagctaagctggcgtcgttcatcacgcagtacagcaccggacaggtcagcgtggaaattgaatgggagctgcagaaagaaaacagcaaacgctggaacccagagattcaatacacttccaactactacaaatctacaaatgtggacttcgctgttaacacagatggcacttattctgagcctcgccccattggcacccgttacctcacccgtaatctgtaattgctcgttaatcaataaaccggttgattcgtttcagttgaactttggtctctgcgaagggcgaattc

SEQ ID NO: 87 - protein, 738 aa, Artificial Sequence; identical to SEQ ID NO: 7
  Description of Artificial Sequence: Synthetic polypeptide

SEQ ID NO: 88 - DNA, 3128 bp, Adeno-associated virus
gaattcgccctttctacggctgcgtcaactggaccaatgagaactttcccttcaacgattgcgtcgacaagatggtgatctggtgggaggagggcaagatgacggccaaggtcgtggagtccgccaaggccattctcggcggcagcaaagtgcgcgtggaccaaaagtgcaagtcgtccgcccagatcgaccccacccccgtgatcgtcacctccaacaccaacatgtgcgccgtgattgacgggaacagcaccaccttcgagcaccagcagccgttgcaggaccggatgttcaagtttgaactcacccgccgtctggagcacgactttggcaaggtgacaaagcaggaagtcagagagttcttccgctgggcgcaggatcacgtgaccgaggtggcgcacgagttctacgtcagaaagggtggagccaacaagagacccgcccccgatgacgcggataaaagcgagcccaagcgggcctgcccctcagtcgcggatccatcgacgtcagacgcggaaggagctccggtggactttgccgacaggtaccaaaacaaatgttctcgtcacgcgggcatgcttcagatgctgtttccctgcaaaacatgcgagagaatgaatcagaatttcaacatttgcttcacgcacgggaccagagactgttcagaatgtttccccggcgtgtcagaatctcaaccggttgtcagaaaaaagacgtatcggaaactctgtgcgattcatcatctgctggggcgggcacccgagattgcttgctcggcctgcgatctggtcaacgtggacctagatgactgtgtttctgagcaataaatgacttaaaccaggtatggctgccgatggttatcttccagattggctcgaggacaacctctctgagggcattcgcgagtggtgggacttgaaacctggagccccgaaacccaaagccaaccagcaaaagcaggacgacggccggggtctggtgcttcctggctacaagtacctcggacccttcaacggactcgacaagggggagcccgtcaacgcggcggacgcagcggccctcgagcacgacaaggcctacgaccagcagctcaaagcgggtgacaatccgtacctgcggtataaccacgccgacgccgagtttcaggagcgtctgcaagaagatacgtcttttgggggcaacctcgggcgagcagtcttccaggccaagaagcgggttctcgaacctctcggtctggttgaggaaggcgctaagacggctcctggaaagaagagaccggtagagccatcaccccagcgttctccagactcctctacgggcatcggcaagaaaggccagcagcccgcgaaaaagagactcaactttgggcagactggcgactcagagtcagtgcccgaccctcaaccaatcggagaaccccccgcaggcccctctggtctgggatctggtacaatggctgcaggcggtggcgctccaatggcagacaataacgaaggcgccgacggagtgggtagttcctcaggaaattggcattgcgattccacatggctgggcgacagagtcatcaccaccagcacccgaacctgggccctccccacctacaacaaccacctctacaagcaaatctccaacgggacttcgggaggaagcaccaacgacaacacctacttcggctacagcaccccctgggggtattttgactttaacagattccactgccacttctcaccacgtgactggcagcgactcatcaacaacaactggggattccggcccaagagacccaacttcaagctcttcaacatccaggtcaaggaggtcacgcagaatgaaggcaccaagaccatcgccaataaccttaccagcacgattcaggtctttacggactcggaataccagctcccgtacgtcctcggctctgcgcaccagggctgcctgcctccgttcccggcggacgtcttcatgattcctcagtacgggtacctgactctgaacaatggcagtcaggccgtgggccgttcctccttctactgcctggagtactttccttctcaaatgctgagaacgggcaacaactttgagttcagctaccagtttgaggacgtgccttttcacagcagctacgcgcacagccaaagcctggaccggctgatgaaccccctcatcgaccagtacctgtactacctgtctcggactcagtccacgggaggtaccgcaggaactcagcagttgctattttctcaggccgggcctaataacatgtcggctcaggccaaaaactggctacccgggccctgctaccggcagcaacgcgtctccacgacactgtcgcaaaataacaacagcaactttgcctggaccggtgccaccaagtatcatctgaatggcagagactctctggtaaatcccggtgtcgctatggcaacccacaaggacgacgaagagcgattttttccgtccagcggagtcttaatgtttgggaaacagggagctggaaaagacaacgtggactatagcagcgttatgctaaccagtgaggaagaaattaaaaccaccaacccagtggccacagaacagtacggcgtggtggccgataacctgcaacagcaaaacgccgctcctattgtaggggccgtcaacagtcaaggagccttacctggcatggtctggcagaaccgggacgtgtacctgcagggtcctatctgggccaagattcctcacacggacggaaactttcatccctcgccgctgatgggaggctttggactgaaacacccgcctcctcagatcctgattaagaatacacctgttcccgcggatcctccaactaccttcagtcaagctaagctggcgtcgttcatcacgcagtacagcaccggacaggtcagcgtggaaattgaatgggagctgcagaaagaaaacagcaaacgctggaacccagagattcaatacacttccaactactacaaatctacaaatgtggactttgctgttaacacagatggcacttattctgagcctcgccccattggcacccgttacctcacccgtaatctgtaattgcttgttaatcaataaaccggttgattcgtttcagttgaactttggtctctgcgaagggcgaattc

SEQ ID NO: 89 - protein, 738 aa, Artificial Sequence
  Description of Artificial Sequence: Synthetic polypeptide
MAADGYLPDWLEDNLSEGIREWWDLKPGAPKPKANQQKQDDGRGLVLPGYKYLGPFNGLDKGEPVNAADAAALEHDKAYDQQLKAGDNPYLRYNHADAEFQERLQEDTSFGGNLGRAVFQAKKRVLEPLGLVEEGAKTAPGKKRPVEPSPQRSPDSSTGIGKKGQQPAKKRLNFGQTGDSESVPDPQPIGEPPAGPSGLGSGTMAAGGGAPMADNNEGADGVGSSSGNWHCDSTWLGDRVITTSTRTWALPTYNNHLYKQISNGTSGGSTNDNTYFGYSTPWGYFDFNRFHCHFSPRDWQRLINNNWGFRPKRPNFKLFNIQVKEVTQNEGTKTIANNLTSTIQVFTDSEYQLPYVLGSAHQGCLPPFPADVFMIPQYGYLTLNNGSQAVGRSSFYCLEYFPSQMLRTGNNFEFSYQFEDVPFHSSYAHSQSLDRLMNPLIDQYLYYLSRTQSTGGTAGTQQLLFSQAGPNNMSAQAKNWLPGPCYRQQRVSTTLSQNNNSNFAWTGATKYHLNGRDSLVNPGVAMATHKDDEERFFPSSGVLMFGKQGAGKDNVDYSSVMLTSEEEIKTTNPVATEQYGVVADNLQQQNAAPIVGAVNSQGALPGMVWQNRDVYLQGPIWAKIPHTDGNFHPSPLMGGFGLKHPPPQILIKNTPVPADPPTTFSQAKLASFITQYSTGQVSVEIEWELQKENSKRWNPEIQYTSNYYKSTNVDFAVNTDGTYSEPRPIGTRYLTRNL

SEQ ID NO: 90 - protein, 738 aa, Adeno-associated virus
MAADGYLPDWLEDNLSEGIREWWDLKPGAPKPKANQQKQDDGRGLVLPGYKYLGPFNGLDKGEPVNAADAAALEHDKAYDQQLKAGDNPYLRYNHADAEFQERLQEDTSFGGNLGRAVFQAKKRVLEPLGLVEEAAKTAPGKKRPVEPSPQRSPDSSTGIGKKGQQPAKKRLNFGQTGDSESVPDPQPIGEPPAGPSGLGSGTMAAGGGAPMADNNEGADGVGSSSGNWHCDSTWLGDRVITTSTRTWALPTYNNHLYKQISNGTSGGSTNDNTYFGYSTPWGYFDFNRFHCHFSPRDWQRLINNNWGFRPKRLSFKLFNIQVKEVTQNEGTKTIANNLTSTIQVFTDSEYQLPYVLGSAHQGCLPPFPADVFMIPQYGYLTLNNGSQAVGRSSFYCLEYFPSQMLRTGNNFEFSYTFEDVPFHSSYAHSQSLDRLMNPLIDQYLYYLSRTQSTGGTQGTQQLLFSQAGPANMSAQAKNWLPGPCYRQQRVSTTLSQNNNSNFAWTGATKYHLNGRDSLVNPGVAMATHKDDEERFFPSSGVLMFGKQGAGRDNVDYSSVMLTSEEEIKTTNPVATEQYGVVADNLQQTNTGPIVGNVNSQGALPGMVWQNRDVYLQGPIWAKIPHTDGNFHPSPLMGGFGLKHPPPQILIKNTPVPADPPTTFSQAKLASFITQYSTGQVSVEIEWELQKENSKRWNPEIQYTSNYYKSTNVDFAVNTEGTYSEPRPIGTRYLTRNL

SEQ ID NO: 91 - DNA, 2172 bp, Artificial Sequence
  Description of Artificial Sequence: Synthetic polynucleotide
atgtcttttgttgatcaccctccagattggttggaagaagttggtgaaggtcttcgcgagtttttgggccttgaagcgggcccaccgaaaccaaaacccaatcagcagcatcaagatcaagcccgtggtcttgtgctgcctggttataactatctcggacccggaaacggtctcgatcgaggagagcctgtcaacagggcagacgaggtcgcgcgagagcacgacatctcgtacaacgagcagcttgaggcgggagacaacccctacctcaagtacaaccacgcggacgccgagtttcaggagaagctcgccgacgacacatccttcgggggaaacctcggaaaggcagtctttcaggccaagaaaagggttctcgaaccttttggcctggttgaagagggtgctaagacggcccctaccggaaagcggatagacgaccactttccaaaaagaaagaaggctcggaccgaagaggactccaagccttccacctcgtcagacgccgaagctggacccagcggatcccagcagctgcaaatcccagcccaaccagcctcaagtttgggagctgatacaatgtctgcgggaggtggcggcccattgggcgacaataaccaaggtgccgatggagtgggcaatgcctcgggagattggcattgcgattccacgtggatgggggacagagtcgtcaccaagtccacccgaacctgggtgctgcccagctacaacaaccaccagtaccgagagatcaaaagcggctccgtcgacggaagcaacgccaacgcctactttggatacagcaccccctgggggtactttgactttaaccgcttccacagccactggagcccccgagactggcaaagactcatcaacaactactggggcttcagaccccggtccctcagagtcaaaatcttcaacattcaagtcaaagaggtcacggtgcaggactccaccaccaccatcgccaacaacctcacctccaccgtccaagtgtttacggacgacgactaccagctgccctacgtcgtcggcaacgggaccgagggatgcctgccggccttccctccgcaggtctttacgctgccgcagtacggttacgcgacgctgaaccgcgacaacacagaaaatcccaccgagaggagcagcttcttctgcctagagtactttcccagcaagatgctgagaacgggcaacaactttgagtttacctacaactttgaggaggtgcccttccactccagcttcgctcccagtcagaacctgttcaagctggccaacccgctggtggaccagtacttgtaccgcttcgtgagcacaaataacactggcggagtccagttcaacaagaacctggccgggagatacgccaacacctacaaaaactggttcccggggcccatgggccgaacccagggctggaacctgggctccggggtcaaccgcgccagtgtcagcgccttcgccacgaccaataggatggagctcgagggcgcgagttaccaggtgcccccgcagccgaacggcatgaccaacaacctccagggcagcaacacctatgccctggagaacactatgatcttcaacagccagccggcgaacccgggcaccaccgccacgtacctcgagggcaacatgctcatcaccagcgagagcgagacgcagccggtgaaccgcgtggcgtacaacgtcggcgggcagatggccaccaacaaccagagctccaccactgcccccgcgaccggcacgtacaacctccaggaaatcgtgcccggcagcgtgtggatggagagggacgtgtacctccaaggacccatctgggccaagatcccagagacgggggcgcactttcacccctctccggccatgggcggattcggactcaaacacccaccgcccatgatgctcatcaagaacacgcctgtgcccggaaatatcaccagcttctcggacgtgcccgtcagcagcttcatcacccagtacagcaccgggcaggtcaccgtggagatggagtgggagctcaagaaggaaaactccaagaggtggaacccagagatccagtacacaaacaactacaacgacccccagtttgtggactttgccccggacagcaccggggaatacagaaccaccagacctatcggaacccgataccttacccgacccctt

SEQ ID NO: 92 - protein, 720 aa, Artificial Sequence
  Description of Artificial Sequence: Synthetic polypeptide
MSFVDHPPDWLEEVGEGLREFLGLEAGPPKPKPNQQHQDQARGLVLPGYNYLGPGNGLDRGEPVNRADEVAREHDISYNEQLEAGDNPYLKYNHADAEFQEKLADDTSFGGNLGKAVFQAKKRVLEPFGLVEEGAKTAPTGKRIDDHFPKRKKARTEEDSKPSTSSDAEAGPSGSQQLQIPAQPASSLGADTMSAGGGGPLGDNNQGADGVGNASGDWHCDSTWMGDRVVTKSTRTWVLPSYNNHQYREIKSGSVDGSNANAYFGYSTPWGYFDFNRFHSHWSPRDWQRLINNYWGFRPRSLRVKIFNIQVKEVTVQDSTTTIANNLTSTVQVFTDDDYQLPYVVGNGTEGCLPAFPPQVFTLPQYGYATLNRDNTENPTERSSFFCLEYFPSKMLRTGNNFEFTYNFEEVPFHSSFAPSQNLFKLANPLVDQYLYRFVSTNNTGGVQFNKNLAGRYANTYKNWFPGPMGRTQGWNLGSGVNRASVSAFATTNRMELEGASYQVPPQPNGMTNNLQGSNTYALENTMIFNSQPANPGTTATYLEGNMLITSESETQPVNRVAYNVGGQMATNNQSSTTAPATGTYNLQEIVPGSVWMERDVYLQGPIWAKIPETGAHFHPSPAMGGFGLKHPPPMMLIKNTPVPGNITSFSDVPVSSFITQYSTGQVTVEMEWELKKENSKRWNPEIQYTNNYNDPQFVDFAPDSTGEYRTTRPIGTRYL

SEQ ID NO: 93 - protein, 724 aa, Adeno-associated virus 5
MSFVDHPPDWLEEVGEGLREFLGLEAGPPKPKPNQQHQDQARGLVLPGYNYLGPGNGLDRGEPVNRADEVAREHDISYNEQLEAGDNPYLKYNHADAEFQEKLADDTSFGGNLGKAVFQAKKRVLEPFGLVEEGAKTAPTGKRIDDHFPKRKKARTEEDSKPSTSSDAEAGPSGSQQLQIPAQPASSLGADTMSAGGGGPLGDNNQGADGVGNASGDWHCDSTWMGDRVVTKSTRTWVLPSYNNHQYREIKSGSVDGSNANAYFGYSTPWGYFDFNRFHSHWSPRDWQRLINNYWGFRPRSLRVKIFNIQVKEVTVQDSTTTIANNLTSTVQVFTDDDYQLPYVVGNGTEGCLPAFPPQVFTLPQYGYATLNRDNTENPTERSSFFCLEYFPSKMLRTGNNFEFTYNFEEVPFHSSFAPSQNLFKLANPLVDQYLYRFVSTNNTGGVQFNKNLAGRYANTYKNWFPGPMGRTQGWNLGSGVNRASVSAFATTNRMELEGASYQVPPQPNGMTNNLQGSNTYALENTMIFNSQPANPGTTATYLEGNMLITSESETQPVNRVAYNVGGQMATNNQSSTTAPATGTYNLQEIVPGSVWMERDVYLQGPIWAKIPETGAHFHPSPAMGGFGLKHPPPMMLIKNTPVPGNITSFSDVPVSSFITQYSTGQVTVEMEWELKKENSKRWNPEIQYTNNYNDPQFVDFAPDSTGEYRTTRPIGTRYLTRPL

SEQ ID NO: 94 - DNA, 2175 bp, Adeno-associated virus 5
atgtcttttgttgatcaccctccagattggttggaagaagttggtgaaggtcttcgcgagtttttgggccttgaagcgggcccaccgaaaccaaaacccaatcagcagcatcaagatcaagcccgtggtcttgtgctgcctggttataactatctcggacccggaaacggtctcgatcgaggagagcctgtcaacagggcagacgaggtcgcgcgagagcacgacatctcgtacaacgagcagcttgaggcgggagacaacccctacctcaagtacaaccacgcggacgccgagtttcaggagaagctcgccgacgacacatccttcgggggaaacctcggaaaggcagtctttcaggccaagaaaagggttctcgaaccttttggcctggttgaagagggtgctaagacggcccctaccggaaagcggatagacgaccactttccaaaaagaaagaaggctcggaccgaagaggactccaagccttccacctcgtcagacgccgaagctggacccagcggatcccagcagctgcaaatcccagcccaaccagcctcaagtttgggagctgatacaatgtctgcgggaggtggcggcccattgggcgacaataaccaaggtgccgatggagtgggcaatgcctcgggagattggcattgcgattccacgtggatgggggacagagtcgtcaccaagtccacccgaacctgggtgctgcccagctacaacaaccaccagtaccgagagatcaaaagcggctccgtcgacggaagcaacgccaacgcctactttggatacagcaccccctgggggtactttgactttaaccgcttccacagccactggagcccccgagactggcaaagactcatcaacaactactggggcttcagaccccggtccctcagagtcaaaatcttcaacattcaagtcaaagaggtcacggtgcaggactccaccaccaccatcgccaacaacctcacctccaccgtccaagtgtttacggacgacgactaccagctgccctacgtcgtcggcaacgggaccgagggatgcctgccggccttccctccgcaggtctttacgctgccgcagtacggttacgcgacgctgaaccgcgacaacacagaaaatcccaccgagaggagcagcttcttctgcctagagtactttcccagcaagatgctgagaacgggcaacaactttgagtttacctacaactttgaggaggtgcccttccactccagcttcgctcccagtcagaacctgttcaagctggccaacccgctggtggaccagtacttgtaccgcttcgtgagcacaaataacactggcggagtccagttcaacaagaacctggccgggagatacgccaacacctacaaaaactggttcccggggcccatgggccgaacccagggctggaacctgggctccggggtcaaccgcgccagtgtcagcgccttcgccacgaccaataggatggagctcgagggcgcgagttaccaggtgcccccgcagccgaacggcatgaccaacaacctccagggcagcaacacctatgccctggagaacactatgatcttcaacagccagccggcgaacccgggcaccaccgccacgtacctcgagggcaacatgctcatcaccagcgagagcgagacgcagccggtgaaccgcgtggcgtacaacgtcggcgggcagatggccaccaacaaccagagctccaccactgcccccgcgaccggcacgtacaacctccaggaaatcgtgcccggcagcgtgtggatggagagggacgtgtacctccaaggacccatctgggccaagatcccagagacgggggcgcactttcacccctctccggccatgggcggattcggactcaaacacccaccgcccatgatgctcatcaagaacacgcctgtgcccggaaatatcaccagcttctcggacgtgcccgtcagcagcttcatcacccagtacagcaccgggcaggtcaccgtggagatggagtgggagctcaagaaggaaaactccaagaggtggaacccagagatccagtacacaaacaactacaacgacccccagtttgtggactttgccccggacagcaccggggaatacagaaccaccagacctatcggaacccgataccttacccgacccctttaa

SEQ ID NO: 95 - DNA, 2208 bp, Adeno-associated virus
atggctgccgatggttatcttccagattggctcgaggacaacctctctgagggcattcgcgagtggtgggacttgaaacctggagccccgaaacccaaagccaaccagcaaaagcaggacgacggccggggtctggtgcttcctggctacaagtacctcggacccttcaacggactcgacaagggggagcccgtcaacgcggcggatgcagcggccctcgagcacgacaaggcctacgaccagcagctcaaagcgggtgacaatccgtacctgcggtataaccacgccgacgccgagtttcaggagcgtctgcaagaagatacgtcttttgggggcaacctcgggcgagcagtcttccaggccaagaagagggttctcgaaccttttggtctggttgaggaaggtgctaagacggctcctggaaagaaacgtccggtagagcagtcgccacaagagccagactcctcctcgggcattggcaagacaggccagcagcccgctaaaaagagactcaattttggtcagactggcgactcagagtcagtccccgacccacaacctctcggagaacctccagcaacccccgctgctgtgggacctactacaatggcttcaggcggtggcgcaccaatggcagacaataacgaaggcgccgacggagtgggtaatgcctcaggaaattggcattgcgattccacatggctgggcgacagagtcatcaccaccagcacccgaacatgggccttgcccacctataacaaccacctctacaagcaaatctccagtgcttcaacgggggccagcaacgacaaccactacttcggctacagcaccccctgggggtattttgatttcaacagattccactgccatttctcaccacgtgactggcagcgactcatcaacaacaattggggattccggcccaagagactcaacttcaagctcttcaacatccaagtcaaggaggtcacgacgaatgatggcgtcacgaccatcgctaataaccttaccagcacggttcaagtcttctcggactcggagtaccagttgccgtacgtcctcggctctgcgcaccagggctgcctccctccgttcccggcggacgtgttcatgattccgcagtacggctacctaacgctcaacaatggcagccaggcagtgggacggtcatccttttactgcctggaatatttcccatcgcagatgctgagaacgggcaataactttaccttcagctacaccttcgaggacgtgcctttccacagcagctacgcgcacagccagagcctggaccggctgatgaatcctctcatcgaccagtacctgtattacctgaacagaactcagaatcagtccggaagtgcccaaaacaaggacttgctgtttagccgggggtctccagctggcatgtctgttcagcccaaaaactggctacctggaccctgttaccggcagcagcgcgtttctaaaacaaaaacagacaacaacaacagcaactttacctggactggtgcttcaaaatataaccttaatgggcgtgaatctataatcaaccctggcactgctatggcctcacacaaagacgacaaagacaagttctttcccatgagcggtgtcatgatttttggaaaggagagcgccggagcttcaaacactgcattggacaatgtcatgatcacagacgaagaggaaatcaaagccactaaccccgtggccaccgaaagatttgggactgtggcagtcaatctccagagcagcagcacagaccctgcgaccggagatgtgcatgttatgggagccttacctggaatggtgtggcaagacagagacgtatacctgcagggtcctatttgggccaaaattcctcacacggatggacactttcacccgtctcctctcatgggcggctttggacttaagcacccgcctcctcagatcctcatcaaaaacacgcctgttcctgcgaatcctccggcagagttttcggctacaaagtttgcttcattcatcacccagtattccacaggacaagtgagcgtggagattgaatgggagctgcagaaagaaaacagcaaacgctggaatcccgaagtgcagtatacatctaactatgcaaaatctgccaacgttgatttcactgtggacaacaatggactttatactgagcctcgccccattggcacccgttacctcacccgtcccctg

SEQ ID NO: 96 - protein, 736 aa, Adeno-associated virus 6
MAADGYLPDWLEDNLSEGIREWWDLKPGAPKPKANQQKQDDGRGLVLPGYKYLGPFNGLDKGEPVNAADAAALEHDKAYDQQLKAGDNPYLRYNHADAEFQERLQEDTSFGGNLGRAVFQAKKRVLEPFGLVEEGAKTAPGKKRPVEQSPQEPDSSSGIGKTGQQPAKKRLNFGQTGDSESVPDPQPLGEPPATPAAVGPTTMASGGGAPMADNNEGADGVGNASGNWHCDSTWLGDRVITTSTRTWALPTYNNHLYKQISSASTGASNDNHYFGYSTPWGYFDFNRFHCHFSPRDWQRLINNNWGFRPKRLNFKLFNIQVKEVTTNDGVTTIANNLTSTVQVFSDSEYQLPYVLGSAHQGCLPPFPADVFMIPQYGYLTLNNGSQAVGRSSFYCLEYFPSQMLRTGNNFTFSYTFEDVPFHSSYAHSQSLDRLMNPLIDQYLYYLNRTQNQSGSAQNKDLLFSRGSPAGMSVQPKNWLPGPCYRQQRVSKTKTDNNNSNFTWTGASKYNLNGRESIINPGTAMASHKDDKDKFFPMSGVMIFGKESAGASNTALDNVMITDEEEIKATNPVATERFGTVAVNLQSSSTDPATGDVHVMGALPGMVWQDRDVYLQGPIWAKIPHTDGHFHPSPLMGGFGLKHPPPQILIKNTPVPANPPAEFSATKFASFITQYSTGQVSVEIEWELQKENSKRWNPEVQYTSNYAKSANVDFTVDNNGLYTEPRPIGTRYLTRPL

SEQ ID NO: 97 - protein, 623 aa, Adeno-associated virus 6
MPGFYEIVIKVPSDLDEHLPGISDSFVNWVAEKEWELPPDSDMDLNLIEQAPLTVAEKLQRDFLVQWRRVSKAPEALFFVQFEKGESYFHLHILVETTGVKSMVLGRFLSQIRDKLVQTIYRGIEPTLPNWFAVTKTRNGAGGGNKVVDECYIPNYLLPKTQPELQWAWTNMEEYISACLNLAERKRLVAHDLTHVSQTQEQNKENLNPNSDAPVIRSKTSARYMELVGWLVDRGITSEKQWIQEDQASYISFNAASNSRSQIKAALDNAGKIMALTKSAPDYLVGPAPPADIKTNRIYRILELNGYDPAYAGSVFLGWAQKRFGKRNTIWLFGPATTGKTNIAEAIAHAVPFYGCVNWTNENFPFNDCVDKMVIWWEEGKMTAKVVESAKAILGGSKVRVDQKCKSSAQIDPTPVIVTSNTNMCAVIDGNSTTFEHQQPLQDRMFKFELTRRLEHDFGKVTKQEVKEFFRWAQDHVTEVAHEFYVRKGGANKRPAPDDADKSEPKRACPSVADPSTSDAEGAPVDFADRYQNKCSRHAGMLQMLFPCKTCERMNQNFNICFTHGTRDCSECFPGVSESQPVVRKRTYRKLCAIHHLLGRAPEIACSACDLVNVDLDDCVSEQ

SEQ ID NO: 98 - DNA, 4683 bp, Adeno-associated virus 6
ttggccactccctctctgcgcgctcgctcgctcactgaggccgggcgaccaaaggtcgcccgacgcccgggctttgcccgggcggcctcagtgagcgagcgagcgcgcagagagggagtggccaactccatcactaggggttcctggaggggtggagtcgtgacgtgaattacgtcatagggttagggaggtcctgtattagaggtcacgtgagtgttttgcgacattttgcgacaccatgtggtcacgctgggtatttaagcccgagtgagcacgcagggtctccattttgaagcgggaggtttgaacgcgcagcgccatgccggggttttacgagattgtgattaaggtccccagcgaccttgacgagcatctgcccggcatttctgacagctttgtgaactgggtggccgagaaggaatgggagttgccgccagattctgacatggatctgaatctgattgagcaggcacccctgaccgtggccgagaagctgcagcgcgacttcctggtccagtggcgccgcgtgagtaaggccccggaggccctcttctttgttcagttcgagaagggcgagtcctacttccacctccatattctggtggagaccacgggggtcaaatccatggtgctgggccgcttcctgagtcagattagggacaagctggtgcagaccatctaccgcgggatcgagccgaccctgcccaactggttcgcggtgaccaagacgcgtaatggcgccggaggggggaacaaggtggtggacgagtgctacatccccaactacctcctgcccaagactcagcccgagctgcagtgggcgtggactaacatggaggagtatataagcgcgtgtttaaacctggccgagcgcaaacggctcgtggcgcacgacctgacccacgtcagccagacccaggagcagaacaaggagaatctgaaccccaattctgacgcgcctgtcatccggtcaaaaacctccgcacgctacatggagctggtcgggtggctggtggaccggggcatcacctccgagaagcagtggatccaggaggaccaggcctcgtacatctccttcaacgccgcctccaactcgcggtcccagatcaaggccgctctggacaatgccggcaagatcatggcgctgaccaaatccgcgcccgactacctggtaggccccgctccgcccgccgacattaaaaccaaccgcatttaccgcatcctggagctgaacggctacgaccctgcctacgccggctccgtctttctcggctgggcccagaaaaggttcggaaaacgcaacaccatctggctgtttgggccggccaccacgggcaagaccaacatcgcggaagccatcgcccacgccgtgcccttctacggctgcgtcaactggaccaatgagaactttcccttcaacgattgcgtcgacaagatggtgatctggtgggaggagggcaagatgacggccaaggtcgtggagtccgccaaggccattctcggcggcagcaaggtgcgcgtggaccaaaagtgcaagtcgtccgcccagatcgatcccacccccgtgatcgtcacctccaacaccaacatgtgcgccgtgattgacgggaacagcaccaccttcgagcaccagcagccgttgcaggaccggatgttcaaatttgaactcacccgccgtctggagcatgactttggcaaggtgacaaagcaggaagtcaaagagttcttccgctgggcgcaggatcacgtgaccgaggtggcgcatgagttctacgtcagaaagggtggagccaacaagagacccgcccccgatgacgcggataaaagcgagcccaagcgggcctgcccctcagtcgcggatccatcgacgtcagacgcggaaggagctccggtggactttgccgacaggtaccaaaacaaatgttctcgtcacgcgggcatgcttcagatgctgtttccctgcaaaacatgcgagagaatgaatcagaatttcaacatttgcttcacgcacgggaccagagactgttcagaatgtttccccggcgtgtcagaatctcaaccggtcgtcagaaagaggacgtatcggaaactctgtgccattcatcatctgctggggcgggctcccgagattgcttgctcggcctgcgatctggtcaacgtggatctggatgactgtgtttctgagcaataaatgacttaaaccaggtatggctgccgatggttatcttccagattggctcgaggacaacctctctgagggcattcgcgagtggtgggacttgaaacctggagccccgaaacccaaagccaaccagcaaaagcaggacgacggccggggtctggtgcttcctggctacaagtacctcggacccttcaacggactcgacaagggggagcccgtcaacgcggcggatgcagcggccctcgagcacgacaaggcctacgaccagcagctcaaagcgggtgacaatccgtacctgcggtataaccacgccgacgccgagtttcaggagcgtctgcaagaagatacgtcttttgggggcaacctcgggcgagcagtcttccaggccaagaagagggttctcgaaccttttggtctggttgaggaaggtgctaagacggctcctggaaagaaacgtccggtagagcagtcgccacaagagccagactcctcctcgggcattggcaagacaggccagcagcccgctaaaaagagactcaattttggtcagactggcgactcagagtcagtccccgacccacaacctctcggagaacctccagcaacccccgctgctgtgggacctactacaatggcttcaggcggtggcgcaccaatggcagacaataacgaaggcgccgacggagtgggtaatgcctcaggaaattggcattgcgattccacatggctgggcgacagagtcatcaccaccagcacccgaacatgggccttgcccacctataacaaccacctctacaagcaaatctccagtgcttcaacgggggccagcaacgacaaccactacttcggctacagcaccccctgggggtattttgatttcaacagattccactgccatttctcaccacgtgactggcagcgactcatcaacaacaattggggattccggcccaagagactcaacttcaagctcttcaacatccaagtcaaggaggtcacgacgaatgatggcgtcacgaccatcgctaataaccttaccagcacggttcaagtcttctcggactcggagtaccagttgccgtacgtcctcggctctgcgcaccagggctgcctccctccgttcccggcggacgtgttcatgattccgcagtacggctacctaacgctcaacaatggcagccaggcagtgggacggtcatccttttactgcctggaatatttcccatcgcagatgctgagaacgggcaataactttaccttcagctacaccttcgaggacgtgcctttccacagcagctacgcgcacagccagagcctggaccggctgatgaatcctctcatcgaccagtacctgtattacctgaacagaactcagaatcagtccggaagtgcccaaaacaaggacttgctgtttagccgggggtctccagctggcatgtctgttcagcccaaaaactggctacctggaccctgttaccggcagcagcgcgtttctaaaacaaaaacagacaacaacaacagcaactttacctggactggtgcttcaaaatataaccttaatgggcgtgaatctataatcaaccctggcactgctatggcctcacacaaagacgacaaagacaagttctttcccatgagcggtgtcatgatttttggaaaggagagcgccggagcttcaaacactgcattggacaatgtcatgatcacagacgaagaggaaatcaaagccactaaccccgtggccaccgaaagatttgggactgtggcagtcaatctccagagcagcagcacagaccctgcgaccggagatgtgcatgttatgggagccttacctggaatggtgtggcaagacagagacgtatacctgcagggtcctatttgggccaaaattcctcacacggatggacactttcacccgtctcctctcatgggcggctttggacttaagcacccgcctcctcagatcctcatcaaaaacacgcctgttcctgcgaatcctccggcagagttttcggctacaaagtttgcttcattcatcacccagtattccacaggacaagtgagcgtggagattgaatgggagctgcagaaagaaaacagcaaacgctggaatcccgaagtgcagtatacatctaactatgcaaaatctgccaacgttgatttcactgtggacaacaatggactttatactgagcctcgccccattggcacccgttacctcacccgtcccctgtaattgtgtgttaatcaataaaccggttaattcgtgtcagttgaactttggtctcatgtcgttattatcttatctggtcaccatagcaaccggttacacattaactgcttagttgcgcttcgcgaatacccctagtgatggagttgcccactccctctatgcgcgctcgctcgctcggtggggccggcagagcagagctctgccgtctgcggacctttggtccgcaggccccaccgagcgagcgagcgcgcatagagggagtgggcaa

SEQ ID NO: 99 - DNA, 2211 bp, Adeno-associated virus
atggctgccgatggttatcttccagattggctcgaggacaacctctctgagggcattcgcgagtggtgggacttgaaacctggagccccgaaacccaaagccaaccagcaaaagcaggacgacggccggggtctggtgcttcctggctacaagtacctcggacccttcaacggactcgacaagggggagcccgtcaacgcggcggatgcagcggccctcgagcacgacaaggcctacgaccagcagctcaaagcgggtgacaatccgtacctgcggtataaccacgccgacgccgagtttcaggagcgtctgcaagaagatacgtcttttgggggcaacctcgggcgagcagtcttccaggccaagaagagggttctcgaaccttttggtctggttgaggaaggtgctaagacggctcctggaaagaaacgtccggtagagcagtcgccacaagagccagactcctcctcgggcattggcaagacaggccagcagcccgctaaaaagagactcaattttggtcagactggcgactcagagtcagtccccgacccacaacctctcggagaacctccagcaacccccgctgctgtgggacctactacaatggcttcaggcggtggcgcaccaatggcagacaataacgaaggcgccgacggagtgggtaatgcctcaggaaattggcattgcgattccacatggctgggcgacagagtcatcaccaccagcacccgaacatgggccttgcccacctataacaaccacctctacaagcaaatctccagtgcttcaacgggggccagcaacgacaaccactacttcggctacagcaccccctgggggtattttgatttcaacagattccactgccatttctcaccacgtgactggcagcgactcatcaacaacaattggggattccggcccaagagactcaacttcaagctcttcaacatccaagtcaaggaggtcacgacgaatgatggcgtcacgaccatcgctaataaccttaccagcacggttcaagtcttctcggactcggagtaccagttgccgtacgtcctcggctctgcgcaccagggctgcctccctccgttcccggcggacgtgttcatgattccgcagtacggctacctaacgctcaacaatggcagccaggcagtgggacggtcatccttttactgcctggaatatttcccatcgcagatgctgagaacgggcaataactttaccttcagctacaccttcgaggacgtgcctttccacagcagctacgcgcacagccagagcctggaccggctgatgaatcctctcatcgaccagtacctgtattacctgaacagaactcagaatcagtccggaagtgcccaaaacaaggacttgctgtttagccgggggtctccagctggcatgtctgttcagcccaaaaactggctacctggaccctgttaccggcagcagcgcgtttctaaaacaaaaacagacaacaacaacagcaactttacctggactggtgcttcaaaatataaccttaatgggcgtgaatctataatcaaccctggcactgctatggcctcacacaaagacgacaaagacaagttctttcccatgagcggtgtcatgatttttggaaaggagagcgccggagcttcaaacactgcattggacaatgtcatgatcacagacgaagaggaaatcaaagccactaaccccgtggccaccgaaagatttgggactgtggcagtcaatctccagagcagcagcacagaccctgcgaccggagatgtgcatgttatgggagccttacctggaatggtgtggcaagacagagacgtatacctgcagggtcctatttgggccaaaattcctcacacggatggacactttcacccgtctcctctcatgggcggctttggacttaagcacccgcctcctcagatcctcatcaaaaacacgcctgttcctgcgaatcctccggcagagttttcggctacaaagtttgcttcattcatcacccagtattccacaggacaagtgagcgtggagattgaatgggagctgcagaaagaaaacagcaaacgctggaatcccgaagtgcagtatacatctaactatgcaaaatctgccaacgttgatttcactgtggacaacaatggactttatactgagcctcgccccattggcacccgttacctcacccgtcccctgtaa

SEQ ID NO: 100 - protein, 736 aa, Adeno-associated virus; identical to SEQ ID NO: 96

SEQ ID NO: 101 - protein, 736 aa, Adeno-associated virus
MAADGYLPDWLEDNLSEGIREWWDLKPGAPKPKANQQKQDDGRGLVLPGYKYLGPFNGLDKGEPVNAADAAALEHDKAYDQQLKAGDNPYLRYNHADAEFQERLQEDTSFGGNLGRAVFQAKKRVLEPFGLVEEGAKTAPGKKRPVEQSPQEPDSSSGIGKTGQQPAKKRLNFGQTGDSESVPDPQPLGEPPATPAAVGPTTMASGGGAPMADNNEGADGVGNASGNWHCDSTWLGDRVITTSTRTWALPTYNNHLYKQISSASTGASNDNHYFGYSTPWGYFDFNRFHCHFSPRDWQRLINNNWGFRPKRLNFKLFNIQVKEVTTNDGVTTIANNLTSTVQVFSDSEYQLPYVLGSAHQGCLPPFPADVFMIPQYGYLTLNNGSQAVGRSSFYCLEYFPSQMLRTGNNFTFSYTFEDVPFHSSYAHSQSLDRLMNPLIDQYLYYLNRTQNQSGSAQNKDLLFSRGSPAGMSVQPKNWLPGPCYRQQRVSKTKTDNNNSNFTWTGASKYNLNGRESIINPGTAMASHKDDEDKFFPMSGVMIFGKESAGASNTALDNVMITDEEEIKATNPVATERFGTVAVNLQSSSTDPATGDVHVMGALPGMVWQDRDVYLQGPIWAKIPHTDGHFHPSPLMGGFGLKHPPPQILIKNTPVPANPPAEFSATKFASFITQYSTGQVSVEIEWELQKENSKRWNPEVQYTSNYAKSANVDFTVDNNGLYTEPRPIGTRYLTRPL

SEQ ID NO: 102 - protein, 736 aa, Adeno-associated virus
MAADGYLPDWLEDNLSEGIREWWDLKPGAPKPKANQQKQDDGRGLVLPGYKYLGPFNGLDKGEPVNAADAAALEHDKAYDQQLKAGDNPYLRYNHADAEFQERLQEDTSFGGNLGRAVFQAKKRVLEPLGLVEEGAKTAPGKKRPVEQSPQEPDSSSGIGKTGQQPAKKRLNFGQTGDSESVPDPQPLGEPPATPAAVGPTTMASGGGAPMADNNEGADGVGNASGNWHCDSTWLGDRVITTSTRTWALPTYNNHLYKQISSASTGASNDNHYFGYSTPWGYFDFNRFHCHFSPRDWQRLINNNWGFRPKRLNFKLFNIQVKEVTTNDGVTTIANNLTSTVQVFSDSEYQLPYVLGSAHQGCLPPFPADVFMIPQYGYLTLNNGSQAVGRSSFYCLEYFPSQMLRTGNNFTFSYTFEDVPFHSSYAHSQSLDRLMNPLIDQYLYYLNRTQNQSGSAQNKDLLFSRGSPAGMSVQPKNWLPGPCYRQQRVSKTKTDNNNSNFTWTGASKYNLNGRESIINPGTAMASHKDDEDKFFPMSGVMIFGKESAGASNTALDNVMITDEEEIKATNPVATERFGTVAVNLQSSSTDPATGDVHVMGALPGMVWQDRDVYLQGPIWAKIPHTDGHFHPSPLMGGFGLKHPPPQILIKNTPVPANPPAEFSATKFASFITQYSTGQVSVEIEWELQKENSKRWNPEVQYTSNYAKSANVDFTVDNNGLYTEPRPIGTRYLTRPL

SEQ ID NO: 103 - protein, 736 aa, Adeno-associated virus
MAADGYLPDWLEDNLSEGIREWWDLKPGAPKPKANQQKQDDGRGLVLPGYKYLGPFNGLDKGEPVNAADAAALEHDKAYDQQLKAGDNPYLRYNHADAEFQERLQEDTSFGGNLGRAVFQAKKRVLEPLGLVEEGAKTAPGKKRPVEQSPQEPDSSSGIGKTGQQPAKKRLNFGQTGDSESVPDPQPLGEPPATPAAVGPTTMASGGGAPMADNNEGADGVGNASGNWHCDSTWLGDRVITTSTRTWALPTYNNHLYKQISSASTGASNDNHYFGYSTPWGYFDFNRFHCHFSPRDWQRLINNNWGFRPKRLNFKLFNIQVKEVTTNDGVTTIANNLTSTVQVFSDSEYQLPYVLGSAHQGCLPPFPADVFMIPQYGYLTLNNGSQAVGRSSFYCLEYFPSQMLRTGNNFTFSYTFEDVPFHSSYAHSQSLDRLMNPLIDQYLYYLNRTQNQSGSAQNKDLLFSRGSPAGMSVQPKNWLPGPCYRQQRVSKTKTDNNNSNFTWTGASKYNLNGRESIINPGTAMASHKDDKDKFFPMSGVMIFGKESAGASNTALDNVMITDEEEIKATNPVATERFGTVAVNLQSSSTDPATGDVHVMGALPGMVWQDRDVYLQGPIWAKIPHTDGHFHPSPLMGGFGLKHPPPQILIKNTPVPANPPAEFSATKFASFITQYSTGQVSVEIEWELQKENSKRWNPEVQYTSNYAKSANVDFTVDNNGLYTEPRPIGTRYLTRPL

SEQ ID NO: 104 - DNA, 2214 bp, Adeno-associated virus
atggctgccgatggttatcttccagattggctcgaggacaacctctctgagggcattcgcgagtggtgggacctgaaacctggagccccgaaacccaaagccaaccagcaaaagcaggacaacggccggggtctggtgcttcctggctacaagtacctcggacccttcaacggactcgacaagggggagcccgtcaacgcggcggacgcagcggccctcgagcacgacaaggcctacgaccagcagctcaaagcgggtgacaatccgtacctgcggtataaccacgccgacgccgagtttcaggagcgtctgcaagaagatacgtcatttgggggcaacctcgggcgagcagtcttccaggccaagaagcgggttctcgaacctctcggtctggttgaggaaggcgctaagacggctcctgcaaagaagagaccggtagagccgtcacctcagcgttcccccgactcctccacgggcatcggcaagaaaggccagcagcccgccagaaagagactcaatttcggtcagactggcgactcagagtcagtccccgaccctcaacctctcggagaacctccagcagcgccctctagtgtgggatctggtacagtggctgcaggcggtggcgcaccaatggcagacaataacgaaggtgccgacggagtgggtaatgcctcaggaaattggcattgcgattccacatggctgggcgacagagtcattaccaccagcacccgaacctgggccctgcccacctacaacaaccacctctacaagcaaatctccagtgaaactgcaggtagtaccaacgacaacacctacttcggctacagcaccccctgggggtattttgactttaacagattccactgccacttctcaccacgtgactggcagcgactcatcaacaacaactggggattccggcccaagaagctgcggttcaagctcttcaacatccaggtcaaggaggtcacgacgaatgacggcgttacgaccatcgctaataaccttaccagcacgattcaggtattctcggactcggaataccagctgccgtacgtcctcggctctgcgcaccagggctgcctgcctccgttcccggcggacgtcttcatgattcctcagtacggctacctgactctcaacaatggcagtcagtctgtgggacgttcctccttctactgcctggagtacttcccctctcagatgctgagaacgggcaacaactttgagttcagctacagcttcgaggacgtgcctttccacagcagctacgcacacagccagagcctggaccggctgatgaatcccctcatcgaccagtacttgtactacctggccagaacacagagtaacccaggaggcacagctggcaatcgggaactgcagttttaccagggcgggccttcaactatggccgaacaagccaagaattggttacctggaccttgcttccggcaacaaagagtctccaaaacgctggatcaaaacaacaacagcaactttgcttggactggtgccaccaaatatcacctgaacggcagaaactcgttggttaatcccggcgtcgccatggcaactcacaaggacgacgaggaccgctttttcccatccagcggagtcctgatttttggaaaaactggagcaactaacaaaactacattggaaaatgtgttaatgacaaatgaagaagaaattcgtcctactaatcctgtagccacggaagaatacgggatagtcagcagcaacttacaagcggctaatactgcagcccagacacaagttgtcaacaaccagggagccttacctggcatggtctggcagaaccgggacgtgtacctgcagggtcccatctgggccaagattcctcacacggatggcaactttcacccgtctcctttgatgggcggctttggacttaaacatccgcctcctcagatcctgatcaagaacactcccgttcccgctaatcctccggaggtgtttactcctgccaagtttgcttcgttcatcacacagtacagcaccggacaagtcagcgtggaaatcgagtgggagctgcagaaggaaaacagcaagcgctggaacccggagattcagtacacctccaactttgaaaagcagactggtgtggactttgccgttgacagccagggtgtttactctgagcctcgccctattggcactcgttacctcacccgtaatctgtaa

SEQ ID NO: 105 - protein, 738 aa, Adeno-associated virus
MAADGYLPDWLEDNLSEGIREWWALKPGAPKPKANQQKQDDGRGLVLPGYKYLGPFNGLDKGEPVNAADAAALEHDKAYDQQLQAGDNPYLRYNHADAEFQERLQEDTSFGGNLGRAVFQAKKRVLEPLGLVEEGAKTAPGKKRPVEPSPQRSPDSSTGIGKKGQQPARKRLNFGQTGDSESVPDPQPLGEPPAAPSGVGPNTMAAGGGAPMADNNEGADGVGSSSGNWHCDSTWLGDRVITTSTRTWALPTYNNHLYKQISNGTSGGATNDNTYFGYSTPWGYFDFNRFHCHFSPRDWQRLINNNWGFRPKRLSFKLFNIQVKEVTQNEGTKTIANNLTSTIQVFTDSEYQLPYVLGSAHQGCLPPFPADVFMIPQYGYLTLNNGSQAVGRSSFYCLEYFPSQMLRTGNNFQFTYTFEDVPFHSSYAHSQSLDRLMNPLIDQYLYYLSRTQTTGGTANTQTLGFSQGGPNTMANQAKNWLPGPCYRQQRVSTTTGQNNNSNFAWTAGTKYHLNGRNSLANPGIAMATHKDDEERFFPSNGILIFGKQNAARDNADYSDVMLTSEEEIKTTNPVATEEYGIVADNLQQQNTAPQIGTVNSQGALPGMVWQNRDVYLQGPIWAKIPHTDGNFHPSPLMGGFGLKHPPPQILIKNTPVPADPPTTFNQSKLNSFITQYSTGQVSVEIEWELQKENSKRWNPEIQYTSNYYKSTSVDFAVNTEGVYSEPRPIGTRYLTRNL

SEQ ID NO: 106 - protein, 737 aa, Adeno-associated virus 7
MAADGYLPDWLEDNLSEGIREWWDLKPGAPKPKANQQKQDNGRGLVLPGYKYLGPFNGLDKGEPVNAADAAALEHDKAYDQQLKAGDNPYLRYNHADAEFQERLQEDTSFGGNLGRAVFQAKKRVLEPLGLVEEGAKTAPAKKRPVEPSPQRSPDSSTGIGKKGQQPARKRLNFGQTGDSESVPDPQPLGEPPAAPSSVGSGTVAAGGGAPMADNNEGADGVGNASGNWHCDSTWLGDRVITTSTRTWALPTYNNHLYKQISSETAGSTNDNTYFGYSTPWGYFDFNRFHCHFSPRDWQRLINNNWGFRPKKLRFKLFNIQVKEVTTNDGVTTIANNLTSTIQVFSDSEYQLPYVLGSAHQGCLPPFPADVFMIPQYGYLTLNNGSQSVGRSSFYCLEYFPSQMLRTGNNFEFSYSFEDVPFHSSYAHSQSLDRLMNPLIDQYLYYLARTQSNPGGTAGNRELQFYQGGPSTMAEQAKNWLPGPCFRQQRVSKTLDQNNNSNFAWTGATKYHLNGRNSLVNPGVAMATHKDDEDRFFPSSGVLIFGKTGATNKTTLENVLMTNEEEIRPTNPVATEEYGIVSSNLQAANTAAQTQVVNNQGALPGMVWQNRDVYLQGPIWAKIPHTDGNFHPSPLMGGFGLKHPPPQILIKNTPVPANPPEVFTPAKFASFITQYSTGQVSVEIEWELQKENSKRWNPEIQYTSNFEKQTGVDFAVDSQGVYSEPRPIGTRYLTRNL

SEQ ID NO: 107 - protein, 623 aa, Artificial Sequence
  Description of Artificial Sequence: Synthetic polypeptide
MPGFYEIVIKVPSDLDEHLPGISDSFVNWVAEKEWELPPDSDMDLNLIEQAPLTVAEKLQRDFLVQWRRVSKAPEALFFVQFEKGESYFHLHVLVETTGVKSMVLGRFLSQIREKLVQTIYRGVEPTLPNWFAVTKTRNGAGGGNKVVDECYIPNYLLPKTQPELQWAWTNMEEYISACLNLAERKRLVAQHLTHVSQTQEQNKENLNPNSDAPVIRSKTSARYMELVGWLVDRGITSEKQWIQEDQASYISFNAASNSRSQIKAALDNAGKIMALTKSAPDYLVGPSLPADIKTNRIYRILELNGYDPAYAGSVFLGWAQKKFGKRNTIWLFGPATTGKTNIAEAIAHAVPFYGCVNWTNENFPFNDCVDKMVIWWEEGKMTAKVVESAKAILGGSKVRVDQKCKSSAQIDPTPVIVTSNTNMCAVIDGNSTTFEHQQPLQDRMFKFELTRRLEHDFGKVTKQEVKEFFRWASDHVTEVAHEFYVRKGGASKRPAPDDADISEPKRACPSVADPSTSDAEGAPVDFADRYQNKCSRHAGMIQMLFPCKTCERMNQNFNICFTHGVRDCLECFPGVSESQPVVRKKTYRKLCAIHHLLGRAPEIACSACDLVNVDLDDCVSEQ

SEQ ID NO: 108 - DNA, 4721 bp, Adeno-associated virus 7
ttggccactccctctatgcgcgctcgctcgctcggtggggcctgcggaccaaaggtccgcagacggcagagctctgctctgccggccccaccgagcgagcgagcgcgcatagagggagtggccaactccatcactaggggtaccgcgaagcgcctcccacgctgccgcgtcagcgctgacgtaaatcacgtcataggggagtggtcctgtattagctgtcacgtgagtgcttttgcgacattttgcgacaccacgtggccatttgaggtatatatggccgagtgagcgagcaggatctccattttgaccgcgaaatttgaacgagcagcagccatgccgggtttctacgagatcgtgatcaaggtgccgagcgacctggacgagcacctgccgggcatttctgactcgtttgtgaactgggtggccgagaaggaatgggagctgcccccggattctgacatggatctgaatctgatcgagcaggcacccctgaccgtggccgagaagctgcagcgcgacttcctggtccaatggcgccgcgtgagtaaggccccggaggccctgttctttgttcagttcgagaagggcgagagctacttccaccttcacgttctggtggagaccacgggggtcaagtccatggtgctaggccgcttcctgagtcagattcgggagaagctggtccagaccatctaccgcggggtcgagcccacgctgcccaactggttcgcggtgaccaagacgcgtaatggcgccggcggggggaacaaggtggtggacgagtgctacatccccaactacctcctgcccaagacccagcccgagctgcagtgggcgtggactaacatggaggagtatataagcgcgtgtttgaacctggccgaacgcaaacggctcgtggcgcagcacctgacccacgtcagccagacgcaggagcagaacaaggagaatctgaaccccaattctgacgcgcccgtgatcaggtcaaaaacctccgcgcgctacatggagctggtcgggtggctggtggaccggggcatcacctccgagaagcagtggatccaggaggaccaggcctcgtacatctccttcaacgccgcctccaactcgcggtcccagatcaaggccgcgctggacaatgccggcaagatcatggcgctgaccaaatccgcgcccgactacctggtggggccctcgctgcccgcggacattaaaaccaaccgcatctaccgcatcctggagctgaacgggtacgatcctgcctacgccggctccgtctttctcggctgggcccagaaaaagttcgggaagcgcaacaccatctggctgtttgggcccgccaccaccggcaagaccaacattgcggaagccatcgcccacgccgtgcccttctacggctgcgtcaactggaccaatgagaactttcccttcaacgattgcgtcgacaagatggtgatctggtgggaggagggcaagatgacggccaaggtcgtggagtccgccaaggccattctcggcggcagcaaggtgcgcgtggaccaaaagtgcaagtcgtccgcccagatcgaccccacccccgtgatcgtcacctccaacaccaacatgtgcgccgtgattgacgggaacagcaccaccttcgagcaccagcagccgttgcaggaccggatgttcaaatttgaactcacccgccgtctggagcacgactttggcaaggtgacgaagcaggaagtcaaagagttcttccgctgggccagtgatcacgtgaccgaggtggcgcatgagttctacgtcagaaagggcggagccagcaaaagacccgcccccgatgacgcggatataagcgagcccaagcgggcctgcccctcagtcgcggatccatcgacgtcagacgcggaaggagctccggtggactttgccgacaggtaccaaaacaaatgttctcgtcacgcgggcatgattcagatgctgtttccctgcaaaacgtgcgagagaatgaatcagaatttcaacatttgcttcacacacggggtcagagactgtttagagtgtttccccggcgtgtcagaatctcaaccggtcgtcagaaaaaagacgtatcggaaactctgcgcgattcatcatctgctggggcgggcgcccgagattgcttgctcggcctgcgacctggtcaacgtggacctggacgactgcgtttctgagcaataaatgacttaaaccaggtatggctgccgatggttatcttccagattggctcgaggacaacctctctgagggcattcgcgagtggtgggacctgaaacctggagccccgaaacccaaagccaaccagcaaaagcaggacaacggccggggtctggtgcttcctggctacaagtacctcggacccttcaacggactcgacaagggggagcccgtcaacgcggcggacgcagcggccctcgagcacgacaaggcctacgaccagcagctcaaagcgggtgacaatccgtacctgcggtataaccacgccgacgccgagtttcaggagcgtctgcaagaagatacgtcatttgggggcaacctcgggcgagcagtcttccaggccaagaagcgggttctcgaacctctcggtctggttgaggaaggcgctaagacggctcctgcaaagaagagaccggtagagccgtcacctcagcgttcccccgactcctccacgggcatcggcaagaaaggccagcagcccgccagaaagagactcaatttcggtcagactggcgactcagagtcagtccccgaccctcaacctctcggagaacctccagcagcgccctctagtgtgggatctggtacagtggctgcaggcggtggcgcaccaatggcagacaataacgaaggtgccgacggagtgggtaatgcctcaggaaattggcattgcgattccacatggctgggcgacagagtcattaccaccagcacccgaacctgggccctgcccacctacaacaaccacctctacaagcaaatctccagtgaaactgcaggtagtaccaacgacaacacctacttcggctacagcaccccctgggggtattttgactttaacagattccactgccacttctcaccacgtgactggcagcgactcatcaacaacaactggggattccggcccaagaagctgcggttcaagctcttcaacatccaggtcaaggaggtcacgacgaatgacggcgttacgaccatcgctaataaccttaccagcacgattcaggtattctcggactcggaataccagctgccgtacgtcctcggctctgcgcaccagggctgcctgcctccgttcccggcggacgtcttcatgattcctcagtacggctacctgactctcaacaatggcagtcagtctgtgggacgttcctccttctactgcctggagtacttcccctctcagatgctgagaacgggcaacaactttgagttcagctacagcttcgaggacgtgcctttccacagcagctacgcacacagccagagcctggaccggctgatgaatcccctcatcgaccagtacttgtactacctggccagaacacagagtaacccaggaggcacagctggcaatcgggaactgcagttttaccagggcgggccttcaactatggccgaacaagccaagaattggttacctggaccttgcttccggcaacaaagagtctccaaaacgctggatcaaaacaacaacagcaactttgcttggactggtgccaccaaatatcacctgaacggcagaaactcgttggttaatcccggcgtcgccatggcaactcacaaggacgacgaggaccgctttttcccatccagcggagtcctgatttttggaaaaactggagcaactaacaaaactacattggaaaatgtgttaatgacaaatgaagaagaaattcgtcctactaatcctgtagccacggaagaatacgggatagtcagcagcaacttacaagcggctaatactgcagcccagacacaagttgtcaacaaccagggagccttacctggcatggtctggcagaaccgggacgtgtacctgcagggtcccatctgggccaagattcctcacacggatggcaactttcacccgtctcctttgatgggcggctttggacttaaacatccgcctcctcagatcctgatcaagaacactcccgttcccgctaatcctccggaggtgtttactcctgccaagtttgcttcgttcatcacacagtacagcaccggacaagtcagcgtggaaatcgagtgggagctgcagaaggaaaacagcaagcgctggaacccggagattcagtacacctccaactttgaaaagcagactggtgtggactttgccgttgacagccagggtgtttactctgagcctcgccctattggcactcgttacctcacccgtaatctgtaattgcatgttaatcaataaaccggttgattcgtttcagttgaactttggtctcctgtgcttcttatcttatcggtttccatagcaactggttacacattaactgcttgggtgcgcttcacgataagaacactgacgtcaccgcggtacccctagtgatggagttggccactccctctatgcgcgctcgctcgctcggtggggcctgcggaccaaaggtccgcagacggcagagctctgctctgccggccccaccgagcgagcgagcgcgcatagagggagtggccaa

SEQ ID NO: 109 - DNA, 2214 bp, Adeno-associated virus; identical to SEQ ID NO: 104

SEQ ID NO: 110 - protein, 737 aa, Adeno-associated virus; identical to SEQ ID NO: 106

SEQ ID NO: 111 - DNA, 2217 bp, Adeno-associated virus
atggctgccgatggttatcttccagattggctcgaggacaacctctctgagggcattcgcgagtggtgggcgctgaaacctggagccccgaagcccaaagccaaccagcaaaagcaggacgacggccggggtctggtgcttcctggctacaagtacctcggacccttcaacggactcgacaagggggagcccgtcaacgcggcggacgcagcggccctcgagcacgacaaggcctacgaccagcagctgcaggcgggtgacaatccgtacctgcggtataaccacgccgacgccgagtttcaggagcgtctgcaagaagatacgtcttttgggggcaacctcgggcgagcagtcttccaggccaagaagcgggttctcgaacctctcggtctggttgaggaaggcgctaagacggctcctggaaagaagagaccggtagagccatcaccccagcgttctccagactcctctacgggcatcggcaagaaaggccaacagcccgccagaaaaagactcaattttggtcagactggcgactcagagtcagttccagaccctcaacctctcggagaacctccagcagcgccctctggtgtgggacctaatacaatggctgcaggcggtggcgcaccaatggcagacaataacgaaggcgccgacggagtgggtagttcctcgggaaattggcattgcgattccacatggctgggcgacagagtcatcaccaccagcacccgaacctgggccctgcccacctacaacaaccacctctacaagcaaatctccaacgggacatcgggaggagccaccaacgacaacacctacttcggctacagcaccccctgggggtattttgactttaacagattccactgccacttttcaccacgtgactggcagcgactcatcaacaacaactggggattccggcccaagagactcagcttcaagctcttcaacatccaggtcaaggaggtcacgcagaatgaaggcaccaagaccatcgccaataacctcaccagcaccatccaggtgtttacggactcggagtaccagctgccgtacgttctcggctctgcccaccagggctgcctgcctccgttcccggcggacgtgttcatgattccccagtacggctacctaacactcaacaacggtagtcaggccgtgggacgctcctccttctactgcctggaatactttccttcgcagatgctgagaaccggcaacaacttccagtttacttacaccttcgaggacgtgcctttccacagcagctacgcccacagccagagcttggaccggctgatgaatcctctgattgaccagtacctgtactacttgtctcggactcaaacaacaggaggcacggcaaatacgcagactctgggcttcagccaaggtgggcctaatacaatggccaatcaggcaaagaactggctgccaggaccctgttaccgccaacaacgcgtctcaacgacaaccgggcaaaacaacaatagcaactttgcctggactgctgggaccaaataccatctgaatggaagaaattcattggctaatcctggcatcgctatggcaacacacaaagacgacgaggagcgtttttttcccagtaacgggatcctgatttttggcaaacaaaatgctgccagagacaatgcggattacagcgatgtcatgctcaccagcgaggaagaaatcaaaaccactaaccctgtggctacagaggaatacggtatcgtggcagataacttgcagcagcaaaacacggctcctcaaattggaactgtcaacagccagggggccttacccggtatggtctggcagaaccgggacgtgtacctgcagggtcccatctgggccaagattcctcacacggacggcaacttccacccgtctccgctgatgggcggctttggcctgaaacatcctccgcctcagatcctgatcaagaacacgcctgtacctgcggatcctccgaccaccttcaaccagtcaaagctgaactctttcatcacgcaatacagcaccggacaggtcagcgtggaaattgaatgggagctgcagaaggaaaacagcaagcgctggaaccccgagatccagtacacctccaactactacaaatctacaagtgtggactttgctgttaatacagaaggcgtgtactctgaaccccgccccattggcacccgttacctcacccgtaatctgtaa

SEQ ID NO: 112 - DNA, 2213 bp, Adeno-associated virus 8
atggctgccgatggttatcttccagattggctcgaggacaacctctctgagggcattcgcgagtggtgggcgctgaaacctggagccccgaagcccaaagccaaccagcaaaagcaggacgacggccggggtctggtgcttcctggctacaagtacctcggacccttcaacggactcgacaagggggagcccgtcaacgcggcggacgcagcggccctcgagcacgacaaggcctacgaccagcagctgcaggcgggtgacaatccgtacctgcggtataaccacgccgacgccgagtttcaggagcgtctgcaagaagatacgtcttttgggggcaacctcgggcgagcagtcttccaggccaagaagcgggttctcgaacctctcggtctggttgaggaaggcgctaagacggctcctggaaagaagagaccggtagagccatcaccccagcgttctccagactcctctacgggcatcggcaagaaaggccaacagcccgccagaaaaagactcaattttggtcagactggcgactcagagtcagttccagaccctcaacctctcggagaacctccagcagcgccctctggtgtgggacctaatacaatggctgcaggcggtggcgcaccaatggcagacaataacgaaggcgccgacggagtgggtagttcctcgggaaattggcattgcgattccacatggctgggcgacagagtcatcaccaccagcacccgaacctgggccctgcccacctacaacaaccacctctacaagcaaatctccaacgggacatcgggaggagccaccaacgacaacacctacttcggctacagcaccccctgggggtattttgactttaacagattccactgccacttttcaccacgtgactggcagcgactcatcaacaacaactggggattccggcccaagagactcagcttcaagctcttcaacatccaggtcaaggaggtcacgcagaatgaaggcaccaagaccatcgccaataacctcaccagcaccatccaggtgtttacggactcggagtaccagctgccgtacgttctcggctctgcccaccagggctgcctgcctccgttcccggcggacgtgttcatgattccccagtacggctacctaacactcaacaacggtagtcaggccgtgggacgctcctccttctactgcctggaatactttccttcgcagatgctgagaaccggcaacaacttccagtttacttacaccttcgaggacgtgcctttccacagcagctacgcccacagccagagcttggaccggctgatgaatcctctgattgaccagtacctgtactacttgtctcggactcaaacaacaggaggcacggcaaatacgcagactctgggcttcagccaaggtgggcctaatacaatggccaatcaggcaaagaactggctgccaggaccctgttaccgccaacaacgcgtctcaacgacaaccgggcaaaacaacaatagcaactttgcctggactgctgggaccaaataccatctgaatggaagaaattcattggctaatcctggcatcgctatggcaacacacaaagacgacgaggagcgtttttttcccagtaacgggatcctgatttttggcaaacaaaatgctgccagagacaatgcggattacagcgatgtcatgctcaccagcgaggaagaaatcaaaaccactaaccctgtggctacagaggaatacggtatcgtggcagataacttgcagcagcaaaacacggctcctcaaattggaactgtcaacagccagggggccttacccggtatggtctggcagaaccgggacgtgtacctgcagggtcccatctgggccaagattcctcacacggacggcaacttccacccgtctccgctgatgggcggctttggcctgaaacatcctccgcctcagatcctgatcaagaacacgcctgtacctgcggatcctccgaccaccttcaaccagtcaaagctgaactctttcatcacgcaatacagcaccggacaggtcagcgtggaaattgaatgggagctgcagaaggaaaacagcaagcgctggaaccccgagatccagtacacctccaactactacaaatctacaagtgtggactttgctgtaatacagaaggcgtgtactctgaaccccgccccattggcacccgttacctcacccgtaatctg

SEQ ID NO: 113 - DNA, 4393 bp, Adeno-associated virus 8
cagagagggagtggccaactccatcactaggggtagcgcgaagcgcctcccacgctgccgcgtcagcgctgacgtaaattacgtcataggggagtggtcctgtattagctgtcacgtgagtgcttttgcggcattttgcgacaccacgtggccatttgaggtatatatggccgagtgagcgagcaggatctccattttgaccgcgaaatttgaacgagcagcagccatgccgggcttctacgagatcgtgatcaaggtgccgagcgacctggacgagcacctgccgggcatttctgactcgtttgtgaactgggtggccgagaaggaatgggagctgcccccggattctgacatggatcggaatctgatcgagcaggcacccctgaccgtggccgagaagctgcagcgcgacttcctggtccaatggcgccgcgtgagtaaggccccggaggccctcttctttgttcagttcgagaagggcgagagctactttcacctgcacgttctggtcgagaccacgggggtcaagtccatggtgctaggccgcttcctgagtcagattcgggaaaagcttggtccagaccatctacccgcggggtcgagccccaccttgcccaactggttcgcggtgaccaaagacgcggtaatggcgccggcgggggggaacaaggtggtggacgagtgctacatccccaactacctcctgcccaagactcagcccgagctgcagtgggcgtggactaacatggaggagtatataagcgcgtgcttgaacctggccgagcgcaaacggctcgtggcgcagcacctgacccacgtcagccagacgcaggagcagaacaaggagaatctgaaccccaattctgacgcgcccgtgatcaggtcaaaaacctccgcgcgctatatggagctggtcgggtggctggtggaccggggcatcacctccgagaagcagtggatccaggaggaccaggcctcgtacatctccttcaacgccgcctccaactcgcggtcccagatcaaggccgcgctggacaatgccggcaagatcatggcgctgaccaaatccgcgcccgactacctggtggggccctcgctgcccgcggacattacccagaaccgcatctaccgcatcctcgctctcaacggctacgaccctgcctacgccggctccgtctttctcggctgggctcagaaaaagttcgggaaacgcaacaccatctggctgtttggacccgccaccaccggcaagaccaacattgcggaagccatcgcccacgccgtgcccttctacggctgcgtcaactggaccaatgagaactttcccttcaatgattgcgtcgacaagatggtgatctggtgggaggagggcaagatgacggccaaggtcgtggagtccgccaaggccattctcggcggcagcaaggtgcgcgtggaccaaaagtgcaagtcgtccgcccagatcgaccccacccccgtgatcgtcacctccaacaccaacatgtgcgccgtgattgacgggaacagcaccaccttcgagcaccagcagcctctccaggaccggatgtttaagttcgaactcacccgccgtctggagcacgactttggcaaggtgacaaagcaggaagtcaaagagttcttccgctgggccagtgatcacgtgaccgaggtggcgcatgagttttacgtcagaaagggcggagccagcaaaagacccgcccccgatgacgcggataaaagcgagcccaagcgggcctgcccctcagtcgcggatccatcgacgtcagacgcggaaggagctccggtggactttgccgacaggtaccaaaacaaatgttctcgtcacgcgggcatgcttcagatgctgtttccctgcaaaacgtgcgagagaatgaatcagaatttcaacatttgcttcacacacggggtcagagactgctcagagtgtttccccggcgtgtcagaatctcaaccggtcgtcagaaagaggacgtatcggaaactctgtgcgattcatcatctgctggggcgggctcccgagattgcttgctcggcctgcgatctggtcaacgtggacctggatgactgtgtttctgagcaataaatgacttaaaccaggtatggctgccgatggttatcttccagattggctcgaggacaacctctctgagggcattcgcgagtggtgggcgctgaaacctggagccccgaagcccaaagccaaccagcaaaagcaggacgacggccggggtctggtgcttcctggctacaagtacctcggacccttcaacggactcgacaagggggagcccgtcaacgcggcggacgcagcggccctcgagcacgacaaggcctacgaccagcagctgcaggcgggtgacaatccgtacctgcggtataaccacgccgacgccgagtttcaggagcgtctgcaagaagatacgtcttttgggggcaacctcgggcgagcagtcttccaggccaagaagcgggttctcgaacctctcggtctggttgaggaaggcgctaagacggctcctggaaagaagagaccggtagagccatcaccccagcgttctccagactcctctacgggcatcggcaagaaaggccaacagcccgccagaaaaagactcaattttggtcagactggcgactcagagtcagttccagaccctcaacctctcggagaacctccagcagcgccctctggtgtgggacctaatacaatggctgcaggcggtggcgcaccaatggcagacaataacgaaggcgccgacggagtgggtagttcctcgggaaattggcattgcgattccacatggctgggcgacagagtcatcaccaccagcacccgaacctgggccctgcccacctacaacaaccacctctacaagcaaatctccaacgggacatcgggaggagccaccaacgacaacacctacttcggctacagcaccccctgggggtattttgactttaacagattccactgccacttttcaccacgtgactggcagcgactcatcaacaacaactggggattccggcccaagagactcagcttcaagctcttcaacatccaggtcaaggaggtcacgcagaatgaaggcaccaagaccatcgccaataacctcaccagcaccatccaggtgtttacggactcggagtaccagctgccgtacgttctcggctctgcccaccagggctgcctgcctccgttcccggcggacgtgttcatgattccccagtacggctacctaacactcaacaacggtagtcaggccgtgggacgctcctccttctactgcctggaatactttccttcgcagatgctgagaaccggcaacaacttccagtttacttacaccttcgaggacgtgcctttccacagcagctacgcccacagccagagcttggaccggctgatgaatcctctgattgaccagtacctgtactacttgtctcggactcaaacaacaggaggcacggcaaatacgcagactctgggcttcagccaaggtgggcctaatacaatggccaatcaggcaaagaactggctgccaggaccctgttaccgccaacaacgcgtctcaacgacaaccgggcaaaacaacaatagcaactttgcctggactgctgggaccaaataccatctgaatggaagaaattcattggctaatcctggcatcgctatggcaacacacaaagacgacgaggagcgtttttttcccagtaacgggatcctgatttttggcaaacaaaatgctgccagagacaatgcggattacagcgatgtcatgctcaccagcgaggaagaaatcaaaaccactaaccctgtggctacagaggaatacggtatcgtggcagataacttgcagcagcaaaacacggctcctcaaattggaactgtcaacagccagggggccttacccggtatggtctggcagaaccgggacgtgtacctgcagggtcccatctgggccaagattcctcacacggacggcaacttccacccgtctccgctgatgggcggctttggcctgaaacatcctccgcctcagatcctgatcaagaacacgcctgtacctgcggatcctccgaccaccttcaaccagtcaaagctgaactctttcatcacgcaatacagcaccggacaggtcagcgtggaaattgaatgggagctgcagaaggaaaacagcaagcgctggaaccccgagatccagtacacctccaactactacaaatctacaagtgtggactttgctgttaatacagaaggcgtgtactctgaaccccgccccattggcacccgttacctcacccgtaatctgtaattgcctgttaatcaataaaccggttgattcgtttcagttgaactttggtctctgcg

SEQ ID NO: 114 - protein, 738 aa, Adeno-associated virus 8; identical to SEQ ID NO: 105

SEQ ID NO: 115 - protein, 737 aa, Adeno-associated virus 8
MAADGYLPDWLEDNLSEGIREWWALKPGAPKPKANQQKQDDGRGLVLPGYKYLGPFNGLDKGEPVNAADAAALEHDKAYDQQLQAGDNPYLRYNHADAEFQERLQEDTSFGGNLGRAVFQAKKRVLEPLGLVEEGAKTAPGKKRPVEPSPQRSPDSSTGIGKKGQQPARKRLNFGQTGDSESVPDPQPLGEPPAAPSGVGPNTMAAGGGAPMADNNEGADGVGSSSGNWHCDSTWLGDRVITTSTRTWALPTYNNHLYKQISNGTSGGATNDNTYFGYSTPWGYFDFNRFHCHFSPRDWQRLINNNWGFRPKRLSFKLFNIQVKEVTQNEGTKTIANNLTSTIQVFTDSEYQLPYVLGSAHQGCLPPFPADVFMIPQYGYLTLNNGSQAVGRSSFYCLEYFPSQMLRTGNNFQFTYTFEDVPFHSSYAHSQSLDRLMNPLIDQYLYYLSRTQTTGGTANTQTLGFSQGGPNTMANQAKNWLPGPCYRQQRVSTTTGQNNNSNFAWTAGTKYHLNGRNSLANPGIAMATHKDDEERFFPSNGILIFGKQNAARDNADYSDVMLTSEEEIKTTNPVATEEYGIVADNLQQQNTAPQIGTVNSQGALPGMVWQNRDVYLQGPIWAKIPHTDGNFHPSPLMGGFGLKHPPPQILIKNTPVPADPPTTFNQSKLNSFITQYSTGQVSVEIEWELQKENSKRWNPEIQYTSNYYKSTSVDFAVIQKACTLNPAPLAPVTSPVI

SEQ ID NO: 116 - DNA, 2217 bp, Adeno-associated virus; identical to SEQ ID NO: 111

SEQ ID NO: 117 - DNA, 2214 bp, Artificial Sequence
  Description of Artificial Sequence: Synthetic polynucleotide
atggctgccgatggttatcttccagattggctcgaggacaacctctctgagggcattcgcgagtggtgggcgctgaaacctggagccccgaagcccaaagccaaccagcaaaagcaggacgacggccggggtctggtgcttcctggctacaagtacctcggacccttcaacggactcgacaagggggagcccgtcaacgcggcggacgcagcggccctcgagcacgacaaggcctacgaccagcagctgcaggcgggtgacaatccgtacctgcggtataaccacgccgacgccgagtttcaggagcgtctgcaagaagatacgtcttttgggggcaacctcgggcgagcagtcttccaggccaagaagcgggttctcgaacctctcggtctggttgaggaaggcgctaagacggctcctggaaagaagagaccggtagagccatcaccccagcgttctccagactcctctacgggcatcggcaagaaaggccaacagcccgccagaaaaagactcaattttggtcagactggcgactcagagtcagttccagaccctcaacctctcggagaacctccagcagcgccctctggtgtgggacctaatacaatggctgcaggcggtggcgcaccaatggcagacaataacgaaggcgccgacggagtgggtagttcctcgggaaattggcattgcgattccacatggctgggcgacagagtcatcaccaccagcacccgaacctgggccctgcccacctacaacaaccacctctacaagcaaatctccaacgggacatcgggaggagccaccaacgacaacacctacttcggctacagcaccccctgggggtattttgactttaacagattccactgccacttttcaccacgtgactggcagcgactcatcaacaacaactggggattccggcccaagagactcagcttcaagctcttcaacatccaggtcaaggaggtcacgcagaatgaaggcaccaagaccatcgccaataacctcaccagcaccatccaggtgtttacggactcggagtaccagctgccgtacgttctcggctctgcccaccagggctgcctgcctccgttcccggcggacgtgttcatgattccccagtacggctacctaacactcaacaacggtagtcaggccgtgggacgctcctccttctactgcctggaatactttccttcgcagatgctgagaaccggcaacaacttccagtttacttacaccttcgaggacgtgcctttccacagcagctacgcccacagccagagcttggaccggctgatgaatcctctgattgaccagtacctgtactacttgtctcggactcaaacaacaggaggcacggcaaatacgcagactctgggcttcagccaaggtgggcctaatacaatggccaatcaggcaaagaactggctgccaggaccctgttaccgccaacaacgcgtctcaacgacaaccgggcaaaacaacaatagcaactttgcctggactgctgggaccaaataccatctgaatggaagaaattcattggctaatcctggcatcgctatggcaacacacaaagacgacgaggagcgtttttttcccagtaacgggatcctgatttttggcaaacaaaatgctgccagagacaatgcggattacagcgatgtcatgctcaccagcgaggaagaaatcaaaaccactaaccctgtggctacagaggaatacggtatcgtggcagataacttgcctgagcggacggcgatgagtcttccgggaactgtcaacagccagggggccttacccggtatggtctggcagaaccgggacgtgtacctgcagggtcccatctgggccaagattcctcacacggacggcaacttccacccgtctccgctgatgggcggctttggcctgaaacatcctccgcctcagatcctgatcaagaacacgcctgtacctgcggatcctccgaccaccttcaaccagtcaaagctgaactctttcatcacgcaatacagcaccggacaggtcagcgtggaaattgaatgggagctgcagaaggaaaacagcaagcgctggaaccccgagatccagtacacctccaactactacaaatctacaagtgtggactttgctgttaatacagaaggcgtgtactctgaaccccgccccattggcacccgttacctcacccgtaatctg

SEQ ID NO: 118 - protein, 738 aa, Artificial Sequence
  Description of Artificial Sequence: Synthetic polypeptide
MAADGYLPDWLEDNLSEGIREWWALKPGAPKPKANQQKQDDGRGLVLPGYKYLGPFNGLDKGEPVNAADAAALEHDKAYDQQLQAGDNPYLRYNHADAEFQERLQEDTSFGGNLGRAVFQAKKRVLEPLGLVEEGAKTAPGKKRPVEPSPQRSPDSSTGIGKKGQQPARKRLNFGQTGDSESVPDPQPLGEPPAAPSGVGPNTMAAGGGAPMADNNEGADGVGSSSGNWHCDSTWLGDRVITTSTRTWALPTYNNHLYKQISNGTSGGATNDNTYFGYSTPWGYFDFNRFHCHFSPRDWQRLINNNWGFRPKRLSFKLFNIQVKEVTQNEGTKTIANNLTSTIQVFTDSEYQLPYVLGSAHQGCLPPFPADVFMIPQYGYLTLNNGSQAVGRSSFYCLEYFPSQMLRTGNNFQFTYTFEDVPFHSSYAHSQSLDRLMNPLIDQYLYYLSRTQTTGGTANTQTLGFSQGGPNTMANQAKNWLPGPCYRQQRVSTTTGQNNNSNFAWTAGTKYHLNGRNSLANPGIAMATHKDDEERFFPSNGILIFGKQNAARDNADYSDVMLTSEEEIKTTNPVATEEYGIVADNLPERTAMSLPGTVNSQGALPGMVWQNRDVYLQGPIWAKIPHTDGNFHPSPLMGGFGLKHPPPQILIKNTPVPADPPTTFNQSKLNSFITQYSTGQVSVEIEWELQKENSKRWNPEIQYTSNYYKSTSVDFAVNTEGVYSEPRPIGTRYLTRNL

SEQ ID NO: 119 - DNA, 2214 bp, Artificial Sequence
  Description of Artificial Sequence: Synthetic polynucleotide
atggctgccgatggttatcttccagattggctcgaggacaacctctctgagggcattcgcgagtggtgggcgctgaaacctggagccccgaagcccaaagccaaccagcaaaagcaggacgacggccggggtctggtgcttcctggctacaagtacctcggacccttcaacggactcgacaagggggagcccgtcaacgcggcggacgcagcggccctcgagcacgacaaggcctacgaccagcagctgcaggcgggtgacaatccgtacctgcggtataaccacgccgacgccgagtttcaggagcgtctgcaagaagatacgtcttttgggggcaacctcgggcgagcagtcttccaggccaagaagcgggttctcgaacctctcggtctggttgaggaaggcgctaagacggctcctggaaagaagagaccggtagagccatcaccccagcgttctccagactcctctacgggcatcggcaagaaaggccaacagcccgccagaaaaagactcaattttggtcagactggcgactcagagtcagttccagaccctcaacctctcggagaacctccagcagcgccctctggtgtgggacctaatacaatggctgcaggcggtggcgcaccaatggcagacaataacgaaggcgccgacggagtgggtagttcctcgggaaattggcattgcgattccacatggctgggcgacagagtcatcaccaccagcacccgaacctgggccctgcccacctacaacaaccacctctacaagcaaatctccaacgggacatcgggaggagccaccaacgacaacacctacttcggctacagcaccccctgggggtattttgactttaacagattccactgccacttttcaccacgtgactggcagcgactcatcaacaacaactggggattccggcccaagagactcagcttcaagctcttcaacatccaggtcaaggaggtcacgcagaatgaaggcaccaagaccatcgccaataacctcaccagcaccatccaggtgtttacggactcggagtaccagctgccgtacgttctcggctctgcccaccagggctgcctgcctccgttcccggcggacgtgttcatgattccccagtacggctacctaacactcaacaacggtagtcaggccgtgggacgctcctccttctactgcctggaatactttccttcgcagatgctgagaaccggcaacaacttccagtttacttacaccttcgaggacgtgcctttccacagcagctacgcccacagccagagcttggaccggctgatgaatcctctgattgaccagtacctgtactacttgtctcggactcaaacaacaggaggcacggcaaatacgcagactctgggcttcagccaaggtgggcctaatacaatggccaatcaggcaaagaactggctgccaggaccctgttaccgccaacaacgcgtctcaacgacaaccgggcaaaacaacaatagcaactttgcctggactgctgggaccaaataccatctgaatggaagaaattcattggctaatcctggcatcgctatggcaacacacaaagacgacgaggagcgtttttttcccagtaacgggatcctgatttttggcaaacaaaatgctgccagagacaatgcggattacagcgatgtcatgctcaccagcgaggaagaaatcaaaaccactaaccctgtggctacagaggaatacggtatcgtggcagataacttgagttttagtcgtgcggttctttgtgatggaactgtcaacagccagggggccttacccggtatggtctggcagaaccgggacgtgtacctgcagggtcccatctgggccaagattcctcacacggacggcaacttccacccgtctccgctgatgggcggctttggcctgaaacatcctccgcctcagatcctgatcaagaacacgcctgtacctgcggatcctccgaccaccttcaaccagtcaaagctgaactctttcatcacgcaatacagcaccggacaggtcagcgtggaaattgaatgggagctgcagaaggaaaacagcaagcgctggaaccccgagatccagtacacctccaactactacaaatctacaagtgtggactttgctgttaatacagaaggcgtgtactctgaaccccgccccattggcacccgttacctcacccgtaatctg

SEQ ID NO: 120 - protein, 738 aa, Artificial Sequence
  Description of Artificial Sequence: Synthetic polypeptide
MAADGYLPDWLEDNLSEGIREWWALKPGAPKPKANQQKQDDGRGLVLPGYKYLGPFNGLDKGEPVNAADAAALEHDKAYDQQLQAGDNPYLRYNHADAEFQERLQEDTSFGGNLGRAVFQAKKRVLEPLGLVEEGAKTAPGKKRPVEPSPQRSPDSSTGIGKKGQQPARKRLNFGQTGDSESVPDPQPLGEPPAAPSGVGPNTMAAGGGAPMADNNEGADGVGSSSGNWHCDSTWLGDRVITTSTRTWALPTYNNHLYKQISNGTSGGATNDNTYFGYSTPWGYFDFNRFHCHFSPRDWQRLINNNWGFRPKRLSFKLFNIQVKEVTQNEGTKTIANNLTSTIQVFTDSEYQLPYVLGSAHQGCLPPFPADVFMIPQYGYLTLNNGSQAVGRSSFYCLEYFPSQMLRTGNNFQFTYTFEDVPFHSSYAHSQSLDRLMNPLIDQYLYYLSRTQTTGGTANTQTLGFSQGGPNTMANQAKNWLPGPCYRQQRVSTTTGQNNNSNFAWTAGTKYHLNGRNSLANPGIAMATHKDDEERFFPSNGILIFGKQNAARDNADYSDVMLTSEEEIKTTNPVATEEYGIVADNLSFSRAVLCDGTVNSQGALPGMVWQNRDVYLQGPIWAKIPHTDGNFHPSPLMGGFGLKHPPPQILIKNTPVPADPPTTFNQSKLNSFITQYSTGQVSVEIEWELQKENSKRWNPEIQYTSNYYKSTSVDFAVNTEGVYSEPRPIGTRYLTRNL

SEQ ID NO: 121 - DNA, 4385 bp, Adeno-associated virus 9
cagagagggagtggccaactccatcactaggggtaatcgcgaagcgcctcccacgctgccgcgtcagcgctgacgtagattacgtcataggggagtggtcctgtattagctgtcacgtgagtgcttttgcgacattttgcgacaccacatggccatttgaggtatatatggccgagtgagcgagcaggatctccattttgaccgcgaaatttgaacgagcagcagccatgccgggcttctacgagattgtgatcaaggtgccgagcgacctggacgagcacctgccgggcatttctgactcttttgtgaactgggtggccgagaaggaatgggagctgcccccggattctgacatggatcggaatctgatcgagcaggcacccctgaccgtggccgagaagctgcagcgcgacttcctggtccaatggcgccgcgtgagtaaggccccggaggccctcttctttgttcagttcgagaagggcgagagctactttcacctgcacgttctggtcgagaccacgggggtcaagtccatggtgctaggccgcttcctgagtcagattcgggagaagctggtccagaccatctaccgcgggatcgagccgaccctgcccaactggttcgcggtgaccaagacgcgtaatggcgccggcggggggaacaaggtggtggacgagtgctacatccccaactacctcctgcccaagactcagcccgagctgcagtgggcgtggactaacatggaggagtatataagcgcgtgcttgaacctggccgagcgcaaacggctcgtggcgcagcacctgacccacgtcagccagacgcaggagcagaacaaggagaatctgaaccccaattctgacgcgcccgtgatcaggtcaaaaacctccgcgcgctacatggagctggtcgggtggctggtggaccggggcatcacctccgagaagcagtggatccaggaggaccaggcctcgtacatctccttcaacgccgcctccaactcgcggtcccagatcaaggccgcgctggacaatgccggcaagatcatggcgctgaccaaatccgcgcccgactacctggtaggcccttcacttccggtggacattacgcagaaccgcatctaccgcatcctgcagctcaacggctacgaccctgcctacgccggctccgtctttctcggctgggcacaaaagaagttcgggaaacgcaacaccatctggctgtttgggccggccaccacgggaaagaccaacatcgcagaagccattgcccacgccgtgcccttctacggctgcgtcaactggaccaatgagaactttcccttcaacgattgcgtcgacaagatggtgatctggtgggaggagggcaagatgacggccaaggtcgtggagtccgccaaggccattctcggcggcagcaaggtgcgcgtggaccaaaagtgcaagtcgtccgcccagatcgaccccactcccgtgatcgtcacctccaacaccaacatgtgcgccgtgattgacgggaacagcaccaccttcgagcaccagcagcctctccaggaccggatgtttaagttcgaactcacccgccgtctggagcacgactttggcaaggtgacaaagcaggaagtcaaagagttcttccgctgggccagtgatcacgtgaccgaggtggcgcatgagttttacgtcagaaagggcggagccagcaaaagacccgcccccgatgacgcggataaaagcgagcccaagcgggcctgcccctcagtcgcggatccatcgacgtcagacgcggaaggagctccggtggactttgccgacaggtaccaaaacaaatgttctcgtcacgcgggcatgcttcagatgctgcttccctgcaaaacgtgcgagagaatgaatcagaatttcaacatttgcttcacacacggggtcagagactgctcagagtgtttccccggcgtgtcagaatctcaaccggtcgtcagaaagaggacgtatcggaaactctgtgcgattcatcatctgctggggcgggctcccgagattgcttgctcggcctgcgatctggtcaacgtggacctggatgactgtgtttctgagcaataaatgacttaaaccaggtatggctgccgatggttatcttccagattggctcgaggacaacctctctgagggcattcgcgagtggtgggcgctgaaacctggagccccgaagcccaaagccaaccagcaaaagcaggacgacggccggggtctggtgcttcctggctacaagtacctcggacccttcaacggactcgacaagggggagcccgtcaacgcggcggacgcagcggccctcgagcacggcaaggcctacgaccagcagctgcaggcgggtgacaatccgtacctgcggtataaccacgccgacgccgagtttcaggagcgtctgcaagaagatacgtcttttgggggcaacctcgggcgagcagtcttccaggccaagaagcgggttctcgaacctctcggtctggttgaggaaggcgctaagacggctcctggaaagaagagaccggtagagccatcaccccagcgttctccagactcctctacgggcatcggcaagaaaggccaacagcccgccagaaaaagactcaattttggtcagactggcgactcagagtcagttccagaccctcaacctctcggagaacctccagcagcgccctctggtgtgggacctaatacaatggctgcaggcggtggcgcaccaatggcagacaataacgaaggcgccgacggagtgggtaattcctcgggaaattggcattgcgattccacatggctgggggacagagtcatcaccaccagcacccgaacctgggcattgcccacctacaacaaccacctctacaagcaaatctccaatggaacatcgggaggaagcaccaacgacaacacctactttggctacagcaccccctgggggtattttgacttcaacagattccactgccacttctcaccacgtgactggcagcgactcatcaacaacaactggggattccggccaaagagactcaacttcaagctgttcaacatccaggtcaaggaggttacgacgaacgaaggcaccaagaccatcgccaataaccttaccagcaccgtccaggtctttacggactcggagtaccagctaccgtacgtcctaggctctgcccaccaaggatgcctgccaccgtttcctgcagacgtcttcatggttcctcagtacggctacctgacgctcaacaatggaagtcaagcgttaggacgttcttctttctactgtctggaatacttcccttctcagatgctgagaaccggcaacaactttcagttcagctacactttcgaggacgtgcctttccacagcagctacgcacacagccagagtctagatcgactgatgaaccccctcatcgaccagtacctatactacctggtcagaacacagacaactggaactgggggaactcaaactttggcattcagccaagcaggccctagctcaatggccaatcaggctagaaactgggtacccgggccttgctaccgtcagcagcgcgtctccacaaccaccaaccaaaataacaacagcaactttgcgtggacgggagctgctaaattcaagctgaacgggagagactcgctaatgaatcctggcgtggctatggcatcgcacaaagacgacgaggaccgcttctttccatcaagtggcgttctcatatttggcaagcaaggagccgggaacgatggagtcgactacagccaggtgctgattacagatgaggaagaaattaaagccaccaaccctgtagccacagaggaatacggagcagtggccatcaacaaccaggccgctaacacgcaggcgcaaactggacttgtgcataaccagggagttattcctggtatggtctggcagaaccgggacgtgtacctgcagggccctatttgggctaaaatacctcacacagatggcaactttcacccgtctcctctgatgggtggatttggactgaaacacccacctccacagattctaattaaaaatacaccagtgccggcagatcctcctcttaccttcaatcaagccaagctgaactctttcatcacgcagtacagcacgggacaagtcagcgtggaaatcgagtgggagctgcagaaagaaaacagcaagcgctggaatccagagatccagtatacttcaaactactacaaatctacaaatgtggactttgctgtcaataccaaaggtgtttactctgagcctcgccccattggtactcgttacctcacccgtaatttgtaattgcctgttaatcaataaaccggttaattcgtttcagttgaactttggtctctgcg

SEQ ID NO: 122 - DNA, 4382 bp, Adeno-associated virus 9
cagagagggagtggccaactccatcactaggggtaatcgcgaagcgcctcccacgctgccgcgtcagcgctgacgtagattacgtcataggggagtggtcctgtattagctgtcacgtgagtgcttttgcgacattttgcgacaccacatggccatttgaggtatatatggccgagtgagcgagcaggatctccattttgaccgcgaaatttgaacgagcagcagccatgccgggcttctacgagattgtgatcaaggtgccgagcgacctggacgagcacctgccgggcatttctgactcttttgtgaactgggtggccgagaaggaatgggagctgcccccggattctgacatggatcggaatctgatcgagcaggcacccctgaccgtggccgagaagctgtagcgcgacttcctggtccaatggcgccgcgtgagtaaggccccggaggccctcttctttgttcagttcgagaagggcgagagctactttcacctgcacgttctggtcgagaccacgggggtcaagtccatggtgctaggccgcttcctgagtcagattcgggagaagctggtccagaccatctaccgcgggatcgagccgaccctgcccaactggttcgcggtgaccaagacgcgtaatggcgccggcggggggaacaaggtggtggacgagtgctacatccccaactacctcctgcccaagactcagcccgagctgcagtgggcgtggactaacatggaggagtatataagcgcgtgcttgaacctggccgagcgcaaacggctcgtggcgcagcacctgacccacgtcagccagacgcaggagcagaacaaggagaatctgaaccccaattctgacgcgcccgtgatcaggtcaaaaacctccgcgcgctacatggagctggtcgggtggctggtggaccggggcatcacctccgagaagcagtggatccaggaggaccaggcctcgtacatctccttcaacgccgcctccaactcgcggtcccagatcaaggccgcgctggacaatgccggcaagatcatggcgctgaccaaatccgcgcccgactacctggtaggcccttcacttccggtggacattacgcagaaccgcatctaccgcatcctgcagctcaacggctacgaccctgcctacgccggctccgtctttctcggctgggcacaaaagaagttcgggaaacgcaacaccatctggctgtttgggccggccaccacgggaaagaccaacatcgcagaagccattgcccacgccgtgcccttctacggctgcgtcaactggaccaatgagaactttcccttcaacgattgcgtcgacaagatggtgatctggtgggaggagggcaagatgacggccaaggtcgtggagtccgccaaggccattctcggcggcagcaaggtgcgcgtggaccaaaagtgcaagtcgtccgcccagatcgaccccactcccgtgatcgtcacctccaacaccaacatgtgcgccgtgattgacgggaacagcaccaccttcgagcaccagcagcctctccaggaccggatgtttaagttcgaactcacccgccgtctggagcacgactttggcaaggtgacaaagcaggaagtcaaagagttcttccgctgggccagtgatcacgtgaccgaggtggcgcatgagttttacgtcagaaagggcggagccagcaaaagacccgcccccgatgacgcggataaaagcgagcccaagcgggcctgcccctcagtcgcggatccatcgacgtcagacgcggaaggagctccggtggactttgccgacaggtaccaaaacaaatgttctcgtcacgcgggcatgcttcagatgctgcttccctgcaaaacgtgcgagagaatgaatcagaatttcaacatttgcttcacacacggggtcagagactgctcagagtgtttccccggcgtgtcagaatctcaaccggtcgtcagaaagaggacgtatcggaaactctgtgcgattcatcatctgctggggcgggctcccgagattgcttgctcggcctgcgatctggtcaacgtggacctggatgactgtgtttctgagcaataaatgacttaaaccaggtatggctgccgatggttatcttccagattggctcgaggacaacctctctgagggcattcgcgagtggtgggacctgaaacctggagccccgaaacccaaagccaaccagcaaaagcaggacgacggccggggtctggtgcttcctggctacaagtacctcggacccttcaacggactcgacaagggggagcccgtcaacgcggcggacgcagcggccctcgagcacgacaaggcctacgaccagcagctcaaagcgggtgacaatccgtacctgcggtataaccacgccgacgccgagtttcaggagcgtctgcaagaagatacgtcttttgggggcaacctcgggcgagcagtcttccaggccaagaagcgggttctcgaacctctcggtctggttgaggaaggcgctaagacggctcctggaaagaagagaccggtagagcagtcaccccaagaaccagactcatcctcgggcatcggcaaatcaggccagcagcccgctaaaaagagactcaattttggtcagactggcgactcagagtcagtccccgacccacaacctctcggagaacctccagaagccccctcaggtctgggacctaatacaatggcttcaggcggtggcgctccaatggcagacaataacgaaggcgccgacggagtgggtaattcctcgggaaattggcattgcgattccacatggctgggggacagagtcatcaccaccagcacccgaacctgggcattgcccacctacaacaaccacctctacaagcaaatctccaatggaacatcgggaggaagcaccaacgacaacacctactttggctacagcaccccctgggggtattttgacttcaacagattccactgccacttctcaccacgtgactggcagcgactcatcaacaacaactggggattccggccaaagagactcaacttcaagctgttcaacatccaggtcaaggaggttacgacgaacgaaggcaccaagaccatcgccaataaccttaccagcaccgtccaggtctttacggactcggagtaccagctaccgtacgtcctaggctctgcccaccaaggatgcctgccaccgtttcctgcagacgtcttcatggttcctcagtacggctacctgacgctcaacaatggaagtcaagcgttaggacgttcttctttctactgtctggaatacttcccttctcagatgctgagaaccggcaacaactttcagttcagctacactttcgaggacgtgcctttccacagcagctacgcacacagccagagtctagatcgactgatgaaccccctcatcgaccagtacctatactacctggtcagaacacagacaactggaactgggggaactcaaactttggcattcagccaagcaggccctagctcaatggccaatcaggctagaaactgggtacccgggccttgctaccgtcagcagcgcgtctccacaaccaccaaccaaaataacaacagcaactttgcgtggacgggagctgctaaattcaagctgaacgggagagactcgctaatgaatcctggcgtggctatggcatcgcacaaagacgacgaggaccgcttctttccatcaagtggcgttctcatatttggcaagcaaggagccgggaacgatggagtcgactacagccaggtgctgattacagatgaggaagaaattaaagccaccaaccctgtagccacagaggaatacggagcagtggccatcaacaaccaggccgctaacacgcaggcgcaaactggacttgtgcataaccagggagttattcctggtatggtctggcagaaccgggacgtgtacctgcagggccctatttgggctaaaatacctcacacagatggcaactttcacccgtctcctctgatgggtggatttggactgaaacacccacctccacagattctaattaaaaatacaccagtgccggcagatcctcctcttaccttcaatcaagccaagctgaactctttcatcacgcagtacagcacgggacaagtcagcgtggaaatcgagtgggagctgcagaaagaaaacagcaagcgctggaatccagagatccagtatacttcaaactactacaaatctacaaatgtggactttgctgtcaataccgaaggtgtttactctgagcctcgccccattggtactcgttacctcacccgtaatttgtaattgcctgttaatcaataaaccggttaattcgtttcagttgaactttggtctctgcg

SEQ ID NO: 123 - protein, 736 aa, Adeno-associated virus 9
MAADGYLPDWLEDNLSEGIREWWALKPGAPQPKANQQHQDNARGLVLPGYKYLGPGNGLDKGEPVNAADAAALEHDKAYDQQLKAGDNPYLKYNHADAEFQERLKEDTSFGGNLGRAVFQAKKRLLEPLGLVEEAAKTAPGKKRPVEQSPQEPDSSAGIGKSGAQPAKKRLNFGQTGDTESVPDPQPIGEPPAAPSGVGSLTMASGGGAPVADNNEGADGVGSSSGNWHCDSQWLGDRVITTSTRTWALPTYNNHLYKQISNSTSGGSSNDNAYFGYSTPWGYFDFNRFHCHFSPRDWQRLINNNWGFRPKRLNFKLFNIQVKEVTDNNGVKTIANNLTSTVQVFTDSDYQLPYVLGSAHEGCLPPFPADVFMIPQYGYLTLNDGSQAVGRSSFYCLEYFPSQMLRTGNNFQFSYEFENVPFHSSYAHSQSLDRLMNPLIDQYLYYLSKTINGSGQNQQTLKFSVAGPSNMAVQGRNYIPGPSYRQQRVSTTVTQNNNSEFAWPGASSWALNGRNSLMNPGPAMASHKEGEDRFFPLSGSLIFGKQGTGRDNVDADKVMITNEEEIKTTNPVATESYGQVATNHQSAQAQAQTGWVQNQGILPGMVWQDRDVYLQGPIWAKIPHTDGNFHPSPLMGGFGMKHPPPQILIKNTPVPADPPTAFNKDKLNSFITQYSTGQVSVEIEWELQKENSKRWNPEIQYTSNYYKSNNVEFAVNTEGVYSEPRPIGTRYLTRNL

SEQ ID NO: 124 - protein, 736 aa, Artificial Sequence
  Description of Artificial Sequence: Synthetic polypeptide
MAADGYLPDWLEDNLSEGIREWWDLKPGAPKPKANQQKQDDGRGLVLPGYKYLGPFNGLDKGEPVNAADAAALEHDKAYDQQLKAGDNPYLRYNHADAEFQERLQEDTSFGGNLGRAVFQAKKRVLEPLGLVEEGAKTAPGKKRPVEQSPQEPDSSSGIGKSGQQPAKKRLNFGQTGDSESVPDPQPLGEPPEAPSGLGPNTMASGGGAPMADNNEGADGVGNSSGNWHCDSTWLGDRVITTSTRTWALPTYNNHLYKQISNGTSGGSTNDNTYFGYSTPWGYFDFNRFHCHFSPRDWQRLINNNWGFRPKRLNFKLFNIQVKEVTTNEGTKTIANNLTSTVQVFTDSEYQLPYVLGSAHQGCLPPFPADVFMVPQYGYLTLNNGSQALGRSSFYCLEYFPSQMLRTGNNFQFSYTFEDVPFHSSYAHSQSLDRLMNPLIDQYLYYLVRTQTTGTGGTQTLAFSQAGPSSMANQARNWVPGPCYRQQRVSTTTNQNNNSNFAWTGAAKFKLNGRDSLMNPGVAMASHKDDEDRFFPSSGVLIFGKQGAGNDGVDYSQVLITDEEEIKATNPVATEEYGAVAINNQAANTQAQTGLVHNQGVIPGMVWQNRDVYLQGPIWAKIPHTDGNFHPSPLMGGFGLKHPPPQILIKNTPVPADPPLTFNQAKLNSFITQYSTGQVSVEIEWELQKENSKRWNPEIQYTSNYYKSTNVDFAVNTEGVYSEPRPIGTRYLTRNL

SEQ ID NO: 125 - protein, 623 aa, Artificial Sequence
  Description of Artificial Sequence: Synthetic polypeptide
MPGFYEIVIKVPSDLDEHLPGISDSFVNWVAEKEWELPPDSDMDRNLIEQAPLTVAEKLQRDFLVQWRRVSKAPEALFFVQFEKGESYFHLHVLVETTGVKSMVLGRFLSQIREKLVQTIYRGIEPTLPNWFAVTKTRNGAGGGNKVVDECYIPNYLLPKTQPELQWAWTNMEEYISACLNLAERKRLVAQHLTHVSQTQEQNKENLNPNSDAPVIRSKTSARYMELVGWLVDRGITSEKQWIQEDQASYISFNAASNSRSQIKAALDNAGKIMALTKSAPDYLVGPSLPVDITQNRIYRILQLNGYDPAYAGSVFLGWAQKKFGKRNTIWLFGPATTGKTNIAEAIAHAVPFYGCVNWTNENFPFNDCVDKMVIWWEEGKMTAKVVESAKAILGGSKVRVDQKCKSSAQIDPTPVIVTSNTNMCAVIDGNSTTFEHQQPLQDRMFKFELTRRLEHDFGKVTKQEVKEFFRWASDHVTEVAHEFYVRKGGASKRPAPDDADKSEPKRACPSVADPSTSDAEGAPVDFADRYQNKCSRHAGMLQMLLPCKTCERMNQNFNICFTHGVRDCSECFPGVSESQPVVRKRTYRKLCAIHHLLGRAPEIACSACDLVNVDLDDCVSEQ

SEQ ID NO: 126 - DNA, 2211 bp, Adeno-associated virus
atggctgccgatggttatcttccagattggctcgaggacaaccttagtgaaggaattcgcgagtggtgggctttgaaacctggagcccctcaacccaaggcaaatcaacaacatcaagacaacgctcgaggtcttgtgcttccgggttacaaataccttggacccggcaacggactcgacaagggggagccggtcaacgcagcagacgcggcggccctcgagcacgacaaggcctacgaccagcagctcaaggccggagacaacccgtacctcaagtacaaccacgccgacgccgagttccaggagcggctcaaagaagatacgtcttttgggggcaacctcgggcgagcagtcttccaggccaaaaagaggcttcttgaacctcttggtctggttgaggaagcggctaagacggctcctggaaagaagaggcctgtagagcagtctcctcaggaaccggactcctccgcgggtattggcaaatcgggtgcacagcccgctaaaaagagactcaatttcggtcagactggcgacacagagtcagtcccagaccctcaaccaatcggagaacctcccgcagccccctcaggtgtgggatctcttacaatggcttcaggtggtggcgcaccagtggcagacaataacgaaggtgccgatggagtgggtagttcctcgggaaattggcattgcgattcccaatggctgggggacagagtcatcaccaccagcacccgaacctgggccctgcccacctacaacaatcacctctacaagcaaatctccaacagcacatctggaggatcttcaaatgacaacgcctacttcggctacagcaccccctgggggtattttgacttcaacagattccactgccacttctcaccacgtgactggcagcgactcatcaacaacaactggggattccggcctaagcgactcaacttcaagctcttcaacattcaggtcaaagaggttacggacaacaatggagtcaagaccatcgccaataaccttaccagcacggtccaggtcttcacggactcagactatcagctcccgtacgtgctcgggtcggctcacgagggctgcctcccgccgttcccagcggacgttttcatgattcctcagtacgggtatctgacgcttaatgatggaagccaggccgtgggtcgttcgtccttttactgcctggaatatttcccgtcgcaaatgctaagaacgggtaacaacttccagttcagctacgagtttgagaacgtacctttccatagcagctacgctcacagccaaagcctggaccgactaatgaatccactcatcgaccaatacttgtactatctctcaaagactattaacggttctggacagaatcaacaaacgctaaaattcagtgtggccggacccagcaacatggctgtccagggaagaaactacatacctggacccagctaccgacaacaacgtgtctcaaccactgtgactcaaaacaacaacagcgaatttgcttggcctggagcttcttcttgggctctcaatggacgtaatagcttgatgaatcctggacctgctatggccagccacaaagaaggagaggaccgtttctttcctttgtctggatctttaatttttggcaaacaaggaactggaagagacaacgtggatgcggacaaagtcatgataaccaacgaagaagaaattaaaactactaacccggtagcaacggagtcctatggacaagtggccacaaaccaccagagtgcccaagcacaggcgcagaccggctgggttcaaaaccaaggaatacttccgggtatggtttggcaggacagagatgtgtacctgcaaggacccatttgggccaaaattcctcacacggacggcaactttcacccttctccgctgatgggagggtttggaatgaagcacccgcctcctcagatcctcatcaaaaacacacctgtacctgcggatcctccaacggccttcaacaaggacaagctgaactctttcatcacccagtattctactggccaagtcagcgtggagatcgagtgggagctgcagaaggaaaacagcaagcgctggaacccggagatccagtacacttccaactattacaagtctaataatgttgaatttgctgttaatactgaaggtgtatatagtgaaccccgccccattggcaccagatacctgactcgtaatctgtaa

SEQ ID NO: 127 - protein, 736 aa, Adeno-associated virus; identical to SEQ ID NO: 123

SEQ ID NO: 128 - DNA, 2460 bp, Adeno-associated virus
ggtaattcctccggaaattggcattgcgattccacatggctgggcgaccgagtcattaccaccagcacccggacttgggccctgcccacctacaacaaccacctctacaagcaaatctccagccaatcgggtgccaccaacgacaaccactacttcggctacagcaccccttgggggtattttgatttcaacagattccactgccatttctcaccacgtgactggcagcgactcatcaacaacaactggggattcatggctgccgatggttatcttccagattggctcgaggacactctctctgaaggaatcagacagtggtggaagctcaaacctggcccaccaccgccgaaacctaaccaacaacaccgggacgacagtaggggtcttgtgcttcctgggtacaagtacctcggacccttcaacggactcgacaaaggagagccggtcaacgaggcagacgccgcggccctcgagcacgacaaagcctacgaccaccagctcaagcaaggggacaacccgtacctcaaatacaaccacgcggacgctgaatttcaggagcgtcttcaagaagatacgtctttcgggggcaacctcgggcgagcagtcttccaggccaaaaagagggtactcgagcctcttggtctggttgaggaagctgttaagacggctcctggaaaaaagagacctatagagcagtctcctgcagaaccggactcttcctcgggcatcggcaaatcaggccagcagcccgctaagaaaagactcaattttggtcagactggcgacacagagtcagtcccagaccctcaaccaatcggagaaccccccgcagccccctctggtgtgggatctaatacaatggcttcaggcggtggggcaccaatggcagacaataacgaaggcgccgacggagtgggtaattcctcgggaaattggcattgcgattccacatggatgggcgacagagttatcaccaccagcacaagaacctgggccctccccacctacaataatcacctctacaagcaaatctccagcgaatcgggagccaccaacgacaaccactacttcggctacagcaccccctgggggtattttgactttaacagattccactgtcacttctcaccacgtgactggcagcgactcatcaacaacaactggggatttagacccaagaaactcaatttcaagctcttcaacatccaagtcaaggaggtcacgcagaatgatggaaccacgaccatcgccaataaccttaccagcacggtgcaggtcttcacagactctgagtaccagctgccctacgtcctcggttcggctcaccagggctgccttccgccgttcccagcagacgtcttcatgattcctcagtacggctacttgactctgaacaatggcagccaagcggtaggacgttcttcattctactgtctagagtattttccctctcagatgctgaggacgggaaacaacttcaccttcagctacacttttgaagacgtgcctttccacagcagctacgcgcacagccagagtctggatcggctgatgaatcctctcattgaccagtacctgtattacctgagcaaaactcagggtacaagtggaacaacgcagcaatcgagactgcagttcagccaagctgggcctagctccatggctcagcaggccaaaaactggctaccgggacccagctaccgacagcagcgaatgtctaagacggctaatgacaacaacaacagtgaatttgcttggactgcagccaccaaatattacctgaatggaagaaattctctggtcaatcccgggcccccaatggccagtcacaaggacgatgaggaaaagtatttccccatgcacggaaatctcatctttggaaaacaaggcacaggaactaccaatgtggacattgaatcagtgcttattacagacgaagaagaaatcagaacaactaatcctgtggctacagaacaatacggacaggttgccaccaaccatcagagtcagaacaccacagcttcctatggaagtgtggacagccagggaatcttacctggaatggtgtggcaggaccgcgatgtctatcttcaaggtcccatttgggccaaaactcctcacacggacggacactttcatccttctccgctcatgggaggctttggactgaaacaccctcctccccagatcctgatcaaaaacacacctgtgccagcgaatcccgcgaccactttcactcctggaaagtttgcttcgttcattacccagtattccaccggacaggtcagcgtggaaatagagtgggagctgcagaaagaaaacagcaaacgctggaacccagaaattcagtacacctccaactacaacaagtcggtgaatgtggagtttaccgtggacgcaaacggtgtttattctgaaccccgccctattggcactcgttaccttacccggaacttg

SEQ ID NO: 129 - DNA, 3123 bp, Adeno-associated virus
gaattcgccctttctacggctgcgtcaactggaccaatgaaaactttcccttcaacgattgcgtcgacaagatggtgatctggtgggaggagggaaagatgaccgccaaggtcgtggaatctgccaaagccattctgggtggaggcaaggttcgtgtggaccagaaatgcaagtcttcggcccagatcgacccgactccggtgattgtcacctctaacaccaacatgtgcgccgtgattgacggaaactcgaccaccttcgagcaccagcagccgttgcaagaccggatgttcaaatttgaacttacccgccgtttggatcatgactttgggaaggtcaccaagcaggaagtcaaagactttttccggtgggctcaagatcacgtgactgaggtggagcatgagttctacgtcaaaaagggtggagccaagaaaaggcccgcccccgatgatgtatatataaatgagcccaagcgggcgcgcgagtcagttgcgcagccatcgacgtcagacgcggaagcttcgataaactacgcggacaggtaccaaaacaaatgttctcgtcacgtgggcatgaatctgatgctgtttccctgtcgacaatgcgaaagaatgaatcagaattcaaatatctgcttcacacacgggcaaaaagactgtttggaatgctttcccgtgtcagaatctcaacccgtttctgtcgtcagaaaaacgtatcagaaactttgttacattcatcatatcatgggaaaagtaccagacgcctgcactgcctgcgacctggtaaatgtggacttggatgactgtatttctgagcaataaatgacttaaatcaggtatggctgctgacggttatcttccagattggctcgaggacactctctctgaaggaatcagacagtggtggaagctcaaacctggcccaccaccgccgaaacctaaccaacaacaccgggacgacagtaggggtcttgtgcttcctgggtacaagtacctcggacccttcaacggactcgacaaaggagagccggtcaacgaggcagacgccgcggccctcgagcacgacaaagcctacgaccaccagctcaagcaaggggacaacccgtacctcaaatacaaccacgcggacgctgaatttcaggagcgtcttcaagaagatacgtctttcgggggcaacctcgggcgagcagtcttccaggccaaaaagagggtactcgagcctcttggtctggttgaggaagctgttaagacggctcctggaaaaaagagacctatagagcagtctcctgcagaaccggactcttcctcgggcatcggcaaatcaggccagcagcccgctaagaaaagactcaattttggtcagactggcgacacagagtcagtcccaggccctcaaccaatcggagaaccccccgcagccccctctggtgtgggatctaatacaatggcttcaggcggtggggcaccaatggcagacaataacgaaggcgccgacggagtgggtaattcctcgggaaattggcattgcgattccacatggatgggcgacagagttatcaccaccagcacaagaacctgggccctccccacctacaataatcacctctacaagcaaatctccagcgaatcgggagccaccaacgacaaccactacttcggctacagcaccccctgggggtattttgactttaacagattccactgtcacttctcaccacgtgactggcagcgactcatcaacaacaactggggatttagacccaagaaactcaatttcaagctcttcaacatccaagtcaaggaggtcacgcagaatgatggaaccacgaccatcgccaataaccttaccagcgcggtgcaggtcttcacagactctgagtaccagctgccctacgtcctcggttcggctcaccagggctgccttccgccgttcccagcagacgtcttcatgattcctcagtacggctacttgactctgaacaatggcagccaagcggtaggacgttcttcattctactgtctagagtattttccctctcagatgctgaggacgggaaacaacttcaccttcagctacacttttgaagacgtgcctttccacagcagctacgcgcacagccagagtctggatcggctgatgaatcctctcattgaccagtacctgtattacctgagcaaaactcagggtacaagtggaacaacgcagcaatcgagactgcagttcagccaagctgggcctagctccatggctcagcaggccaaaaactggctaccgggacccagctaccgacagcagcgaatgtctaagacggctaatgacaacaacaacagtgaatttgcttggactgcagccaccaaatattacctgaatggaagaaattctctggtcaatcccgggcccccagtggccagtcacaaggacgatgaggaaaagtatttccccatgcacggaaatctcatctttggaaaacaaggcacaggaactaccaatgtggacattgaatcagtgcttattacagacgaagaagaaatcagaacaactaatcctgtggctacagaacaatacggacaggttgccaccaaccatcagagtcagaacaccacagcttcctatggaagtgtggacagccagggaatcttacctggaatggtgtggcaggaccgcgatgtctatcttcaaggtcccatttgggccaaaactcctcacacggacggacactttcatccttctccgctcatgggaggctttggactgaaacaccctcctccccagatcctgatcaaaaacacacctgtgccagcgaatcccgcgaccactttcactcctggaaagtttgcttcgttcattacccagtattccacctgacaggtcagcgtggaaatagagtgggagctgcagaaagaaaacagcaaacgctggaacccagaaattcagtacacctccaactacaacaagtcggtgaatgtggagtttaccgtggacgcaaacggtgtttattctgaaccccgccctattggcactcgttaccttacccggaacttgtaatttcctgttaatgaataagccgatttatgcgtttcagttgaactttggtctctgcgaagggcgaattcgtttaaacct

SEQ ID NO: 130 - protein, 735 aa, Artificial Sequence
  Description of Artificial Sequence: Synthetic polypeptide
MAADGYLPDWLEDTLSEGIRQWWKLKPGPPPPKPNQQHRDDSRGLVLPGYKYLGPFNGLDKGEPVNEADAAALEHDKAYDHQLKQGDNPYLKYNHADAEFQERLQEDTSFGGNLGRAVFQAKKRVLEPLGLVEEAVKTAPGKKRPIEQSPAEPDSSSGIGKSGQQPAKKRLNFGQTGDTESVPGPQPIGEPPAAPSGVGSNTMASGGGAPMADNNEGADGVGNSSGNWHCDSTWMGDRVITTSTRTWALPTYNNHLYKQISSESGATNDNHYFGYSTPWGYFDFNRFHCHFSPRDWQRLINNNWGFRPKKLNFKLFNIQVKEVTQNDGTTTIANNLTSAVQVFTDSEYQLPYVLGSAHQGCLPPFPADVFMIPQYGYLTLNNGSQAVGRSSFYCLEYFPSQMLRTGNNFTFSYTFEDVPFHSSYAHSQSLDRLMNPLIDQYLYYLSKTQGTSGTTQQSRLQFSQAGPSSMAQQAKNWLPGPSYRQQRMSKTANDNNNSEFAWTAATKYYLNGRNSLVNPGPPVASHKDDEEKYFPMHGNLIFGKQGTGTTNVDIESVLITDEEEIRTTNPVATEQYGQVATNHQSQNTTASYGSVDSQGILPGMVWQDRDVYLQGPIWAKTPHTDGHFHPSPLMGGFGLKHPPPQILIKNTPVPANPATTFTPGKFASFITQYSTGQVSVEIEWELQKENSKRWNPEIQYTSNYNKSVNVEFTVDANGVYSEPRPIGTRYLTRNL

SEQ ID NO: 131 - DNA, 3123 bp, Adeno-associated virus
gaattcgccctttctacggctgcgtcaactggaccaatgaaaactttcccttcaacgattgcgtcgacaagatggtgatctggtgggaggagggaaagatgaccgccaaggtcgtggaatctgccaaagccattctgggtggaagcaaggttcgtgtggaccagaaatgcaagtcttcggcccagatcgacccgactccggtgattgtcacctctaacaccaacatgtgcgccgtgattgacggaaactcgaccaccttcgagcaccagcagccgttgcaagaccggatgttcaaatttgaacttacccgccgtttggatcatgactttgggaaggtcaccaagcaggaagtcaaagactttttccggtgggctcaagatcacgtgactgaggtggagcatgagttctacgtcaaaaagggtggagccaagaaaaggcccgcccccgatgatgtatatataaatgagcccaagcgggcgcgcgagtcagttgcgcagccatcgacgtcagacgcggaagcttcgataaactacgcgggcaggtaccaaaacaaatgttctcgtcacgtgggcatgaatctgatgctgtttccctgtcgacaatgcgaaagaatgaatcagaattcaaatatctgcttcacacacgggcaaaaagactgtttggaatgctttcccgtgtcagaatctcaacccgtttctgtcgtcagaaaaacgtatcagaaactttgttacattcatcatatcatgggaaaagaaccagacgcctgcactgcctgcgacctggtaaatgtggacttggatgactgtatttctgagcaataaatgacttaaatcaggtatggctgctgacggttatcttccagattggctcgaggacactctctctgaaggaatcagacagtggtggaagctcaaacctggcccaccaccgccgaaacctaaccaacaacaccgggacgacagtaggggtcttgtgcttcctgggtacaagtacctcggacccttcaacggactcgacaaaggagagccggtcaacgaggcagacgccgcggccctcgagcacgacaaagcctacgaccaccagctcaagcaaggggacaacccgtacctcaaatacaaccacgcggacgctgaatttcaggagcgtcttcaagaagatacgtctttcgggggcaacctcgggcgagcagtcttccaggccaaaaagagggtactcgagcctcttggtctggttgaggaagctgttaagacggctcctggaaaaaagagacctatagagcagtctcctgcagaaccggactcttcctcgggcatcggcgaatcaggccagcagcccgctaagaaaagactcaattttggtcagactggcgacacagagtcagtcccagaccctcaaccaatcggagaaccccccgcagccccctctggtgtgggatctaatacaatggcttcaggcggtggggcaccaatggcagacgataacgaaggcgccgacggagtgggtaattcctcgggaaattggcattgcgattccacatggatgggcgacagagttatcaccaccagcacaagaacctgggccctccccacctacaataatcacctctacaagcaaatctccagcgaatcgggagccaccaacgacaaccactacttcggctacagcaccccctgggggtattttgactttaacagattccactgtcacttctcaccacgtgactggcagcgactcatcaacaacaactggggatttagacccaagaaactcaatttcaagctcttcaacatccaagtcaaggaggtcacgcagaatgatggaaccacgaccatcgccaataaccttaccagcacggtgcaggtcttcacagactctgagtaccagctgccctacgtcctcggttcggctcaccagggctgccttccgccgttcccagcagacgtcttcatgattcctcagtacggctacttgactctgaacaatggcagccaagcggtaggacgttcttcattctactgtctagagtattttccctctcagatgctgaggacgggaaacaacttcaccttcagctacacttttgaagacgtgcctttccacagcagctacgcgcacagccagagtctggatcggctgatgaatcctctcattgaccagtacctgtattacctgagcaaaactcagggtacaagtggaacaacgcagcaatcgagactgcagttcagccaagctgggcctagctccatggctcagcaggccaaaaactggctaccgggacccagctaccgacagcagcgaatgtctaagacggctaatgacaacaacaacagtgaatttgcttggactgcagccaccaaatattacctgaatggaagaaattctctggtcaatcccgggcccccaatggccagtcacaaggacgatgaggaaaagtatttccccatgcacggaaatctcatctttggaaaacaaggcacaggaactaccaatgtggacattgaatcagtgcttattacagacgaagaagaaatcagaacaactaatcctgtggctacagaacaatacggacaggttgccaccaaccatcagagtcaggacaccacagcttcctatggaagtgtggacagccagggaatcttacctggaatggtgtggcaggaccgcgatgtctatcttcaaggtcccatttgggccaaaactcctcacacggacggacactttcatccttctccgctcatgggaggctttggactgaaacaccctcctccccagatcctgatcaaaaacacacctgtgccagcgaatcccgcgaccactttcactcctggaaagtttgcttcgttcattacccagtattccaccggacaggtcagcgtggaaatagagtgggagctgcagaaagaaaacagcaaacgctggaacccagaaattcagtacacctccaactacaacaagtcggtgaatgtggagtttaccgtggacgcaaacggtgtttattctgaaccccgccctattggcactcgttaccttacccggaacttgtaatttcctgttaatgaataaaccgatttatgcgtttcagttgaactttggtctctgcgaagggcgaattcgcggccgcta

SEQ ID NO: 132 - protein, 735 aa, Artificial Sequence
  Description of Artificial Sequence: Synthetic polypeptide
MAADGYLPDWLEDTLSEGIRQWWKLKPGPPPPKPNQQHRDDSRGLVLPGYKYLGPFNGLDKGEPVNEADAAALEHDKAYDHQLKQGDNPYLKYNHADAEFQERLQEDTSFGGNLGRAVFQAKKRVLEPLGLVEEAVKTAPGKKRPIEQSPAEPDSSSGIGESGQQPAKKRLNFGQTGDTESVPDPQPIGEPPAAPSGVGSNTMASGGGAPMADDNEGADGVGNSSGNWHCDSTWMGDRVITTSTRTWALPTYNNHLYKQISSESGATNDNHYFGYSTPWGYFDFNRFHCHFSPRDWQRLINNNWGFRPKKLNFKLFNIQVKEVTQNDGTTTIANNLTSTVQVFTDSEYQLPYVLGSAHQGCLPPFPADVFMIPQYGYLTLNNGSQAVGRSSFYCLEYFPSQMLRTGNNFTFSYTFEDVPFHSSYAHSQSLDRLMNPLIDQYLYYLSKTQGTSGTTQQSRLQFSQAGPSSMAQQAKNWLPGPSYRQQRMSKTANDNNNSEFAWTAATKYYLNGRNSLVNPGPPMASHKDDEEKYFPMHGNLIFGKQGTGTTNVDIESVLITDEEEIRTTNPVATEQYGQVATNHQSQDTTASYGSVDSQGILPGMVWQDRDVYLQGPIWAKTPHTDGHFHPSPLMGGFGLKHPPPQILIKNTPVPANPATTFTPGKFASFITQYSTGQVSVEIEWELQKENSKRWNPEIQYTSNYNKSVNVEFTVDANGVYSEPRPIGTRYLTRNL

SEQ ID NO: 133 - DNA, 3113 bp, Adeno-associated virus
gaattcgccctttctacggctgcgtcaactggaccaatgaaaactttcccttcaacgattgcgtcgacaagatggtgatctggtgggaggagggaaagatgaccgccaaggtcgtggaatctgccaaagccattctgggtggaagcaaggttcgtgtggaccagaaatgcaagtcttcggcccagatcgacccgactccggtgattgtcacctctaacaccaacatgtgcgccgtgattgacggaaactcgaccaccttcgagcaccagcagccgttgcaagaccggatgttcaaatttgaacttacccgccgtttggatcatgactttgggaaggtcaccaagcaggaagtcaaagactttttccggtgggctcaagatcacgtgactgaggtggagcatgagttctacgtcaaaaagggtggagccaagaaaaggcccgcccccgatgatgtatatataaatgagcccaagcgggcgcgcgagtcagttgcgcagccatcgacgtcagacgcggaagcttcgataaactacgcggacaggtaccaaaacaaatgttctcgtcacgtgggcatgaatctgatgctgtttccctgtcgacaatgcgaaagaatgaatcagaattcaaatatctgcttcacacacgggcaaaaagactgtttggaatgctttcccgtgtcagaatctcaacccgttcctgtcgtcagaaaaacgtatcagaaactttgttacattcatcatatcatgggaaaagtaccagacgcctgcactgcctgcgacctggtaaatgtggacttggatgactgtatttctgagcaataaatgacttaaatcaggtatggctgctgacggttatcttccagattggctcgaggacactctctctgaaggaatcagacagtggtggaagctcaaacctggcccaccaccgccgaaacctaaccaacaacaccgggacgacagtaggggtcttgtgcttcctgggtacaagtacctcggacccttcaacggactcgacaaaggagagccggtcaacgaggcagacgccgcggccctcgagcacgacaaagcctacgaccaccagctcaagcaaggggacaacccgtacctcaaatacaaccacgcggacgctgaatttcaggagcgtcttcaagaagatacgtctttcgggggcaacctcgggcgagcagtcttccaggccaaaaagagggtactcgagcctcttggtctggttgaggaagctgttaagacggctcctggaaaaaagagacctatagagcagtctcctgcagaaccggactcttcctcgggcatcggcaaatcaggccagcagcccgctaagaaaagactcaattttggtcagactggcgacacagagtcagtcccagaccctcaaccaatcggagaaccccccgcagccccctctggtgtgggatctaatacaatggcttcaggcggtggggcaccaatggcagacaataacgaaggcgccgacggagtgggtaattcctcgggaaattggcattgcgattccacatggatgggcgacagagttatcaccaccagcacaagaacctgggccctccccacctacaataatcacctctacaagcaaatctccagcgaatcgggagccaccaacgacaaccactacttcggctacagcaccccctgggggtattttgactttaacagattccactgtcacttctcaccacgtgactggcagcgactcatcaataacaactggggatttagacccaagaaactcaatttcaagctcttcaacatccaagtcaaggaggtcacgcagaatgatggaaccacgaccatcgccaataaccttaccagcacggtgcaggtcttcacagactctgagtaccagctgccctacgtcctcggttcggctcaccagggctgccttccgccgttcccagcagacgtcttcatgattcctcagtacggctacttgactctgaacaatggcagccaagcggtaggacgttcttcattctactgtctagagtattttccctctcagatgctgaggacgggaaacaacttcaccttcagctacacttttgaagacgtgcctttccacagcagctacgcgcacagccagagtctggatcggctgatgaatcctctcattgaccagtacctgtattacctgagcaaaactcagggtacaagtggaacaacgcagcaatcgagactgcagttcaaccaagctgggcctagctccatggctcagcaggccaaaaactggctaccgggacccagctaccgacagcagcgaatgtctaagacggctaatgacaacaacaacagtgaatttgcttggactgcagccaccaaatattacccgaatggaagaaattctctggtcaatcccgggcccccaatggccagtcacaaggacgatgaggaaaagtatttccccatgcacggaaatctcatctttggaaaacaaggcacaggaactaccaatgtggacattgaatcagtgcttattacagacgaagaagaaatcagaacgactaatcctgtggctacagaacaatacggacaggttgccaccaaccgtcagagtcagaacaccacagcttcctatggaagtgtggacagccagggaatcttacctggaatggtgtggcaggaccgcgatgtctatcttcaaggtcccatttgggccaaaactcctcacacggacggacactttcatccttctccgctcatgggaggctttggactgaaacaccctcctccccagatcctgatcaaaaacacacctgtgccagcgaatcccgcgaccactttcactcctggaaagtttgcttcgttcattacccagtattccaccggacaggtcagcgtggaaatagagtgggagctgcagaaagaaaacagcaaacgctggaacccggaaattcagtacacctccaactacaacaagtcggtgaatgtggagtttaccgtggacgcaaacggtgtttattctgaaccccgccctattggcactcgttaccttacccggaacttgtaatttcctgttaatgaataaaccgatttatgcgtttcagttgaactttggtctctgcgaagggcgaattc

SEQ ID NO: 134 - protein, 735 aa, Artificial Sequence
  Description of Artificial Sequence: Synthetic polypeptide
MAADGYLPDWLEDTLSEGIRQWWKLKPGPPPPKPNQQHRDDSRGLVLPGYKYLGPFNGLDKGEPVNEADAAALEHDKAYDHQLKQGDNPYLKYNHADAEFQERLQEDTSFGGNLGRAVFQAKKRVLEPLGLVEEAVKTAPGKKRPIEQSPAEPDSSSGIGKSGQQPAKKRLNFGQTGDTESVPDPQPIGEPPAAPSGVGSNTMASGGGAPMADNNEGADGVGNSSGNWHCDSTWMGDRVITTSTRTWALPTYNNHLYKQISSESGATNDNHYFGYSTPWGYFDFNRFHCHFSPRDWQRLINNNWGFRPKKLNFKLFNIQVKEVTQNDGTTTIANNLTSTVQVFTDSEYQLPYVLGSAHQGCLPPFPADVFMIPQYGYLTLNNGSQAVGRSSFYCLEYFPSQMLRTGNNFTFSYTFEDVPFHSSYAHSQSLDRLMNPLIDQYLYYLSKTQGTSGTTQQSRLQFNQAGPSSMAQQAKNWLPGPSYRQQRMSKTANDNNNSEFAWTAATKYYPNGRNSLVNPGPPMASHKDDEEKYFPMHGNLIFGKQGTGTTNVDIESVLITDEEEIRTTNPVATEQYGQVATNRQSQNTTASYGSVDSQGILPGMVWQDRDVYLQGPIWAKTPHTDGHFHPSPLMGGFGLKHPPPQILIKNTPVPANPATTFTPGKFASFITQYSTGQVSVEIEWELQKENSKRWNPEIQYTSNYNKSVNVEFTVDANGVYSEPRPIGTRYLTRNL

SEQ ID NO: 135 - DNA, 3122 bp, Adeno-associated virus
agcggccgcgaattcgccctttctacggctgcgtcaactggaccaatgaaaactttcccttcaacgattgcgtcgacaagatggtgatctggtgggaggagggaaagatgaccgccaaggtcgtggaatctgccaaagccattctgggtggaagcaaggttcgtgtggaccagaaatgcaggtcttcggcccagatcgacccgactccggtgattgtcacctctaacaccaacatgtgcgccgtgattgacggaaactcgaccaccttcgagcaccagcagccgttgcaagaccggatgttcaaatttgaacttacccgccgtttggatcatgactttgggaaggtcaccaagcaggaagtcaaagactttttccggtgggctcaagatcacgtgactgaggtggagcatgagttctacgtcaaaaagggtggagccaagaaaaggcccgcccccgatgatgtatatataaatgagcccaagcgggcgcgcgagtcagttgcgcagccatcgacgtcagacgcggaagcttcgataaactacgcggacaggtaccaaaacaaatgttctcgtcacgtgggcatgaatctgatgctgtttccctgtcgacaatgcgaaagaatgaatcagaattcaaatatctgcttcacacacgggcaaaaagactgtttggaatgctttcccgtgtcagaatctcaacccgtttctgtcgtcagaaaaacgtatcagaaactttgttacattcatcatatcatgggaaaagtaccagacgcctgcactgcctgcgacctggtaaatgtggacttggatgactgtatttctgagcaataaatgacttaaatcaggtatggctgctgacggttatcttccagattggctcgaggacactctctctgaaggaatcagacagtggtggaagctcaaacctggcccaccaccgccgaaacctaaccaacaacaccgggacgacagtaggggtcttgtgcttcctgggtacaagtacctcggacccttcaacggactcgacaaaggagagccggtcaacgaggcagacgccgcggccctcgagcacgacaaagcctacgaccaccagctcaagcaaggggacaacccgtacctcaaatacaaccacgcggacgctgaatttcaggagcgtcttcaagaagatacgtctttcgggggcaacctcgggcgagcagtcttccaggccaaaaagagggtactcgagcctcttggtctggttgaggaagctgttaagacggctcctggaaaaaagagacctatagagcagtctcctgcagaaccggactcttcctcgggcatcggcaaatcaggccagcagcccgctaagaaaagactcaattttggtcagactggcgacacagagtcagtcccagaccctcaaccaatcggagaaccccccgcagccccctctggtgtgggatctaatacaatggcttcaggcggtggggcaccaatggcagacaataacgaaggcgccgacggagtgggtaattcctcgggaaattggcattgcgattccacatggatgggcgacagagttatcaccaccagcacaagaacctgggccctccccacctacaataatcgcctctacaagcaaatctccagcgaatcgggagccaccaacgacaaccactacttcggctacagcaccccctgggggtattttgactttaacagattccactgtcacttctcaccacgtgactggcagcgactcatcaacaacaactggggatttagacccaagaaactcaatttcaagctcttcaacatccaagtcaaggaggtcacgcagaatgatggaaccacgaccatcgccaataaccttaccagcacggtgcaggtcttcacagactctgagtaccagctgccctacgtcctcggttcggctcaccagggctgccttccgccgttcccagcagacgtcttcatgattcctcagtacggctacttgactctgaacaatggcagccaagcggtaggacgttcttcattctactgtctagagtattttccctctcagatgctgaggacgggaaacaacttcaccttcagctacacttttgaagacgtgcctttccacagcagctacgcgcacagccagagtctggatcggctgatgaatcctctcattgaccagtacctgtattacctgagcaaaactcagggtacaagtggaacaacgcagcaatcgagactgcagttcagccaagctgggcctagctccatggctcagcaggccaaaaactggctaccgggacccagctaccgacagcagcgaatgtctaagacggctaatgacaacaacaacagtgaatttgcttggactgcagccaccaaatattacctgaatggaagaaattctctggtcaatcccgggcccccaatggccagtcacaaggacgatgaggaaaagtatttccccatgcacggaaatctcatctttggaaaacaaggcacaggaactaccaatgtggacattgaatcagtgcttattacagacgaagaagaaatcagaacaactaatcctgtggctacagaacaatacggacaggttgccaccaaccatcagagtcagaacaccacagcttcctatggaagtgtggacagccagggaatcttacctggaatggtgtggcaggaccgcgatgtctatcttcaaggtcccatttgggccaaaactcctcacacggacggacactttcatccttctccgctcatgggaggctttggactgaaacaccctcctccccagatcctgatcaaaaacacacctgtgccagcgaatcccgcgaccactttcactcctggaaagtttgcttcgttcattacccagtattccaccggacaggtcagcgtggaaatagagtgggagctgcagaaagaaaacagcaaacgctggaacccagaaattcagtacacctccaactacaacaagtcggtgaatgtggagtttaccgtggacgcaaacggtgtttattctgaaccccgccctattggcactcgttaccttacccggaacttgtaatttcctgttaatgaataaaccgatttatgcgtttcagttgaactttggtctctgcgaagggcgaattc

SEQ ID NO: 136 - protein, 735 aa, Artificial Sequence
  Description of Artificial Sequence: Synthetic polypeptide
MAADGYLPDWLEDTLSEGIRQWWKLKPGPPPPKPNQQHRDDSRGLVLPGYKYLGPFNGLDKGEPVNEADAAALEHDKAYDHQLKQGDNPYLKYNHADAEFQERLQEDTSFGGNLGRAVFQAKKRVLEPLGLVEEAVKTAPGKKRPIEQSPAEPDSSSGIGKSGQQPAKKRLNFGQTGDTESVPDPQPIGEPPAAPSGVGSNTMASGGGAPMADNNEGADGVGNSSGNWHCDSTWMGDRVITTSTRTWALPTYNNRLYKQISSESGATNDNHYFGYSTPWGYFDFNRFHCHFSPRDWQRLINNNWGFRPKKLNFKLFNIQVKEVTQNDGTTTIANNLTSTVQVFTDSEYQLPYVLGSAHQGCLPPFPADVFMIPQYGYLTLNNGSQAVGRSSFYCLEYFPSQMLRTGNNFTFSYTFEDVPFHSSYAHSQSLDRLMNPLIDQYLYYLSKTQGTSGTTQQSRLQFSQAGPSSMAQQAKNWLPGPSYRQQRMSKTANDNNNSEFAWTAATKYYLNGRNSLVNPGPPMASHKDDEEKYFPMHGNLIFGKQGTGTTNVDIESVLITDEEEIRTTNPVATEQYGQVATNHQSQNTTASYGSVDSQGILPGMVWQDRDVYLQGPIWAKTPHTDGHFHPSPLMGGFGLKHPPPQILIKNTPVPANPATTFTPGKFASFITQYSTGQVSVEIEWELQKENSKRWNPEIQYTSNYNKSVNVEFTVDANGVYSEPRPIGTRYLTRNL

SEQ ID NO: 137 - DNA, 3121 bp, Adeno-associated virus
gaattcgcccttcgcagagaccaaagttcaactgaaacgaatcaaccggtttattgattaacaagcaattacagattacgggtgaggtaacgggtgccgatggggcgaggctcagaataagtgccatctgtgttaacagcaaagtccacatttgtagatttgtagtagttggaagtgtattgaatctctgggttccagcgtttgctgttttctttctgcagctcccattcaatttccacgctgacctgtccggtgctgtactgcgtgatgaacgacgccagcttagcttgactgaaggtagttggaggatccgcgggaacaggtgtattcttaatcaggatctgaggaggcgggtgtttcagtccaaagccccccatcagcggcgagggatgaaagtttccgtccgtgtgaggaatcttggcccagataggaccctgcaggtacacgtcccggttctgccagaccatgccaggtaaggctccttgactgttgacggcccctacaataggagcggcgttttgctgttgcaggttatcggccaccacgccgtactgttctgtggccactgggttggtggttttaatttcttcctcactggttagcataacgctgctatagtccacgttgccttttccagctccctgtttcccaaacattaagactccgctggacggaaaaaatcgctcttcgtcgtccttgtgggttgccatagcgacaccgggatttaccagagagtctctgccattcagatgatacttggtggcaccggtccaggcaaagttgctgttgttattttgcgacagtgtcgtggagacgcgttgctgccggtagcagggcccgggtagccagtttttggcctgagccgacatgttattaggcccggcctgagaaaatagcaactgctgagttcctgcggtacctcccgtggactgagtccgagacaggtagtacaggtactggtcgatgagggggttcatcagccggtccaggctttggctgtgcgcgtagctgctgtgaaaaggcacgtcctcaaactggtagctgaactcaaagttgttgcccgttctcagcatttgagaaggaaagtactccaggcagtagaaggaggaacggcccacggcctgactgccattgttcagagtcaggtacccgtactgaggaatcatgaagacgtccgccgggaacggaggcaggcagccctggcgcgcagagccgaggacgtacgggagctggtattccgagtccgtaaagacctgaatcgtgctggtaaggttattggcgatggtcttggtgccttcattctgcgtgacctccttgacctggatgttgaagagcttgaagttgagtctcttgggccggaatccccagttgttgttgatgagtcgctgccagtcacgtggtgagaagtggcagtggaatctgttaaagtcaaaatacccccagggggtgctgtagccgaagtaggtgttgtcgttggtgcttcctcccgaagtcccgttggagatttgcttgtagaggtggttgttgtaggtggggagggcccaggttcgggtgctggtggtgatgactctgtcgcccagccatgtggaatcgcaatgccaatttcctgaggaactacccactccgtcggcgccttcgttattgtctgccattggagcgccaccgcctgcagccattgtaccagatcccagaccagaggggcctgcggggggttctccgattggttgagggtcgggcactgactctgagtcgccagtctgcccaaagttgagtctctttttcgcgggctgctggcctttcttgccgatgcccgtagtggagtctggagaacgctggggtgatggctctaccggtctcttctttccaggagccgtcttagcgccttcctcaaccagaccgagaggttcgagaacccgcttcttggcctggaagactgctcgtccgaggttgcccccaaaagacgtatcttcttgcagacgctcctgaaactcggcgtcggcgtggttataccgcaggtacggattgtcacccgctttgagctgctggtcgtaggccttgtcgtgctcgagggccgctgcgtccgccgcgttgacgggctcccccttgtcgagtccgttgaagggtccgaggtacttgtagccaggaagcaccagaccccggccgtcgtcctgcttttgctggttggctttgggcttcggggctccaggtttcagcgcccaccactcgcgaatgccctcagagaggttgtcctcgagccaatctggaagataaccatcggcagccatacctgatctaaatcatttattgttcaaagatgcagtcatccaaatccacattgaccagatcgcaggcagtgcaagcgtctggcacctttcccatgatatgatgaatgtagcacagtttctgatacgcctttttgacgacagaaacgggttgagattctgacacgggaaagcactctaaacagtctttctgtccgtgagtgaagcagatatttgaattctgattcattctctcgcattgtctgcagggaaacagcatcagattcatgcccacgtgacgagaacatttgttttggtacctgtccgcgtagttgatcgaagcttccgcgtctgacgtcgatggctgcgcaactgactcgcgcacccgtttgggctcacttatatctgcgtcactgggggcgggtcttttcttggctccaccctttttgacgtagaattcatgctccacctcaaccacgtgatcctttgcccaccggaaaaagtctttgacttcctgcttggtgaccttcccaaagtcatgatccagacggcgggtgagttcaaatttgaacatccggtcttgcaacggctgctggtgttcgaaggtcgttgagttcccgtcaatcacggcgcacatgttggtgttggaggtgacgatcacgggagtcgggtctatctgggccgaggacttgcatttctggtccacgcgcaccttgcttcctccgagaatggctttggccgactccacgaccttggcggtcatcttcccctcctcccaccagatcaccatcttgtcgacacagtcgttgaagggaaagttctcattggtccagttgacgcagccgtagaagggcgaattc

SEQ ID NO: 138 - protein, 733 aa, Artificial Sequence
  Description of Artificial Sequence: Synthetic polypeptide
MAADGYLPDWLEDNLSEGIREWWDLKPGAPKLKANQQKQDDGRGLVLPGYKYLGPFHGLDKGEPVNAADAAALEHDKAYDQQLKAGDNPYLRYNHADAEFQERLQEDTSFGGNLGRAVFQAKKRVLEPLGLVEEGAKTAPGKKRPLESPQEPDSSSGIGKKGKQPAKKRLNFEEDTGAGDGPPEGSDTSAMSSDIEMRAAPGGNAVDAGQGSDGVGNASGDWHCDSTWSEGKVTTTSTRTWVLPTYNNHLYLRLGTTSNSNTYNGFSTPWGYFDFNRFHCHFSPRDWQRLINNNWGLRPKAMRVKIFNIQVKEVTTSNGETTVANNLTSTVQIFADSSYELPYVMDAGQEGSLPPFPNDVFMVPQYGYCGIVTGENQNQTDRNAFYCLEYFPSQMLRTGNNFEMAYNFEKVPFHSMYAHSQSLDRLMNPLLDQYLWHLQSTTSGETLNQGNAATTFGKIRSGDFAFYRKNWLPGPCVKQQRFSKTASQNYKIPASGGNALLKYDTHYTLNNRWSNIAPGPPMATAGPSDGDFSNAQLIFPGPSVTGNTTTSANNLLFTSEGEIAATNPRDTDMFGQIADNNQNATTAPITGNVTAMGVLPGMVWQNRDIYYQGPIWAKIPHADGHFHPSPLIGGFGLKHPPPQIFIKNTPVPANPATTFTAARVDSFITQYSTGQVAVQIEWEIEKERSKRRNPEVQFTSNYGNQSSMLWAPDTTGKYTEPRVIGSRYLTNHL

SEQ ID NO: 139 - protein, 735 aa, Adeno-associated virus
MAADGYLPDWLEDTLSEGIRQWWKLKPGPPPPKPNQQHRDDSRGLVLPGYKYLGPFNGLDKGEPVNEADAAALEHDKAYDHQLKQGDNPYLKYNHADAEFQERLQEDTSFGGNLGRAVFQAKKRVLEPLGLVEEAVKTAPGKKRPIEQSPAEPDSSSGIGKSGQQPAKKRLNFGQTGDTESVPDPQPIGEPPAAPSGVGSNTMASGGGAPMADNNEGADGVGNSSGNWHCDSTWMGDRVITTSTRTWALPTYNNHLYKQISSESGATNDNHYFGYSTPWGYFDFNRFHCHFSPRDWQRLINNNWGFRPKKLNFKLFNIQVKEVTQNDGTTTIANNLTSTVQVFTDSEYQLPYVLGSAHQGCLPPFPADVFMIPQYGYLTLNNGSQAVGRSSFYCLEYFPSQMLRTGNNFTFSYTFEDVPFHSSYAHSQSLDRLMNPLIDQYLYYLSKTQGTSGTTQQSRLQFSQAGPSSMAQQAKNWLPGPSYRQQRMSKTANDNNNSEFAWTAATKYYLNGRNSLVNPGPPMASHKDDEEKYFPMHGNLIFGKQGTGTTNVDIESVLITDEEEIRTTNPVATEQYGQVATNHQSQNTTASYGSVDSQGILPGMVWQDRDVYLQGPIWAKIPHTDGHFHPSPLMGGFGLKHPPPQILIKNTPVPANPATTFTPGKFASFITQYSTGQVSVEIEWELQKENSKRWNPEIQYTSNYNKSVNVEFTVDANGVYSEPRPIGTRYLTRNL

SEQ ID NO: 140 - DNA, 3127 bp, Adeno-associated virus
gcggccgcgaattcgcccttcgcagagaccaaagttcaactgaaacgaatcaaccggtttattgattaacatgcaattacagattacgggtgaggtaacgagtgccaatagggcgaggctcagagtaaacaccctggctgtcaacggcaaagtccacaccagtctgcttttcaaagttggaggtgtactgaatctccgggtcccagcgcttgctgttttccttctgcagctcccactcgatttccacgctgacttgtccggtgctgtactgtgtgatgaacgaagcaaacttggcaggagtaaacacctccggaggattagcgggaacgggagtgttcttgatcaggatctgaggaggcggatgtttaagtccaaagccgcccatcaaaggagacgggtgaaagttgccatccgtgtgaggaatcttggcccagatgggaccctgcaggtacacgtcccggttctgccagaccatgccaggtaaggctccctggttgttgacaacttgtgtctgggctgcagtattagccgcttgtaagttgctgctgactatcccgtattcttccgtggctacaggattagtaggacgaatttcttcttcatttgtcattaacacattttccaatgtagttttgttagttgctccagtttttccaaaaatcaggactccgctggatgggaaaaagcggtcctcgtcgtccttgtgagttgccatggcgacgccgggattaaccaacgagtttctgccgttcaggtgatatttggtggcaccagtccaagcaaagttgctgttgttgttttgatccagcgttttggagaccctttgttgccggaagcagggtccaggtaaccaattcttggcttgttcggccatagttgaaggcccgccctggtaaaactgcagttcccgattgccagctgtgcctcctgggtcactctgtgttctggccaggtagtacaagtactggtcgatgaggggattcatcagccggtccaggctctggctgtgtgcgtagctgctgtggaaaggcacgtcctcgaagctgtagctgaactcaaagttgttgcccgttctcagcatctgagaggggaagtactccaggcagtagaaggaggaacgtcccacagactgactgccattgttgagagtcaggtagccgtactgaggaatcatgaagacgtccgccgggaacggaggcaggcagccctggtgcgcagagccgaggacgtacggcagctggtattccgagtccgagaatacctgaatcgtgctggtaaggttattagcgatggtcgtaacgccgtcattcgtcgtgacctccttgacctggatgttgaagagcttgaaccgcagcttcttgggccggaatccccagttgttgttgatgagtcgctgccagtcacgtggtgagaagtggcagtggaatctgttaaagtcaaaatacccccagggggtgctgtagccgaagtaggtgttgtcgttggtactacctgcagtttcactggagatttgctcgtagaggtggttgttgtaggtgggcagggcccaggttcgggtgctggtggtaatgactctgtcgcccagccatgtggaatcgcaatgccaatttcctgaggcattacccactccgtcggcaccttcgttattgtctgccattggtgcgccaccgcctgcagccactgtaccagatcccacactagagggcgctgctggaggttctccgagaggttgagggtcggggactgactctgagtcgccagtctgaccgaaattgagtctctttctggcgggctgctggcccttcttgccgatgcccgtggaggagtcgggggaacgctgaggtgacggctctaccggtctcttctttgcaggagccgtcttagcgccttcctcaaccagaccgagaggttcgagaacccgcttcttggcctggaagactgctcgcccgaggttgcccccaaatgacgtatcttcttgcagacgctcctgaaactcggcgtcggcgtggttataccgcaggtacgggttgtcacccgcattgagctgctggtcgtaggccttgtcgtgctcgagggccgctgcgtccgccgcgttgacgggctcccccttgtcgagtccgttgaagggtccgaggtacttgtagccaggaagcaccagaccccggccgttgtcctgcttttgctggttggctttgggtttcggggctccaggtttcaggtcccaccactcgcgaatgccctcagagaggttgtcctcgagccaatctggaagataaccatcggcagccatacctgatttaaatcatttattgttcaaagatgcagtcatccaaatccacattgaccagatcgcaggcagtgcaagcgtctggcacctttcccatgatatgatgaatgtagcacagtttctgatacgcctttttgacgacagaaacgggtttagattctgacacgggaaagcactctaaacagtctttctgtccgtgagtgaagcagatatttgaattctgattcattctctcgcattgtctgcagggaaacagcatcagattcatgcccacgtgacgagaacatttgttttggtacctgtctgcgtagttgatcgaagcttccgcgtctgacgtcgatggctgcgcaactgactcgcgcacccgtttgggctcacttatatctgcgtcactgggggcgggtcttttcttggctccaccctttttgacgtagaattcatgctccacctcaaccacgtaatcctttgcccaccggaaaaagtctttgacttcctgcttggtgaccttcccaaagtcatgatccagacggcgggtgagttcaaatttgaacatccggtcttgcaacggctgctggtgttcgaaggtcgttgagttcccgtcgatcacggcgcacatgttggtgttggagatgacgatcgcgggagtcgggtctatctgggccgaggacttgcatttctggtccacgcgcaccttgcttcctccgagaatggctttggccgactccacgaccttggcggtcatcttcccctcctcccaccagatcaccatcttgtcgacacagtcgttgaagggaaagttctcattggtccagttgacgcagccgtagaaagggcgaattc

SEQ ID NO: 141 - protein, 728 aa, Artificial Sequence
  Description of Artificial Sequence: Synthetic polypeptide
MAADGYLPDWLEDNLSEGIREWWDLKPGAPKPKANQQKQDDGRGLVLPGYKYLRPFNGLDKGEPVNEADAAALEHDKAYDKQLEQGDNPYLKYNHADAEFQERLQEDTSFGGNLGRAVFQAKKRVLEPLGLVEEVAKTAPGKKRPIESPDSSTGIGKKGQQPAKKKLNFGQTGDSESVPDPQPLGEPPAAPSGLGSGTMAAGGGAPMADNNEGADGVGNASGNWHCDSTWLGDRVITTSTRTWALPTYNNHLYKQISSQSGATNDNHFFSYSTPWGYFDFNRFHCHFSPRDWQRLINNNWGFRPRKLRFKLFNIQVKEVTTNDGVTTIANNLTSTIQVFSDSEYQLPYVLGSAHQGCLPPFPADVFMIPQYGYLTLNNGSQSVGRSSFYCLEYFPSQMLRTGNNFEFSYTFEEVPFHSSYVHSQSLDRLMNPLIDQYLYYLARTQSTTGSTRELQFHQAGPNTMAEQSKNWLPGPCYRQQRLSKNIDSNNNSNFAWTGATKYHLNGRNSLTNPGVAMATNKDDEDQFFPINGVLVFGKTGAANKTTLENVLMTSEEEIKTTNPVATEEYGVVSSNLQSSTAGPQTQTVNSQGALPGMVWQNRDVCLQGPIWAKIPHTDGNFHPSPLMGGFGLKHPPPQILIKNTPVPANPPEVFTPAKFASFITQYSTGQVSVEIEWELQKENSKRWNPEIQYTSNYAKSNNVEFAVNNEGVYTEPRPIGTRYLTRNL

SEQ ID NO: 142 - DNA, 3106 bp, Adeno-associated virus
gcggccgcgaattcgcccttcgcagagaccaaagttcaactgaaacgaatcaaccggtttattgattaacaagtaattacaggttacgggtgaggtaacgggtgccaatggggcgaggctcagtataaaccccttcgttgttgacagcaaattccacattattagacttggcataatttgaggtgtactgaatctctggattccagcgtttgctgttttctttctgcagttcccactcgatctccacgctgacctggccggtgctgtactgcgtgataaatgaggcaaacttggcaggagtaaacacctctggaggattagcaggtaccggggtgtttttgatgagaatttgaggaggcgggtgtttgagtccaaatccgcccatcaggggagacgggtgaaagttgccgtccgtgtgaggaattttggcccagatgggaccctgcaggcacacgtcccggttctgccagaccatgccgggcagagccccctggctgttgacagtctgtgtctggggtccggccgtagacgattgcaggttgctggagaccacaccgtattcttctgtagccacgggattggtggttttgatctcctcctcgctggtcattagcacgttttccagcgttgtcttgttggcagcccccgttttgccaaaaaccagcactccgttgatgggaaagaactggtcctcgtcgtccttgttggtggccatggctacgcccgggttggttaatgaatttctaccattcagatggtatttagtggccccggtccaggcaaagttactgttgttgttgctgtctatgttttttgacagtctctgctgccgataacagggtccgggcagccagttctttgattgctcggccatggtgttgggcccagcctgatggaactgcagctcccttgtggaccccgtagtgctctgggtccgggccaggtagtacaggtactggtcgatgaggggattcatcagccggtctaggctctggctgtgcacatagctgctgtggaaaggcacttcctcaaaggtgtagctgaattcaaagttattgcccgttctcagcatctgagaaggaaagtactccaggcagtagaaggaggaacgtcccacagactgactgccgttgtttagagtcagatatccgtactgaggaatcatgaacacgtccgcagggaacggagggaggcagccctggtgcgcagagccgaggacgtacggcagttggtactccgagtccgagaagacctgaatcgtgctggtaaggttattagcgatggtcgtaacgccgtcgttcgtcgtgacctccttgacctggatgttgaacaacttgaaccgcagctttctgggccggaatccccagttgttgttgatgagtcgctgccagtcacgtggtgagaagtggcagtggaatctgttgaagtcaaaatagccccagggggtgctgtagctgaagaagtggttgtcgttggtagccccgctctgacttgatatctgcttgtagaggtggttgttgtaggtgggcagggcccaggtgcgggtgctggtggtgatgactctgtcgcccagccatgtggaatcgcaatgccaatttccggaggcattacccactccgtcggcgccttcgttattgtctgccattggtgcgccaccgcctgcagccattgtaccagatcccagacctgagggcgcggcgggaggttctccgagaggttgggggtcgggcactgactctgagtcgccagtctgcccaaagttgagcttctttttagcgggctgctggcctttcttgccgatgcccgtggaggagtcgggggattctatgggtctcttctttccaggagccgtcttagcgacttcctcaaccagaccgagaggttcgagaacccgcttcttggcctggaagactgctcgcccgaggttgcccccaaaagacgtatcttcttgaagacgctcctgaaactcggcgtcggcgtggttgtacttgaggtacgggttgtccccctgctcgagctgcttgtcgtaggccttgtcgtgctcgagggccgcggcgtctgcctcgttgaccggctctcccttgtcgagtccgttgaagggtctgaggtacttgtagccaggaagcaccagaccccggccgtcgtcctgcttttgctggttggctttgggtttcggggctccaggtttcaagtcccaccactcgcgaatgccctcagagaggttgtcctcgagccaatctggaagataaccatcggcagccatacctggtttaagtcatttattgctcagaaacacagtcatccaggtccacgttgaccagatcgcaggccgagcaagcaatctcgggagcccgccccagcagatgatgaatggcacagagtttccgatacgtcctctttctgacgaccggttgagattctgacacgccggggaaacattctgaacagtctctggtcccgtgcgtgaagcaaatgttgaaattctgattcactctctcgcatgtcttgcagggaaacagcatctgaagcatgcccgcgtgacgagaacatttgttttggtacctgtcggcaaagtccaccggagctccttccgcgtctgacgtcgatggattcgcgactgaggggcaggcccgcttgggctcgcttttatccgcgtcatcgggggcgggtctcttgttggccccaccctttctgacgtagaacccatgcgccacctcggtcacgtgatcctgcgcccagcggaagaaccttttgacttcctgctttgtcaccttgccaaagttatgctccagacggcgggtgggttcaaatttgaacatccggtcctgcaacggctgctggtgctcgaaggtggcgctgttcccgtcaatcacggcgcacatgttggtgttggaggtgacggtcacgggggtggggtcgatctgggcggacgacttgcacttttggtccacgcgcaccttgctgccgccgagaatggccttggcggactccacgaccttggccgtcatcttgccctcctcccaccagatcaccatcttgtcggcgcaatcgttgaagggaaagttctcattggtccagttgacgcagccgtagaaagggcgaattc

SEQ ID NO: 143 - protein, 728 aa, Artificial Sequence
  Description of Artificial Sequence: Synthetic polypeptide
MAADGYLPDWLEDNLSEGIREWWDLKPGAPKPKANQQKQDDGRGLVLPGYKYLGPFNGLDKGEPVNEADAAALEHDKAYDKQLEQGDNPYLKYNHADAEFQERLQEDTSFGGNLGRAVFQAKKRVLEPLGLVEEGAKTASGKKRPIESPDSSTGIGKKGQQPAKKKLNFGQTGDSESVPDPQPLGEPPAAPSGLGSGTMAAGGGAPMADNNEGADGVGNASGNWHCDSTWLGDRVITTSTRTWALPTYNNHLYKQISSQSGATNDNHFFGYSTPWGYFDFNRFHCHFSPRDWQRLINNNWGFRPRKLRFKLFNIQVKEVTTNDGVTTIANNLTSTIQVFSDSEYQLPYVLGSAHQGCLPPFPADVFMIPQYGYLTLNNGSQSVGRSSFCCLEYFPSQMLRTGNNFEFSYTFEEVPFHSSYAHSQSLDRLMNPLIDQYLYYLARTQSTTGSTRELQFHQAGPNTVAEQSKNWLPGPCYRQQRLSKNIDSNNNSNFAWTGATKYHLNGRNSLTNPGVAMATNKDDEDQFLPINGVLVFGKTGAANKTTLENVLMTSEEEIKTTNPVATEEYGVVSSNLQSSTAGPRTQTVNSQGALPGMVWQNRDVYLQGPIWAEIPHTDGNFHPSPLMGGFGLKHPPPQILIKNTPVPANPPEVFTPAKFASFITQYSTGQVSVEIEWELQKENSKRWNPEIQYTSNYAKSNNVEFAVNNEGVYTEPRPIGTRYLTRNL

SEQ ID NO: 144 - DNA, 3102 bp, Adeno-associated virus
gcggccgcgaattcgcccttcgcagagaccaaagttcaactgaaacgaatcaaccggtttattgattaacaagtaattacaggttacgggtgaggtaacgggtgccaatggggcgaggctcagtataaaccccttcgttgttgacagcaaattccacattattagacttggcataatttgaggtgtactgaatctctggattccagcgtttgctgttttctttctgcagttcccactcgatctccacgctgacctggccggtgctgtactgcgtgataaatgaggcaaacttggcaggagtaaacacctctggaggattagcaggtaccggggtgtttttgatgagaatttgaggaggcgggtgtttgagtccaaatccgcccatcaggggagacgggtgaaagttgccgtccgtgtgaggaatttcggcccagatgggaccctgcaggtacacgtcccggttctgccagaccatgccgggcagagccccctggctgttgacagtctgtgtccggggtccggccgtagacgattgcaggttgctggagaccacaccgtattcttctgtagccacgggattggtggttttgatctcctcctcgctggtcattagcacgttttccagcgttgtcttgttggcagcccccgttttgccaaaaaccagcactccgttgatgggaaggaactggtcctcgtcgtccttgttggtggccatggctacgcccgggttggttaatgaatttctaccattcagatggtatttagtggccccggtccaggcaaagttactgttgttgttgctgtctatgttttttgacagtctctgctgccgataacagggtccgggcagccagttctttgattgctcggccacggtgttgggcccagcctgatggaactgcagctcccttgtggaccccgtagtgctctgggtccgggccaggtagtacaggtactggtcgatgaggggattcatcagccggtccaggctctggctgtgcgcatagctgctgtggaaaggcacttcctcaaaggtgtagctgaattcaaagttattgcccgttctcagcatctgagaaggaaagtactccaggcagcagaaggaggaacgtcccacagactgactgccgttgtttagagtcagatatccgtactgaggaatcatgaacacgtccgcagggaacggagggaggcagccctggtgcgcagagccgaggacgtacggcagttggtactccgagtccgagaagacctgaatcgtgctggtaaggttattagcgatggtcgtaacgccgtcgttcgtcgtgacctccttgacctggatgttgaacaacttgaaccgcagctttctgggccggaatccccagttgttgttgatgagtcgctgccagtcacgtggtgagaagtggcagtggaatctgttgaagtcaaaatagccccagggggtgctgtagccgaagaagtggttgtcgttggtagccccgctctgacttgatatctgcttgtagaggtggttgttgtaggtgggcagggcccaggtgcgggtgctggtggtgatgactctgtcgcccagccatgtggaatcgcaatgccaatttccggaggcattacccactccgtcggcgccttcgttattgtctgccattggtgcgccaccgcctgcagccattgtaccagatcccagacctgagggcgcggcgggaggttctccgagaggttgggggtcgggcactgactctgagtcgccagtctgcccaaagttgagcttctttttagcgggctgctggcctttcttgccgatgcccgtggaggagtcgggggattctatgggtctcttctttccggaagccgtcttagcgccttcctcaaccagaccgagaggttcgagaacccgcttcttggcctggaagactgctcgcccgaggttgcccccaaaagacgtatcttcttgaagacgctcctgaaactcggcgtcggcgtggttgtacttgaggtacgggttgtccccctgctcgagctgcttgtcgtaggccttgtcgtgctcgagggccgcggcgtctgcctcgttgaccggctctcccttgtcgagtccgttgaagggtccgaggtacttgtagccaggaagcaccagaccccggccgtcgtcctgcttttgctggttggctttgggtttcggggctccaggtttcaagtcccaccactcgcgaatgccctcagagaggttgtcctcgagccaatctggaagataaccatcggcagccatacctggtttaagtcatttattgctcagaaacacagtcatccaggtccacgttgaccagatcgcaggccgagcaagcaatctcgggagcccgccccagcagatgatgaatggcacagagtttccgatacgtcctctttctgacgaccggttgagattctgacacgccggggaaacattctgaacagtctctggtcccgtgcgtgaagcaaatgttgaaattctgattcattctctcgcatgtcttgcagggaaacagcatctgaagcatgcccgcgtgacgagaacatttgttttggtacctgtcggcaaagtccaccggagctccttccgcgtctgacgtcgatggatccgcgactgaggggcaagcccgcttgggctcgcttttatccgcgtcatcgggggcgggtctcttgttggctccaccctttctgacgtagaactcatgcgccacctcggtcacgtgatcctgcgcccagcggaagaactctttgacttcctgctttgtcaccttgccaaagtcatgctccagacggcgggtgagttcaaatttgaacatccggtcttgtaacggctgctggtgctcgaaggtggtgctgttcccgtcaatcacggcgcacatgttggtgttggaagtgacgatcacgggggtgggatcgatctgggcggacgacttgcacttttggtccacgcgcaccttgctgccgccgagaatggccttggcggactccacgaccttggccgtcatcttgccctcctcccaccagatcaccatcttgtcgacgcaatcgttgaagggaaagttctcattggtccagttgacgcagccgaagggcgaattc

SEQ ID NO: 145 - protein, 728 aa, Adeno-associated virus
MAADGYLPDWLEDNLSEGIREWWDLKPGAPKPKANQQKQDDGRGLVLPGYRYLGPFNGLDKGEPVNEADAAALEHDKAYDKQLEQGDNPYLKYNHADAEFQERLQEDTSFGGNLGRAVFQAKKRVLEPLGLVEEGAKTAPGKKRPIESPDSSTGIGKNGQPPAKKKLNFGQTGDSESVPDPQPLGEPPAAPSGLGSGTMAAGGGAPMADNNEGADGVGNASGNWHCDSTWLGDRVITTSTRTWALPTYNNHLYKQISSQSGATNDNHFFGYSTPWGYFDFNRFHCHFSPRDWQRLINNNWGFRPRKLRFKLFNIQVKEVTTNDGVTTIANNLTSTIQVFSDSEYQLPYVLGSAHQGCLPPFPADVFMIPQYGYLTLNNGSQSVGRSSFYCLEYFPSQMLRTGNNFEFSYTFEEVPFHSSYAHSQSLDRLMNPLIDQYLYYLARTQSTTGSTRELQFHQAGPNTMAEQSKNWLPGPCYRQQRLSKNIDSNNNSNFAWTGATKYHLNGRNSLTNPGVAMATNKDDEDQFFPINGVLVFGKTGAANKTTLENVLMTSEEEIKTTNPVATEEYGVVSSNLQSSTAGPQTQTVNSQGALPGMVWQNRDVYLQGPIWAKIPHTDGNFHPSPLMGGFGLKHPPPQILIKNTPVPANPPEVFTPAKFASFITQYSTGQVSVEIEWELQKENSKRWNPEIQYTSNYAKSNNVEFAVNNEGVYTEPRPIGTRYLTRNL

SEQ ID NO: 146 - protein, 728 aa, Artificial Sequence
  Description of Artificial Sequence: Synthetic polypeptide
MAADGYLPDWLEGNLSEGIREWWDLKPGAPKPKANQQKQDDGRGLVLPGYRYLGPFNGLDKGEPVNEADAAALEHDKAYDKQLEQGDNPYLKYNHADAEFQERLQEDTSFGGNLGRAVFQAKKRVLEPLGLVEEGAKTAPGKKRPIESPDSSTGIGKNGQPPAKKKLNFGQTGDSESVPDPQPLGEPPAAPSGLGSGTMAAGGGAPMADNNEGADGVGNASGNWHCDSTWLGDRVITTSTRTWALPTYNNHLYKQISSQSGATNDNHFFGYSTPWGYFDFNRFHCHFSPRDWQRLINNNWGFRPRKLRFKLFNIQVKEVTTNDGVTTIANNLTSTIQVFSDSEYQLPYVLGSAHQGCLPPFPADVFMIPQYGYLTLNNGSQSVGRSSFYCLEYFPSQMLRTGDNFEFSYTFEEVPFHSSYAHSQSLDRLMNPLIDQYLYYLARTQSTTGSTRELQFHQAGPNTMAEQSKNWLPGPCYRQQRLSKNIDSNNNSNFAWTGATKYHLNGRNSLTNPGVAMATNKDDEDQFFPINGVLVFGKTGAANKTTLENVLMTSEEEIKTTNPVATEEYGVVSSNLQSSTAGPQTQTVNSQGALPGMVWQNRDVYLQGPIWAKIPHTDGNFHPSPLMGGFGLKHPPPQILIKNTPVPANPPEVFTPAKFASFITQYSTGQVSVEIEWELQKENSKRWNPEIQYTSNYAKSNNVEFAVNNEGVYTEPRPIGTRYLTRNL

SEQ ID NO: 147 - DNA, 3106 bp, Adeno-associated virus
gcggccgcgaattcgcccttcgcagagaccaaagttcaactgaaacgaatcagccggtttattgattaacaagtaattacaggttacgggtgaggtaacgggtgccaatggggcgaggctcagtataaaccccttcgttgttgacagcaaattccacattattagacttggcataatttgaggtgtactgaatctctggattccagcgtttgctgttttctttctgcagttcccactcgatctccacgctgacctggccggtgctgtactgcgtgataaatgaggcaaacttggcaggagtaaacacctctggaggattagcaggtaccggggtgtttttgatgagaatttgaggaggcgggtgtttgagtccaaatccgcccatcaggggagacgggtgaaagttgccgtccgtgtgaggaattttggcccagatgggaccctgcaggtacacgtcccggttctgccagaccatgccgggcagagccccctggctgttgacagtctgtgtctggggtccggccgtagacgattgcaggttgctggagaccacaccgtattcttctgtagccacgggattggtggttttgatctcctcctcgctggtcattagcacgttttccagcgttgtcttgttggcagcccccgttttgccaaaaaccagcactccgttgatgggaaagaactggtcctcgtcgtccttgttggtggccatggctacgcccgggttggttaatgaatttctaccattcagatggtatttagtggccccggtccaggcaaagttactgttgttgttgctgtctatgttttttgacagtctctgctgccgataacagggtccgggcagccagttctttgattgctcggccatggtgttgggcccagcctgatggaactgcagctcccttgtggaccccgtagtgctctgggtccgggccaggtagtacaggtactggtcgatgaggggattcatcagccggtccaggctctggctgtgcgcatagctgctgtggaaaggcacttcctcaaaggtgtagctgaattcaaagttatcgcccgttctcagcatctgagaaggaaagtactccaggcagtagaaggaggaacgtcccacagactgactgccgttgtttagagtcagatatccgtactgaggaatcatgaacacgtccgcagggaacggagggaggcagccctggtgcgcagagccgaggacgtacggcagttggtactccgagtccgagaagacctgaatcgtgctggtaaggttattagcgatggtcgtaacgccgtcgttcgtcgtgacctccttgacctggatgttgaacaacttgaaccgcagctttctgggccggaatccccagttgttgttgatgagtcgctgccagtcacgtggtgagaagtggcagtggaatctgttgaagtcaaaatagccccagggggtgctgtagccgaagaagtggttgtcgttggtagccccgctctgacttgatatctgcttgtagaggtggttgttgtaggtgggcagggcccaggtgcgggtgctggtggtgatgactctgtcgcccagccatgtggaatcgcaatgccaatttccggaggcattacccactccgtcggcgccttcgttattgtctgccattggtgcgccaccgcctgcagccattgtaccagatcccagacctgagggcgcggcgggaggttctccgagaggttgggggtcgggcactgactctgagtcgccagtctgcccaaagttgagcttctttttagcgggcggctggccgttcttgccgatgcccgtggaggagtcgggggattctatgggtctcttctttccaggagccgtcttagcgccttcctcaaccagaccgagaggttcgagaacccgcttcttggcctggaagactgctcgcccgaggttgcccccaaaagacgtatcttcttgaagacgctcctgaaactcggcgtcggcgtggttgtacttgaggtacgggttgtccccctgctcgagctgcttgtcgtaggccttgtcgtgctcgagggccgcggcgtctgcctcgttgaccggctctcccttgtcgagtccgttgaagggtccgaggtacctgtagccaggaagcaccagaccccggccgtcgtcctgcttttgctggttggctttgggtttcggggctccaggtttcaagtcccaccactcgcgaatgccctcagagaggttgccctcgagccaatctggaagataaccatcggcagccatacctggtttaagtcatttattgctcagaaacacagtcatccaggtccacgttggccagatcgcaggccgagcaagcaatctcgggagcccgccccagcagatgatgaatggcacagagtttccgatacgtcctctttctgacgaccggttgagattctgacacgccggggaaacattctgaacagtctctggtcccgtgcgtgaagcaaatgttgaaattctgattcattctctcgcatgtcttgcaggggaacagcatctgaagcatgcccgcgtgacgagaacatttgttttggtacctgtcggcaaagtccaccggagctccttccgcgtctgacgtcgatggatccgcgactgaggggcaggcccgcttgggctcgcttttatccgcgtcatcgggggcgggtctcttgttggctccaccctttctgacgtagaactcatacgccacctcggtcacgtgatcctgcgcccagcggaagaactctttgacttcctgctttgtcaccttgccaaagtcatgctccagacggcgggtgagttcaaatttgaacatccggtcttgtaacggctgctggtgctcgaaggtggtgctgttcccgtcaatcacggcgcacatgttggtgttggaagtgacgatcacgggggtgggatcgatctgggcggacgacttgcacttttggtccacgcgcaccttgctgccgccgagaatggccttggcggactccacgaccttggccgtcatcctgccctcctcccaccagatcaccatcttgtcgacgcaatcgttgaagggaaagttctcattggtccagttgacgcagccgtagaaagggcgaattc

SEQ ID NO: 148 - protein, 728 aa, Artificial Sequence
  Description of Artificial Sequence: Synthetic polypeptide
MAADGYLPDWLEDNLSEGIREWWDLKPGAPKPKANQQKQDDGRGLVLPGYKYLGPFNGLDKGEPVNEADAAALEHDKAYDKQLEQGDNPYLKYNHADAEFQERLQEDTSFGGNLGRAVFQAKKRVLEPLGLVEEGAKTAPGKKRPIESPDSSTGIGKKGQQPAKKKLNFGQTGDSESVPDPQPLGEPPAAPSGLGSGTMAAGGGAPMADNNEGADGVGNASGNWHCDSTWLGDRVITTSTRTWALPTYNNHLYKQISSQSGATNDNHFFGYSTPWGYFDFNRFHCHFSPRDWQRLINNNWGFRPRKLRFKLFNIQVKEVTTNDGVTTIANNLTSTIQVFSDSEYQLPYVLGSAHQGCLPPFPADVFMIPQYGYLTLNNGSQSMGRSSFYCLEYFPSQMLRTGNNFEFSYTFEEVPFHSSYAHSQSLDRLMNPLIDQYLYYLARTQSTTGSTRELQFHQAGPNTMAEQSKNWLPGPCYRQQRLSKNIDSNNNSNFAWTGATKYHLNGRNSLTNPGVAMATNKDDEGQFFPINGVLVFGKTGAANKTTLENVLMTSEEEIKTTNPVATEEYGVVSSNLQSSTAGPQTQTVNSQGALPGMVWQNRDVYLQGPIWAKIPHTDGNFHPSPLMGGFGLKHPPPQILIKNTPVPANPPGVFTPALFASFITQYSTGQVSVEIEWELQKENSKRWNPEIQYTSNYAKSNNVEFAVNNEGVYTEPRPIGTRYLTRNL

SEQ ID NO: 149 - DNA, 3098 bp, Adeno-associated virus
gaattcgcccttcgcagagaccaaagttcaactgaaacgaatcaaccggtttattgattaacaagtaattacaggttacgggtgaggtaacgggtgccaatggggcgaggctcagtataaaccccttcgttgttgacagcaaattccacattattagacttggcataatttgaggtgtactgaatctctggattccagcgtttgctgttttctttctgcagttcccactcgatctccacgctgacctggccggtgctgtactgcgtgataaatgaggcaaactaggcaggagtaaacacccctggaggattagcaggtaccggggtgtttttgatgagaatttgaggaggcgggtgtttgagtccaaatccgcccatcaggggagacgggtgaaagttgccgtccgtgtgaggaattttggcccagatgggaccctgcaggtacacgtcccggttctgccagaccatgccgggcagagccccctggctgttgacagtctgtgtctggggtccggccgtagacgattgcaggttgctggagaccacaccgtattcttctgtagccacgggattggtggttttgatctcctcctcgctggtcattagcacgttttccagcgttgtcttgttggcagcccccgttttgccaaaaaccagcactccgttgatgggaaagaactggccctcgtcgtccttgttggtggccatggctacgcccgggttggttaatgaatttctaccattcagatggtatttagtggccccggtccaggcaaagttactgttgttgttgctgtctatgttttttgacagtctctgctgccgataacagggtccgggcagccagttctttgattgctcggccatggtgttgggcccagcctgatggaactgcagctcccttgtggaccccgtagtgctctgggtccgggccaggtagtacaggtactggtcgatgaggggattcatcagccggtccaggctctggctgtgcgcatagctgctgtggaaaggcacttcctcaaaggtgtagctgaattcaaagttattgcccgttctcagcatctgagaaggaaagtactccaggcagtagaaggaggaacgtcccatagactgactgccgttgtttagagtcagatatccgtactgaggaatcatgaacacgtccgcagggaacggagggaggcagccctggtgcgcagagccgaggacgtacggcagttggtactccgagtccgagaagacctgaatcgtgctggtaaggttattagcgatggtcgtaacgccgtcgttcgtcgtgacctccttgacctggatgttgaacaacttgaaccgcagctttctgggccggaatccccagttgttgttgatgagtcgctgccagtcacgtggtgagaagtggcagtggaatctgttgaagtcaaaatagccccagggggtgctgtagccgaagaagtggttgtcgttggtagccccgctctgacttgatatctgcttgtagaggtggttgttgtaggtgggcagggcccaggtgcgggtgctggtggtgatgactctgtcgcccagccatgtggaatcgcaatgccaatttccggaggcattacccactccgtcggcgccttcgttattgtctgccattggtgcgccaccgcctgcagccattgtaccagatcccagacctgagggcgcggcgggaggttctccgagaggttgggggtcgggcactgactctgagtcgccagtctgcccaaagttgagcttctttttagcgggctgctggcctttcttgccgatgcccgtggaggagtcgggggattctatgggtctcttctttccaggagccgtcttagcgccttcctcaaccagaccgagaggttcgagaacccgcttcttggcctggaagactgctcgcccgaggttgcccccaaaagacgtatcttcttgaagacgctcctgaaactcagcgtcggcgtggttgtacttgaggtacgggttgtccccctgctcgagctgcttgtcgtaggccttgtcgtgctcgagggccgcggcgtctgcctcgttgaccggctctcccttgtcgagtccgttgaagggtccgaggtacttgtagccaggaagcaccagaccccggccgtcgtcctgcttttgctggttggctttgggtttcggggctccaggtttcaagtcccaccactcgcgaatgccctcagagaggttgtcctcgagccaatctggaagataaccatcggcagccatacctggtttaagtcatttattgctcagaaacacagtcatccaggtccacgttgaccagatcgcaggccgagcaagcaatctcgggagcccgccccagcagatgatgaatggcacagagtttccgatacgtcctctttctgacgaccggttgagattctgacacgccggggaaacattctgaacagtctctggtcccgtgcgtgaagcaaatgttgaaattctgattcattctctcgcatgtcttgcagggaaacagcatctgaagcatgcccgcgtgacgagaacatttgttttggtacctgtcggcaaagtccaccggagctccttccgcgtctgacgtcgatggatccgcgactgaggggcaggcccgcttgggctcgcttttatccgcgtcatcgggggcgggcctcttgttggctccaccctttctgacgtagaactcatgcgccacctcggtcacgtgatcctgcgcccagcggaagaactctttgacttcctgctttgtcaccttgccaaagtcctgctccagacggcgggtgagttcaaatttgaacatccggtcttgtaacggctgctggtgctcgaaggtggtgctgttcccgtcaatcacggcgcacatgttggtgttggaagtgacgatcacgggggtgggatcgatctgggcggacgacttgcacttttggtccacgcgcaccttgctgccgccgagaatggccttggcggactccacgaccttggccgtcatcttgccctcctcccaccagatcaccatcttgtcgacgcaatcgttgaagggaaagttctcattggtccagttgacgcagccgtagaaagggcgaattc

SEQ ID NO: 150 - DNA, 2187 bp, Adeno-associated virus
atggctgccgatggttatcttccagattggctcgagggcaacctctctgagggcattcgcgagtggtgggacttgaaacctggagccccgaaacccaaagccaaccagcaaaagcaggacgacggccggggtctggtgcttcctggctacaggtacctcggacccttcaacggactcgacaagggagagccggtcaacgaggcagacgccgcggccctcgagcacgacaaggcctacgacaagcagctcgagcagggggacaacccgtacctcaagtacaaccacgccgacgccgagtttcaggagcgtcttcaagaagatacgtcttttgggggcaacctcgggcgagcagtcttccaggccaagaagcgggttctcgaacctctcggtctggttgaggaaggcgctaagacggctcctggaaagaagagacccatagaatcccccgactcctccacgggcatcggcaagaacggccagccgcccgctaaaaagaagctcaactttgggcagactggcgactcagagtcagtgcccgacccccaacctctcggagaacctcccgccgcgccctcaggtctgggatctggtacaatggctgcaggcggtggcgcaccaatggcagacaataacgaaggcgccgacggagtgggtaatgcctccggaaattggcattgcgattccacatggctgggcgacagagtcatcaccaccagcacccgcacctgggccctgcccacctacaacaaccacctctacaagcagatatcaagtcagagcggggctaccaacgacaaccacttcttcggctacagcaccccctggggctattttgacttcaacagattccactgccacttctcaccacgtgactggcagcgactcatcaacaacaactggggattccggcccagaaagctgcggttcaagttgttcaacatccaggtcaaggaggtcacgacgaacgacggcgttacgaccatcgctaataaccttaccagcacgattcaggtcttctcggactcggagtaccaactgccgtacgtcctcggctctgcgcaccagggctgcctccctccgttccctgcggacgtgttcatgattcctcagtacggatatctgactctaaacaacggcagtcagtctgtgggacgttcctccttctactgcctggagtactttccttctcagatgctgagaacgggcgataactttgaattcagctacacctttgaggaagtgcctttccacagcagctatgcgcacagccagagcctggaccggctgatgaatcccctcatcgaccagtacctgtactacctggcccggacccagagcactacggggtccacaagggagctgcagttccatcaggctgggcccaacaccatggccgagcaatcaaagaactggctgcccggaccctgttatcggcagcagagactgtcaaaaaacatagacagcaacaacaacagtaactttgcctggaccggggccactaaataccatctgaatggtagaaattcattaaccaacccgggcgtagccatggccaccaacaaggacgacgaggaccagttctttcccatcaacggagtgctggtttttggcaaaacgggggctgccaacaagacaacgctggaaaacgtgctaatgaccagcgaggaggagatcaaaaccaccaatcccgtggctacagaagaatacggtgtggtctccagcaacctgcaatcgtctacggccggaccccagacacagactgtcaacagccagggggctctgcccggcatggtctggcagaaccgggacgtgtacctgcagggtcccatctgggccaaaattcctcacacggacggcaactttcacccgtctcccctgatgggcggatttggactcaaacacccgcctcctcaaattctcatcaaaaacaccccggtacctgctaatcctccagaggtgtttactcctgccaagtttgcctcatttatcacgcagtacagcaccggccaggtcagcgtggagatcgagtgggaactgcagaaagaaaacagcaaacgctggaatccagagattcagtacacctcaaattatgccaagtctaataatgtggaatttgctgtcaacaacgaaggggtttatactgagcctcgccccattggcacccgttacctcacccgtaacctgtaa

SEQ ID NO: 151 - protein, 728 aa, Adeno-associated virus; identical to SEQ ID NO: 146

SEQ ID NO: 152 - protein, 728 aa, Adeno-associated virus
MAADGYLPDWLEDNLSEGIREWWDLKPGAPKPKANQQKQDDGRGLVLPGYRYLGPFNGLDKGEPVNEADAAALEHDKAYDKQLEQGDNPYLKYNHADAEFQERLQEDTSFGGNLGRAVFQAKKRVLEPLGLVEEGAKTAPGKKRPIESPDSSTGIGKNGQPPAKKKLNFGQTGDSESVPDPQPLGEPPAAPSGLGSGTMAAGGGAPMADNNEGADGVGNASGNWHCDSTWLGDRVITTSTRTWALPTYNNHLYKQISSQSGATNDNHFFGYSTPWGYFDFNRFHCHFSPRDWQRLINNNWGFRPRKLRFKLFNIQVKEVTTNDGVTTIANNLTSTIQVFSDSEYQLPYVLGSAHQGCLPPFPADVFMIPQYGYLTLNNGSQSVGRSSFYCLEYFPSQMLRTGDNFEFSYTFEEVPFHSSYAHSQSLDRLMNPLIDQYLYYLARTQSTTGSTRELQFHQAGPNTMAEQSKNWLPGPCYRQQRLSKNIDSNNNSNFAWTGATKYHLNGRNSLTNPGVAMATNKDDEDQFFPINGVLVFGKTGAANKTTLENVLMTSEEEIKTTNPVATEEYGVVSSNLQSSTAGPQTQTVNSQGALPGMVWQNRDVYLQGPIWAKIPHTDGNFHPSPLMGGFGLKHPPPQILIKNTPVPANPPEVFTPAKFASFITQYSTGQVSVEIEWELQKENSKRWNPEIQYTSNYAKSNNVEFAVNNEGVYTEPRPIGTRYLTRNL

SEQ ID NO: 153 - protein, 728 aa, Adeno-associated virus; identical to SEQ ID NO: 145

SEQ ID NO: 154 - protein, 728 aa, Adeno-associated virus
MAADGYLPDWLEDNLSEGIREWWDLKPGAPKPKANQQKQDDGRGLVLPGYKYLGPFNGLDKGEPVNEADAAALEHDKAYDKQLEQGDNPYLKYNHADAEFQERLQEDTSFGGNLGRAVFQAKKRVLEPLGLVEEGAKTAPGKKRPIESPDSSTGIGKNGQPPAKKKLNFGQTGDSESVPDPQPLGEPPAAPSGLGSGTMAAGGGAPMADNNEGADGVGNASGNWHCDSTWLGDRVITTSTRTWALPTYNNHLYKQISSQSGATNDNHFFGYSTPWGYFDFNRFHCHFSPRDWQRLINNNWGFRPRKLRFKLFNIQVKEVTTNDGVTTIANNLTSTIQVFSDSEYQLPYVLGSAHQGCLPPFPADVFMIPQYGYLTLNNGSQSVGRSSFYCLEYFPSQMLRTGNNFEFSYTFEEVPFHSSYAHSQSLDRLMNPLIDQYLYYLARTQSTTGSTRELQFHQAGPNTMAEQSKNWLPGPCYRQQRLSKNIDSNNNSNFAWTGATKYHLNGRNSLTNPGVAMATNKDDEDQFFPINGVLVFGKTGAANKTTLENVLMTSEEEIKTTNPVATEEYGVVSSNLQSSTAGPQTQTVNSQGALPGMVWQNRDVYLQGPIWAKIPHTDGNFHPSPLMGGFGLKHPPPQILIKNTPVPANPPEVFTPAKFASFITQYSTGQVSVEIEWELQKENSKRWNPEIQYTSNYAKSNNVEFAVNNEGVYTEPRPIGTRYLTRNL

SEQ ID NO: 155 - protein, 728 aa, Adeno-associated virus
MAADGYLPDWLEDNLSEGIREWWDLKPGAPKPKANQQKQDDGRGLVLPGYKYLGPFNGLDKGEPVNEADAAALEHDKAYDKQLEQGDNPYLKYNHADAEFQERLQEDTSFGGNLGRAVFQAKKRVLEPLGLVEEGAKTAPGKKRPIESPDSSTGIGKKGQQPAKKKLNFGQTGDSESVPDPQPLGEPPAAPSGLGSGTMAAGGGAPMADNNEGADGVGNASGNWHCDSTWLGDRVITTSTRTWALPTYNNHLYKQISSQSGATNDNHFFGYSTPWGYFDFNRFHCHFSPRDWQRLINNNWGFRPRKLRFKLFNIQVKEVTTNDGVTTIANNLTSTIQVFSDSEYQLPYVLGSAHQGCLPPFPADVFMIPQYGYLTLNNGSQSVGRSSFYCLEYFPSQMLRTGNNFEFSYTFEEVPFHSSYAHSQSLDRLMNPLIDQYLYYLARTQSTTGSTRELQFHQAGPNTMAEQSKNWLPGPCYRQQRLSKNIDSNNNSNFAWTGATKYHLNGRNSLTNPGVAMATNKDDEDQFFPINGVLVFGKTGAANKTTLENVLMTSEEEIKTTNPVATEEYGVVSSNLQSSTAGPQTQTVNSQGALPGMVWQNRDVYLQGPIWAKIPHTDGNFHPSPLMGGFGLKHPPPQILIKNTPVPANPPEVFTPAKFASFITQYSTGQVSVEIEWELQKENSKRWNPEIQYTSNYAKSNNVEFAVNNEGVYTEPRPIGTRYLTRNL

SEQ ID NO: 156 - DNA, 2215 bp, Artificial Sequence
  Description of Artificial Sequence: Synthetic polynucleotide
atggctgccgatggttatcttccagattggctcgaggacactctctctgaaggaataagacagtggtggaagctcaaacctggcccaccaccaccaaagcccgcagagcggcataaggacgacagcaggggtcttgtgcttcctgggtacaagtacctcggacccttcaacggactcgacaagggagagccggtcaacgaggcagacgccgcggccctcgagcacgacaaagcctacgaccggcagctcgacagcggagacaacccgtacctcaagtacaaccacgccgacgccgagttccaggagcggctcaaagaagatacgtcttttgggggcaacctcgggcgagcagtcttccaggccaaaaagaggcttcttgaacctcttggtctggttgaggaagcggctaagacggctcctggaaagaagaggcctgtagagcactctcctgtggagccagactcctcctcgggaaccggaaaggcgggccagcagcctgcaagaaaaagattgaattttggtcagactggagacgcagactcagtcccagaccctcaaccaatcggagaacctcccgcagccccctcaggtgtgggatctcttacaatggctgcaggcggtggcgcaccaatggcagacaataacgagggcgccgacggagtgggtaattcctcgggaaattggcattgcgattccacatggatgggcgacagagtcatcaccaccagcacccgaacctgggccctgcccacctacaacaaccacctctacaagcaaatctccaacagcacatctggaggatcttcaaatgacaacgcctacttcggctacagcaccccctgggggtattttgactttaacagattccactgccacttttcaccacgtgactggcagcgactcatcaacaacaactggggattccggcccaagagactcagcttcaagctcttcaacatccaggtcaaggaggtcacgcagaatgaaggcaccaagaccatcgccaataacctcaccagcaccatccaggtgtttacggactcggagtaccagctgccgtacgttctcggctctgcccaccagggctgcctgcctccgttcccggcggacgtgttcatgattccccagtacggctacctaacactcaacaacggtagtcaggccgtgggacgctcctccttctactgcctggaatactttccttcgcagatgctgagaaccggcaacaacttccagtttacttacaccttcgaggacgtgcctttccacagcagctacgcccacagccagagcttggaccggctgatgaatcctctgattgaccagtacctgtactacttgtctcggactcaaacaacaggaggcacgacaaatacgcagactctgggcttcagccaaggtgggcctaatacaatggccaatcaggcaaagaactggctgccaggaccctgttaccgccagcagcgagtatcaaagacatctgcggataacaacaacagtgaatactcgtggactggagctaccaagtaccacctcaatggcagagactctctggtgaatccgggcccggccatggcaagccacaaggacgatgaagaaaagtttttttcctcagagcggggttctcatctttgggaagcaaggctcagagaaaacaaatgtggacattgaaaaggtcatgattacagacgaagaggaaatcaggacaaccaatcccgtggctacggagcagtatggttctgtatctaccaacctccagagaggcaacagacaagcagctaccgcagatgtcaacacacaaggcgttcttccaggcatggtctggcaggacagagatgtgtaccttcaggggcccatctgggcaaagattccacacacggacggacattttcacccctctcccctcatgggtggattcggacttaaacaccctccgcctcagatcctgatcaagaacacgcctgtacctgcggatcctccgaccaccttcaaccagtcaaagctgaactctttcatcacccagtattctactggccaagtcagcgtggagatcgagtgggagctgcagaaggaaaacagcaagcgctggaaccccgagatccagtacacctccaactactacaaatctacaagtgtggactttgctgttaatacagaaggcgtgtactctgaaccccgccccattggcacccgttacctcacccgtaatctgtaa

SEQ ID NO: 157 - protein, 737 aa, Artificial Sequence
  Description of Artificial Sequence: Synthetic polypeptide
MAADGYLPDWLEDTLSEGIRQWWKLKPGPPPPKPAERHKDDSRGLVLPGYKYLGPFNGLDKGEPVNEADAAALEHDKAYDRQLDSGDNPYLKYNHADAEFQERLKEDTSFGGNLGRAVFQAKKRLLEPLGLVEEAAKTAPGKKRPVEHSPVEPDSSSGTGKAGQQPARKRLNFGQTGDADSVPDPQPIGEPPAAPSGVGSLTMAAGGGAPMADNNEGADGVGNSSGNWHCDSTWMGDRVITTSTRTWALPTYNNHLYKQISNSTSGGSSNDNAYFGYSTPWGYFDFNRFHCHFSPRDWQRLINNNWGFRPKRLSFKLFNIQVKEVTQNEGTKTIANNLTSTIQVFTDSEYQLPYVLGSAHQGCLPPFPADVFMIPQYGYLTLNNGSQAVGRSSFYCLEYFPSQMLKTGNNFQFTYTFEDVPFHSSYAHSQSLDRLMNPLIDQYLYYLSRTQTTGGTTNTQTLGFSQGGPNTMANQAKNWLPGPCYRQQRVSKTSADNNNSEYSWTGATKYHLNGRDSLVNPGPAMASHKDDEEKFFPQSGVLIFGKQGSEKTNVDIEKVMITDEEEIRTTNPVATEQYGSVSTNLQRGNRQAATADVNTQGVLPGMVWQDRDVYLQGPIWAKIPHTDGHFHPSPLMGGFGLKHPPPQILIKNTPVPADPPTTFNQSKLNSFITQYSTGQVSVEIEWELQKENSKRWNPEIQYTSNYYKSTSVDFAVNTEGVYSEPRPIGTRYLTRNL

SEQ ID NO: 158 - protein, 737 aa, Artificial Sequence
  Description of Artificial Sequence: Synthetic polypeptide
MAADGYLPDWLEDTLSEGIRQWWKLKPGPPPPKPAERHKDDSRGLVLPGYKYLGPFNGLDKGEPVNEADAAALEHDKAYDRQLDSGDNPYLKYNHADAEFQERLKEDTSFGGNLGRAVFQAKKRLLEPLGLVEEAAKTAPGKKRPVEHSPVEPDSSSGTGKAGQQPARKRLNFGQTGDADSVPDPQPIGEPPAAPSGVGSLTMAAGGGAPMADNNEGADGVGNSSGNWHCDSTWMGDRVITTSTRTWALPTYNNHLYKQISNSTSGGSSNDNAYFGYSTPWGYFDFNRFHCHFSPRDWQRLINNNWGFRPKRLSFKLFNIQVKEVTQNEGTKTIANNLTSTIQVFTDSEYQLPYVLGSAHQGCLPPFPADVFMIPQYGYLTLNNGSQAVGRSSFYCLEYFPSQMLKTGNNFQFTYTFEDVPFHSSYAHSQSLDRLMNPLIDQYLYYLSRTQTTGGTTNTQTLGFSQGGPNTMANQAKNWLPGPCYRQQRVSKTSADNNNSEYSWTGATKYHLNGRDSLVNPGPAMASHKDDEEKFFPQSGVLIFGKQGSEKTNVDIEKVMITDEEEIRTTNPVATEQYGSVSTNLQQGNTQAATADVNTQGVLPGMVWQDRDVYLQGPIWAKIPHTDGHFHPSPLMGGFGLKHPPPQILIKNTPVPADPPTTFNQSKLNSFITQYSTGQVSVEIEWELQKENSKRWNPEIQYTSNYYKSTSVDFAVNTEGVYSEPRPIGTRYLTRNL

SEQ ID NO: 159 - protein, 737 aa, Artificial Sequence
  Description of Artificial Sequence: Synthetic polypeptide
MAADGYLPDWLEDTLSEGIRQWWKLKPGPPPPKPAERHKDDSRGLVLPGYKYLGPFNGLDKGEPVNEADAAALEHDKAYDRQLDSGDNPYLKYNHADAEFQERLKEDTSFGGNLGRAVFQAKKRLLEPLGLVEEAAKTAPGKKRPVEHSPVEPDSSSGTGKAGQQPARKRLNFGQTGDADSVPDPQPIGEPPAAPSGVGSLTMAAGGGAPMADNNEGADGVGNSSGNWHCDSTWMGDRVITTSTRTWALPTYNNHLYKQISNSTSGGSSNDNAYFGYSTPWGYFDFNRFHCHFSPRDWQRLINNNWGFRPKRLSFKLFNIQVKEVTQNEGTKTIANNLTSTIQVFTDSEYQLPYVLGSAHQGCLPPFPADVFMIPQYGYLTLNNGSQAVGRSSFYCLEYFPSQMLRTGNNFQFTYTFEDVPFHSSYAHSQSLDRLMNPLIDQYLYYLSRTQTTGGTTNTQTLGFSQGGPNTMANQAKNWLPGPCYRQQRVSKTSADNNNSEYSWTGATKYHLNGRDSLVNPGPAMASHKDDEEKFFPQSGVLIFGKQGSEKTNVDIEKVMITDEEEIRTTNPVATEQYGSVSTNLQQGNTQAATADVNTQGVLPGMVWQDRDVYLQGPIWAKIPHTDGHFHPSPLMGGFGLKHPPPQILIKNTPVPADPPTTFNQSKLNSFITQYSTGQVSVEIEWELQKENSKRWNPEIQYTSNYYKSTSVDFAVNTEGVYSEPRPIGTRYLTRNL

SEQ ID NO: 160 - protein, 729 aa, Artificial Sequence
  Description of Artificial Sequence: Synthetic polypeptide
MAADGYLPDWLEDNLSEGIREWWDLKPGAPKPKANQQKQDDGRGLVLPGYKYLGPFNGLDKGEPVNAADAAALEHDKAYDQQLKAGDNPYLRYNHADAEFQERLQEDTSFGGNLGRAVFQAKKRVLEPLGLVEEGAKTAPGKKRPIDSPDSSTGIGKKGQQPAKKKLNFGQTGDSESVPDPQPLGEPPAAPSSVGSGTMAAGGGAPTADNNEGADGVGNASGNWHCDSTWLGDRVITTSTRTWALPTYNNHLYKQISSSSSGATNDNHYFGYSTPWGYFDFNRFHCHFSPRDWQRLINNNWGFRPKKLRFKLFNIQVKEVTTNDGVTTIANNLTSTVQVFSDSEYQLPYVLGSAHQGCLPPFPADVFMIPQYGYLTLNNGSQSVGRSSFYCLEYFPSQMLRTGNNFEFSYSFEDVPFHSSYAHSQSLDRLMNPLIDQYLYYLARTQSTTGSTRELQFHQAGPNTMAEQSKNWLPGPCYRQQRLSKNLDFNNNSNFAWTAATKYHLNGRNSLTNPGIPMATNKDDEDQFFPINGVLVFGKTGAANKTTLENVLMTSEEEIKTTNPVATEEYGVVSSNLQSSTAGPQSQTINSQGALPGMVWQNRDVYLQGPIWAKIPHTDGNFHPSPLMGGFGLEHPPPQILIKNTPVPANPPEVFTPAKFASFITQYSTGQVSVEIEWELQKENSKRWNPEIQYTSNYAKSNNVEFAVNPDGVYTEPRPIGTRYLTRNL

SEQ ID NO: 161 - DNA, 3075 bp, Adeno-associated virus
tgagaactttcctttcaacgattgcgtcggacaagatggtgatctggtgggaggaggggaagatgaccgccaaggtcgtggagtcggccaaagccattcttggaggaagcaaggtgcgtgtggaccagaaatgcaagtcctcggcccagatagacccgactcccgtgatcgtcacctccaacaccaacatgtgcgccgtgattgacgggaactcaacgaccttcgagcaccagcagccgttgcaagaccggatgttcaaatttgaacttacccgccgtctggatcatgactttggaaaggtcaccaagcaggaagtgaaagactttttccggtgggcaaaggatcacgtggttgaggtggagcatgaattctacgtcaaaaagggtggagctaagaaaagacccgcccccagtgacgcagatataagtgagcccaaacgggcgcgcgagtcagttgcgcagccatcaacgtcagacgcggaagcttcgatcaactacgcggacaggtaccaaaaacaaatgttctcgtcacgtgggcatgaatctgatgctgtttccctgcagacaatgcgagagaatgaatcagaattcaaatatctgcttcactcacggacagaaagactgtttagagtgctttcccgtgtcagaatctcaacccgtttctgtcgtcaaaaaggcgtatcagaaactgtgctacattcatcatatcatgggaaaggtgccagacgcttgcactgcctgcgatctggtcaatgtggatttggatgactgcatctctgaacaataaatgatttaaatcaggtatggctgccgatggttatcctccagattggctcgaggacactctctctgaagggataagacagtggtggaagctcaaacctggcccaccaccaccaaagcccgcagagcggcataaggacgacagcaggggtcttgtgcttcctgggtacaagtacctcggacccttcaacggactcgacaagggggagccggtcaacgaggcagacgccgcggccctcgagcacgacaaggcctacgaccggcagctcgacagcggagacaacccgtacctcaagtacaaccacgccgacgcagagtttcaggagcgccttaaagaagatacgtcttttgggggcaacctcggacgagcagtcttccaggcgaaaaagagggttcttgaacctctgggcctggttgaggaacctgttaagacggctccgggaaaaaagaggccggtagagcactctcctgtggagccagactcctcctcgggaaccggaaaagcgggccagcggcctgcaagaaaaagattaaattttggtcagactggagacgcagactccgtacctgacccccagcctctcggacagccaccagcagccccctctggtctgggatctactacaatggctacaggcagtggcgcaccaatggcagacaataacgagggtgccgatggagtgggtaattcctcaggaaattggcattgcgattcccaatggctgggcgacagagtcatcaccaccagcacccgaacctgggccctgcccacatacaacaaccacctctacaagcaaatctccagccaatcaggagccagcaacgacaaccactactttggctacagcaccccctgggggtattttgacttcaacagattccactgccacttttcaccacgtgactggcaaagactcatcaacaacaactggggattccggcccaaaagactcaacttcaagctctttaatattcaagtcaaagaggtcacgcagaatgacggtacgacgacgattgccaataaccttaccagcacggttcaggtgtttactgactcggagtaccagctcccgtacgtcctgggctcggcgcatcaaggatgcctcccgccgtttccagcggacgtcttcatggtcccacagtatggatacctcaccctgaacaacgggagtcaggcggtaggacgctcttccttttactgcctggagtactttccttctcagatgctgcgtactggaaacaactttcagttcagctacacttttgaagacgtgcctttccacagcagctacgctcacagccagagtctggatcggctgatgaatcctctgatcgaccagtacctgtattatctgaacaagacacaaacaaatagtggaactcttcagcagtctcggctactgtttagccaagctggaccaaccaacatgtctcttcaagctaaaaactggctgcctggaccttgctacagacagcagcgtctgtcaaaacaggcaaacgacaacaacaacagcaactttccctggactgcagctacaaagtatcatctaaatggccgggactcgttggttaatccaggaccagctatggccagtcacaaggatgacgaagaaaagtttttccccatgcatggaaccctgatatttggtaaacaaggaacaaatgccaacgacgcggatttggaaaatgtcatgattacagatgaagaagaaatcagggccaccaatcccgtggctacggagcagtacgggactgtgtcaaataatttgcaaaactcaaacactggtccaactactggaactgtcaatcgccaaggagcgttacctggtatggtgtggcaggatcgagacgtgtacctgcagggacccatttgggccaagattcctcacaccgatggacactttcatccttctccactgatgggaggttttggactcaaacacccgcctcctcagatcatgatcaaaaacactcccgttccagccaatcctcccacaaacttcagttctgccaagtttgcttctttcatcacacagtattccacgggacaggtcagcgtggagatcgagtgggagctgcagaaggagaacagcaaacgctggaatcccgaaattcagtacacttccaactacaacaagtctgttaatgtggactttactgtggacactaatggtgtgtattcagagcctcgccccattggcaccagatacctgactcgtaatctgtaattgcttgttaatcaataaaccgtttaattcgtttcagttgaactttggtctctgcgaagggcgaa

SEQ ID NO: 162 - DNA, 3142 bp, Adeno-associated virus
aaaacgacgggccagtgattgtaatacgactcactatagggcgaaattgaaattagcggccgcgaattcgcctttcgcagagaccaaagttcaactgaaacgaattaaacggtttattgattaacaagcaattacagattacgagtcaggtatctggtgccaatggggcgaggctctgaatacacaccattagtgtccacagtaaagtccacattaacagacttgttgtagttggaagtgtactgaatttcgggattccagcgtttgctgttctccttctgcagctcccactcgatctccacgctgacctgtcccgtggaatactgtgtgatgaaagaagcaaacttggcagaactgaagtttgtgggaggattggctggaacgggagtgtttttgatcatgatctgaggaggcgggtgtttgagtccaaaacctcccatcagtggagaaggatgaaagtgtccatcggtgtgaggaatcttggcccaaatgggtccctgcaggtacacgtctcgatcctgccacaccataccaggtaacgctccttggtgattgacagttccagtagttggaccagtgtttgagttttgcaaattatttgacacagtcccgtactgctccgtagccacgggattggtggccctgatttcttcttcatctgtaatcatgacattttccaaatccgcgtcgttggcatttgttccttgtttaccaaatatcagggttccatgcatggggaaaaacttttcttcgtcatccttgtgactggccatagctggtcctggattaaccaacgagtcccggccatttagatgatactttgtagctgcagtccagggaaagttgctgttgttgttgtcgtttgcctgttttgacagacgctgctgtctgtagcaaggtccaggcagccagtttttagcttgaagagacatgttggttggtccagcttggctaaacagtagccgagactgctgaagagttccactatttgtttgtgtcttgttcagataatacaggtactggtcgatcagaggattcatcagccgatccagactctggctgtgagcgtagctgctgtggaaaggcacgtcttcaaaagtgtagctgaactgaaagttgtttccagtacgcagcatctgagaaggaaagtactccaggcagtaaaaggaagagcgtcctaccgcctgactcccgttgttcagggtgaggtatccatactgtgggaccatgaagacgtccgctggaaacggcgggaggcatccttgatgcgccgagcccaggacgtacgggagctggtactccgagtcagtaaacacctgaaccgtgctggtaaggttattggcaatcgtcgtcgtaccgtcattctgcgtgacctctttgacttgaatattaaagagcttgaagttgagtcttttgggccggaatccccggttgttgttgacgagtctttgccagtcacgtggtgaaaagtggcagtggaatctgttgaagtcaaaatacccccagggggtgctgtagccaaagtagtggttgtcgttgctggctcctgattggctggagatttgcttgtagaggtggttgttgtatgtgggcagggcccaggttcgggtgctggtggtgatgactctgtcgcccagccattgggaatcgcaatgccaatttcctgaggaattacccactccatcggcaccctcgttattgtctgccattggtgcgccactgcctgtagccattgtagtagatcccagaccagagggggctgctggtggctgtccgagaggctgggggtcaggtacggagtctgcgtctccagtctgaccaaaatttaatctttttcttgcaggctgctggcccgcttttccggttcccgaggaggagtctggctccacaggagagtgctctaccggcctcttttttcccggagccgtcttaacaggctcctcaaccaggcccagaggttcaagaaccctctttttcgcctggaagactgctcgtccgaggttgcccccaaaagacgtatcttctttaaggcgctcctgaaactctgcgtcggcgtggttgtacttgaggtacgggttgtctccgctgtcgagctgccggtcgtaggccttgtcgtgctcgagggccgcggcgtctgcctcgttgaccggctcccccttgtcgagtccgttgaagggtccgaggtacttgtacccaggaagcacaagacccctgctgtcgtccttatgccgctctgcgggctttggtggtggtgggccaggtttgagcttccaccactgtcttattccttcagagagagtgtcctcgagccaatctggaagataaccatcggcagccatacctgatttaaatcatttattgttcagagatgcagtcatccaaatccacattgaccagatcgcaggcagtgcaagcgtctggcacctttcccatgatatgatgaatgtagcacagtttctgatacgcctttttgacgacagaaacgggttgagattctgacacgggaaagcactctaaacagtctttctgtccgtgagtgaagcagatatttgaattctgattcattctctcgcattgtctgcagggaaacagcatcagattcatgcccacgtgacgagaacatttgttttggtacctgtccgcgtagttgatcgaagcttccgcgtctgacgtcgatggctgcgcaactgactcgcgcgcccgtttgggctcacttatatctgcgtcactgggggcgggtcttttcttagctccaccctttttgacgtagaattcatgctccacctcaaccacgtgatcctttgcccaccggaaaaagtctttcacttcctgcttggtgacctttccaaagtcatgatccagacggcgggtaagttcaaatttgaacatccggtcttgcaacggctgctggtgctcgaaggtcgttgagttcccgtcaatcacggcgcacatgttggtgttggaggtgacgatcacgggagtcgggtctatctgggccgaggacttgcatttctggtccacacgcaccttgcttcctccaagaatggctttggccgactccacgaccttggcggtcatcttcccctcctcccaccagatcaccatcttgtcgacgcaatggtaaaaggaaagttctcattgg

SEQ ID NO: 163 - protein, 735 aa, Adeno-associated virus 2
MAADGYLPDWLEDTLSEGIRQWWKLKPGPPPPKPAERHKDDSRGLVLPGYKYLGPFNGLDKGEPVNEADAAALEHDKAYDRQLDSGDNPYLKYNHADAEFQERLKEDTSFGGNLGRAVFQAKKRVLEPLGLVEEPVKTAPGKKRPVEHSPVEPDSSSGTGKAGQQPARKRLNFGQTGDADSVPDPQPLGEPPATPAAVGPTTMASGGGAPMADNNEGADGVGNASGNWHCDSTWLGDRVITTSTRTWALPTYNNHLYKQISSASTGASNDNHYFGYSTPWGYFDFNRFHCHFSPRDWQRLINNNWGFRPKRLNFKLFNIQVKEVTQNDGTTTIANNLTSTVQVFTDSEYQLPYVLGSAHQGCLPPFPADVFMIPQYGYLTLNNGSQAVGRSSFYCLEYFPSQMLRTGNNFTFSYTFEDVPFHSSYAHSQSLDRLMNPLIDQYLYYLNRTQNQSGSAQDKALLFSRGSPAGMSVQPKNWLPGPCYRQQRVSKTKTDNNNSNFTWTGASKYNLNGRESIINPGTAMASHKDDKDKFFPMSGVMIFGKESAGASNTALDNVMITDEEEIKATNPVATERFGTVAVNFQSSSTDPATGDVHVMGALPGMVWQDRDVYLQGPIWAKIPHTDGHFHPSPLMGGFGLKHPPPQILIKNTPVPANPPAEFSATKFASFITQYSTGQVSVEIEWELQKENSKRWNPEVQYTSNYAKSANVDFTVDNNGLYTEPRPIGTRYLTRP

SEQ ID NO: 164 - protein, 740 aa, Adeno-associated virus 2
MAADGYLPDWLEDTLSEGIRQWWKLKPGPPPPKPAERHKDDSRGLVLPGYKYLGPFNGLDKGEPVNAADAAALEHDKAYDRQLDSGDNPYLKYNHADAEFQERLKEDTSFGGNLGRAVFQAKKRVLEPLGLVEEPVKTAPGKKRPVEHSPVEPDSSSGTGKAGQQPARKRLNFGQTGDADSVPDPQPLGQPPAAPSGLGTNTMATGSGAPMADNNEGADGVGNSSGNWHCDSTWMGDRVITTSTRTWALPTYNNHLYKQISSQSGASNDNHYFGYSTPWGYFDFNRFHCHFSPRDWQRLINNNWGFRPKRLNFKLFNIQVKEVTQNDGTTTIANNLTSTVQVFTDSEYQLPYVLGSAHQGCLPPFPADVFMVPQYGYLTLNNGSQAVGRSSFYCLEYFPSQMLRTGNNFTFSYTFEDVPFHSSYAHSQSLDRLMNPLIDQYLYYLSRTNTPSGTTTQSGLQFSQAGASDIRDQSRNWLPGPCYRQQRVSKTSADNNNSEYSWTGATKYHLNGRDSLVNPGPAMASHKDDEEKFFPQSGVLIFGKQGSEKTNVDIEKVMITDEEEIRTTNPVATEQYGSVSTNLQRGNRQAATADVNTQGVLPGMVWQDRDVYLQGPIWAKIPHTDGHFHPSPLMGGFGLKHPPPQILIKNTPVPANPSTTFSAAKFASFITQYSTGQVSVEIEWELQKENSKRWNPEIQYTSNYNKSVNVDFTVDTNGVYSEPRPIGTRYLTRNLLLAAA

SEQ ID NO: 165 - protein, 734 aa, Adeno-associated virus 2
MAADGYLPDWLEDTLSEGIRQWWKLKPGPPPPKPAERHKDDSRGLVLPGYKYLGPFNGLDKGEPVNEADAAALEHDKAYDRQLDSGDNPYLKYNHADAEFQERLKEDTSFGGNLGRAVFQAKKRVLEPLGLVEEPVKTAPGKKRPVEHSPVEPDSSSGTGKAGQQPARKRLNFGQTGDADSVPDPQPLGQPPAAPSGLGTNTMATGSGAPMADNNEGADGVGNSSGNWHCDSTWMGDRVITTSTRTWALPTYNNHLYKQISSQSGASNDNHYFGYSTPWGYFDFNRFHCHFSPRDWQRLINNNWGFRPKRLNFKLFNIQVKEVTQNDGTTTIANNLTSTVQVFTDSEYQLPYVLGSAHQGCLPPFPADVFMVPQYGYLTLNNGSQAVGRSSFYCLEYFPSQMLRTGNNFTFSYTFEDVPFHSSYAHSQSLDRLMNPLIDQYLYYLSRTNTPSGTTTQSGLQFSQAGASDIRDQSRNWLPGPCYRQQRVSKTSADNNNSEYSWTGATMYHLNGRDSLVNPGPAMASHKDDEEKFFPQSGVLIFGKQGSEKTNVDIEKVMITDEEEIRTTNPVATEQYGSVSTNLQRGNRQAATADVNTQGVLPGMVWQDRDVYLQGPIWAKIPHTDGHFHPSPLMGGFGLKHPPPQILIKNTPVPANPSTTFSAAKFASFITQYSTGQVSVEIEWELQKENSKRWNPEIQYTSNYNKSINVDFTVDTNGVYSEPRPIGTRYLTRN

SEQ ID NO: 166 - protein, 734 aa, Adeno-associated virus 2
MAADGYLPDWLEDTLSEGIRQWWKLKPGPPPPKPAERHKDDSRGLVLPGYKYLGPFNGLDKGEPVNEADAAALEHDKAYDRQLDSGDNPYLKYNHADAEFQERLKEDTSFGGNLGRAVFQAKKRVLEPLGLVEEPVKTAPGKKRPVEHSPVEPDSSSGTGKAGQQPARKRLNFGQTGDADSVPDPQPLGQPPAAPSGLGTNTMATGSGAPMADNNEGADGVGNSSGNWHCDSTWMGDRVITTSTRTWALPTYNNHLYKQISSQSGASNDNHYFGYSTPWGYFDFNRFHCHFSPRDWQRLINNNWGFRPKRLNFKLFNIQVKEVTQNDGTTTIANNLTSTVQVFTDSEYQLPYVLGSAHQGCLPPFPADVFMVPQYGYLTLNNGSQAVGRSSFYCLEYFPSQMLRTGNNFTFSYTFEDVPFHSSYAHSQSLDRLMNPLIDQYLYYLSRTNTPSGTTTQSGLQFSQAGASDIRDQSRNWLPGPCYRQQRVSKTSADNNNSEYSWTGATKYHLNGRDSLVNPGPAMASHKDDEEKFFPQSGVLIFGKQGSEKTNVDIEKVMITDEEEIRTTNPVATEQYGSVSTNLQRGNRQAATADVNTQGVLPGMVWQDRDVYLQGPIWAKIPHTDGHFHPSPLMGGFGLKHPPPQILIKNTPVPANPSTTFSEAKFASFITQYSTGQVSVEIEWELQKENSKRWNPEIQYTSNYNKSVNVDFTVDTNGVYSEPRPIGTRYLTRN

SEQ ID NO: 167 - protein, 739 aa, Adeno-associated virus 2
MAADGYLPDWLEDTLSEGIRQWWKLKPGPPPPKPAERHKDDSRGLVLPGYKYLGPFNGLDKGEPVNEADAAALEHDKAYDRQLDSGDNPYLKYNHADAEFQERLKEDTSFGGNLGRAVFQAKKRVLEPLGLVEEPVKTAPGKKRPVEHSPVEPDSSSGTGKAGQQPARKRLNFGQTGDADSVPDPQPLGQPPAAPSGLGTNTMATGSGAPMADNNEGADGVGNSSGNWHCDSTWMGDRVITTSTRTWALPTYNNHLYKQISSQSGASNDNHYFGYSTPWGYFDFNRFHCHFSPRDWQRLINNNWGFRPKRLNFKLFNIQVKEVTQNDGTTTIANNLTSTVQVFTDSEYQLPYVLGSAHQGCLPPFPADVFMVPQYGYLTLNNGSQAVGRSSFYCLEYFPSQMLRTGNNFTFSYTFEDVPFHSSYAHSQSLDRLMNPLIDQYLYYLSRTNTPSGTTTQSGLQFSQAGASDIRDQSRNWLPGPCYRQQRVSKTSADNNNSEYSWTGATKYHLNGRDSLVNPGPAMASHKDDEEKFFPQSGVLIFGKQGSEKTNVDIEKVMITDEEEIRTTNPVATEQYGSVSTNLQRGNRQAATADVNTQGVLPGMVWQDRDVYLQGPIWAKIPHTDGHFHPSPLMGGFGLKHPPPQILIKNTPVPANPSTTFSAAKFASFITQYSTGQVSVEIEWELQKENSKRWNPEIQYTSNYNKSVNVDFTVDTNGVYSEPRPIGTRYLTRNLLLAA

SEQ ID NO: 168 - protein, 725 aa, Adeno-associated virus 2
MAADGYLPDWLEDTLSEGIRQWWKLKPGPPPPKPAERHKDDSRGLVLPGYKYLGPFNGLDKGEPVNEADAAALEHDKAYDRQLDSGDNPYLKYNHADAEFQERLKEDTSFGGNLGRAVFQAKKRVLEPLGLVEEPVKTAPGKKRPVEHSPVEPDSSSGTGKAGQQPARKRLNFGQTGDADSVPDPQPLGQPPAAPSGLGTNTMATGSGAPMADNNEGADGVGNSSGNWHCDSTWMGDRVITTSTRTWALPTYNNHLYKQISSQSGASNDNHYFGYSTPWGYFDFNRFHCHFSPRDWQRLINNNWGFRPKRLNFKLFNIQVKEVTQNDGTTTIANNLTSTVQVFTDSEYQLPYVLGSAHQGCLPPFPADVFMVPQYGYLTLNNGSQAVGRSSFYCLEYFPSQMLRTGNNFTFSYTFEDVPFHSSYAHSQSLDRLMNPLIDQYLYYLSRTNTPSGTTTQSGLQFSQAGASDIRDQSRNWLPGPCYRQQRVSKTSADNNNSEYSWTGATKYHLNGRDSLVNPGPAMASHKDDEEKFFPQSGVLIFGKQGSEKTNVDIEKVMITDEEEIRTTNPVATEQYGSVSTNLQRGNRQAATADVNTQGVLPGMVWQDRDVYLQGPIWAKIPHTDGHFHPSPLMGGFGLKHPPPQILIKNTPVPANPSTTFSAAKFASFITQYSTGQVSVEIEWELQKENSKRWNPEIQYTSNYNKSVNVDFTVDTNGVYSEPRP

SEQ ID NO: 169 - protein, 707 aa, Adeno-associated virus 2
MAADGYLPDWLEDTLSEGIRQWWKLKPGPPPPKPAERHKDDSRGLVLPGYKYLGPFNGLDKGEPVNEADAAALEHDKAYDRQLDSGDNPYLKYNHADAEFQERLKEDTSFGGNLGRAVFQAKKRVLEPLGLVEEPVKTAPGKKRPVEHSPVEPDSSSGTGKAGQQPARKRLNFGQTGDADSVPDPQPLGQPPAAPSGLGTNTMATGSGAPMADNNEGADGVGNSSGNWHCDSTWMGDRVITTSTRTWALPTYNNHLYKQISSQSGASNDNHYFGYSTPWGYFDFNRFHCHFSPRDWQRLINNNWGFRPKRLNFKLFNIQVKEVTQNDGTTTIANNLTSTVQVFTDSEYQLPYVLGSAHQGCLPPFPADVFMVPQYGYLTLNNGSQAVGRSSFYCLEYFPSQMLRTGNNFTFSYTFEDVPFHSSYAHSQSLDRLMNPLIDQYLYYLSRTNTPSGTTTQSGLQFSQAGASDIRDQSRNWLPGPCYRQQRVSKTSADNNNSEYSWTGATKYHLNGRDSLVNPGPAMASHKDDEEKFFPQSGVLIFGKQGSEKTNVDIEKVMITDEEEIRTTNPVATEQYGSCIYQPPERQQTSSYRRCQHTRRSSRHGLAGQRCVPSGAHLGKDSTHGRTFSPLSPHGWIRTTPSSTDSHQEHPGTCESFDHLQCGKVCFLHHTVLHGTGQRGDRVRAAEGKQQTLESRNSVHFQLQQVC

SEQ ID NO: 170 - protein, 739 aa, Adeno-associated virus 2; identical to SEQ ID NO: 167

SEQ ID NO: 171 - protein, 737 aa, Adeno-associated virus 2
MASDGYLPDWLEDNLSEGIREWWDLKPGAPKPKANQQKQDDGRGLVLPGYKYLGPFNGLDKGEPVNAADAAALEHDKAYDQQLKAGDNPYLRYNHADAEFQERLQEDTSFGGNLGRAVFQAKKRVLEPFGLVEEGAKTAPGKKRPVEQSPQEPDSSSGIGKTGQQPAKKRLNFGQTGDSESVPDPQPLGEPPATPAAVGPTTMASGGGAPMADNNEGADGVGNASGNWHCDSTWLGDRVITTSTRTWALPTYNNHLYKQISSASTGASNDNHYFGYSTPWGYFDFNRFHCHFSPRDWQRLINNNWGFRPKRLNFKLFNIQVKEVTTNDGTTTIANNLTSTVQVFTDSEYQLPYVLGSAHQGCLPPFPADVFMVPQYGYLTLNNGSQAVGRSSFYCLEYFPSQMLRTGNNFTFSYTFEDVPFHSSYAHSQSLDRLMNPLIDQYLYYLSRTNTPSGTTTQSGLQFSQAGASDIRDQSRNWLPGPCYRQQRVSKTSADNNNSEYSWTGATKYHLNGRDSLVNPGPAMASHKDDEEKFFPQSGVLIFGKQGSEKTNVDIEKVMITDEEEIRTTNPVATEQYGSVSTNLQRGNRQAATADVNTQGVLPGMVWQDRDVYLQGPIWAKIPHTDGHFHPSPLMGGFGLKHHPPQILIKNTPVPANPSTTFSAAKFASFITQYSTGQVSVEIEWELQKENSKRWNPEIQYTSNYNKSVNVDFTVDTNGVYSEPRPIGTRYLTRNLL

SEQ ID NO: 172 - protein, 741 aa, Adeno-associated virus 2
MAADGYLPDWLEDTLSEGIREWWALKPGAPKPKANQQKQDDGRGLVLPGYKYLGPFNGLDKGEPVNEADAAALEHDKAYDQQLQAGDNPYLRYNHADAEFQERLQEDTSFGGNLGRAVFQAKKRVLEPLGLVEEPVKTAPGKKRPVEHSPVEPDSSSGTGKSGQQPARKRLNFGQTGDADSVPDPQPLGQPPAAPSGLGTNTMATGSGAPMADNNEGADGVGNSSGNWHCDSTWMGDRVITTSTRTWALPTYNNHLYKQISSQSGASNDNHYFGYSTPWGYFDFNRFHCHFSPRDWQRLINNNWGFRPKRLNFKLFNIQVKEVTQNDGTTTIANNLTSTVQVFTDSEYQLPYVLGSAHQGCLPPFPADVFMVPQYGYLTLNNGSQAVGRSSFYCLEYFPSQMLRTGNNFTFSYTFEDVPFHSSYAHSQSLDRLMNPLIDQYLYYLSRTNTPSGTTTQSGLQFSQAGASDIRDQSRNWLPGPCYRQQRVSKTSADNNNSEYSWTGATKYHLNGRDSLVNPGPAMASHKDDEEKFFPQSGVLIFGKQGSEKTNVDIEKVMITDEEEIRTTNPVATEQYGSVSTNLQRGNLANHNNTTNARQAATADVNTQGVLPGMVWQDRDVYLQGPIWAKIPHTDGHFHPSPLMGGFGLKHPPPQILIKNTPVPANPSTTFSAAKFASFITQYSTGQVSVEIEWELQKENSKRWNPEIQYTSNYNKSINVDFTVDTNGVYSEPRPIGTRYL

SEQ ID NO: 173 - protein, 730 aa, Adeno-associated virus 2
MASDGYLPDWLEDNLSEGIREWWDLKPGAPKPKANQQKQDDGRGLVLPGYKYLGPFNGLDKGEPVNAADAAALEHDKAYDQQLKAGDNPYLRYNHADAEFQERLQEDTSFGGNLGRAVFQAKKRVLEPFGLVEEGAKTAPGKKRPVEQSPQEPDSSSGIGKTGQQPAKKRLNFGQTGDSESVPDPQPLGEPPATPAAVGPTTMASGGGAPMADNNEGADGVGNASGNWHCDSTWLGDRVITTSTRTWALPTYNNHLYKQISSASTGASNDNHYFGYSTPWGYFDFNRFHCHFSPRDWQRLINNNWGFRPKRLNFKLFNIQVKEVTTNDGVTTIANNLTSTVQVFSDSEYQLPYVLGSAHQGCLPPFPADVFMIPQYGYLTLNNGSQAVGRSSFYCLEYFPSQMLRTGNNFTFSYTFEDVPFHSSYAHSQSLDRLMNPLIDQYLYYLNRTQNQSGSAQNNDLLFSRGSPAGMSVQPKNWLPGPCYRQQRVSKTKTDNNNSNFTWTGASKYNLNGRESIINPGTAMASHKDDKDKFFPMSGVMIFGKESAGASNTALDNVMITDEEEIKATNPVATERFGTVAVNLQSSSTDPATGDVHVMGALPGMVWQDRDVYLQGPIWAKIPHTDGHFHPSPLMGGFGLKNPPPQILIKNTPVPANPPAEFSATKFASFITQYSTGQVSVEIEWELQKENSKRWNPEVQYTSNYAKSANVDFTVDNNGLYTEPRPIGTR

SEQ ID NO: 174 - protein, 735 aa, Adeno-associated virus 2
  MOD_RES (239)..(239): Any amino acid
MASDGYLPDWLEDNLSEGIREWWDLKPGAPKPKANQQKQDDGRGLVLPGYKYLGPFNGLDKGEPVNAADAAALEHDKAYDQQLKAGDNPYLRYNHADAEFQERLQEDTSFGGNLGRAVFQAKKRVLEPFGLVEEGAKTAPGKKRPVEQSPQEPDSSSGIGKTGQQPAKKRLNFGQTGDSESVPDPQPLGEPPATPAAVGPTTMASGGGAPMADNNEGADGVGNASGNWHCDSTWLGDRXITTSTRTWALPTYNNHLYKQISSASTGASNDNHYFGYSTPWGYFDFNRFHCHFSPRDWQRLINNNWGFRPKRLNFKLFNIQVKEVTTNDGVTTIANNLTSTVQVFSDSEYQLPYVLGSAHQGCLPPFPADVFMIPQYGYLTLNNGSQAVGRSSFYCLEYFPSQMLRTGNNFTFSYTFEDVPFHSSYAHSQSLDRLMNPLIDQYLYYLNRTQNQSGSAQNNDLLFSRGSPAGMSVQPKNWLPGPCYRQQRVSKTKTDNNNSNFTWTGASKYNLNGRESIINPGTAMASHKDDKDKFFPMSGVMIFGKESAGASNTALDNVMITDEEEIKATNPVATERFGTVAVNLQSSSTDPATGDVHVMGALPGMVWQDRDVYLQGPIWAKIPHTDGHFHPSPLMGGFGLKNPPPQILIKNTPVPANPPAEFSATKFASFITQYSTGQVSVEIEWELQKENSKRWNPEVQYTSNYAKSANVDFTVDNNGLYTEPRPIGTRYLTRP

SEQ ID NO: 175 - protein, 733 aa, Adeno-associated virus 2
MASDGYLPDWLEDNLSEGIREWWDLKPGAPKPKANQQKQDDGRGLVLPGYKYLGPFNGLDKGEPVNAADAAALEHDKAYDQQLKAGDNPYLRYNHADAEFQERLQEDTSFGGNLGRAVFLAKKRVLEPFGLVEEGAKTAPGKKRPVEQSPQEPDSSSGIGKTGQQPAKKRLNFGQTGDSESVPDPQPLGEPPATPAAVGPTTMASGGGAPMADNNEGADGVGNASGNWHCDSTWLGDRVITTSTRTWALPTYNNHLYKQISSASTGASNDNHYFGYSTPWGYFDFNRFHCHFSPRDWQRLINNNWGFRPKRLNFKLFNIQVKEVTTNDGVTTIANNLTSTVQVFSDSEYQLPYVLGSAHQGCLPPFPADVFMIPQYGYLTLNNGSQAVGRSSFYCLEYFPSQMLRTGNNFTFSYTFEDVPFHSSYAHSQSLDRLMNPLIDQYLYYLNRTQNQSGSAQNNDLLFSRGSPAGMSVQPKNWLPGPCYRQQRVSKTKTDNNNSNFTWTGASKYNLNGRESIINPGTAMASHKDDKDKFFPMSGVMIFGKESAGASNTALDNVMITDEEEIKATNPVATERFGTVAVNLQSSSTDPATGDVHVMGALPGMVWQDRDVYLQGPIWAKIPHTDGHFHPSPLMGGFGLKNPPPQILIKNTPVPANPPAEFSATKFASFITQYSTGQVSVEIEWELQKENSKRWNPEVQYTSNYAKSANVDFTVDNNGLYTEPRPIGTRYLT

SEQ ID NO: 176 - protein, 734 aa, Adeno-associated virus 2
MAADGYLPDWLEDTLSEGIRQWWKLKPGPPPPKPAERHKDDSRGLVLPGCKYLGPFNGLDKGEPVNEADAAALEHDKAYDRQLDSGDNPYLKYNHADAEFQERLKEDTSFGGNLGRAVFQAKKRVLEPLGLVEEPVKTAPGKKRPVEHSPVEPDSSSGTGKAGQQPARKRLNFGQTGDADSVPDPQPLGQPPAAPSGLGTNTMATGSGAPMADNNEGADGVGNSSGNWHCDSTWMGDRVITTSTRTWALPTYNNHLYKQISSQSGASNDNHYFGYSTPWGYFDFNRFHCHFSPRDWQRLINNNWGFRPKRLNFKLFNIQVKEVTQNDGTTTIANNLTSTVQVFSDSEYQLPYVLGSAHQGCLPPFPADVFMIPQYGYLTLNNGSQAVGRSSFYCLEYFPSQMLRTGNNFTFNYTFEDVPFHSSYAHSQSLDRLMNPLIDQYLYYLNRTQNQSGSAQNNDLLFSRGSPAGMSVQPKNWLPGPCYRQQRVSKTKTDNNNSNFTWTGASKYNLNGRESIINPGTAMASHKDDKDKFFPMSGVMIFGKESAGASNTALDNVMITDEEEIKATNPVATERFGTVAVNLQSSSTDPATGDVHVMGALPGMVWQDRDVYLQGPIWAKIPHTDGHFHPSPLMGGFGLKNPPPQILIKNTPVPANPPAEFSATKFASFITQYSTGQVSVEIEWELQKENSKRWNPEVQYTSNYAKSANVDFTVDNNGLYTEPRPIGTRYLTRP

SEQ ID NO: 177 - protein, 734 aa, Adeno-associated virus 2
MAADGYLPDWLEDTLSEGIRQWWKLKPGPPPPKPAERHKDDSRGLVLPGYKYLGPFNGLDKGEPVNEADAAALEHDKAYDRQLDSGDNPYLKYNHADAEFQERLKEDTSFGGNLGRAVFQAKKRVLEPLGLVEEPVKTAPGKKRPVEHSPVEPDSSSGTGKAGQQPARKRLNFGQTGDADSVPDPQPLGQPPAAPSGLGTNTMATGSGAPMADNNEGADGVGNSSGNWHCDSTWMGDRVITTSTRTWALSTYNNHLYKQISSQSGASNDNHYFGYSTPWGYFDFNRFHCHFSPRDWQRLINNNWGFRPKRLNFKLFNIQVKEVTQNDGTTTIANNLTSTVQVFTDSEYQLPYVLGSAHQGCLPPFPADVFMVPQYGYLTLNNGSQAVGRSSFYCLEYFPSQMLRTGNNFTFSYTFEDVPFHSSYAHSQSLDRLMNPLIDQYLYYLSRTNTPSGTTTQSRLQFSQAGASDIRDQSRNWLPGPCYRQQRVSKTSADNNNSEYSWTGATKYHLNGRDSLVNPGPAMASHKDDEEKFFPQSGVLIFGKQGSEKTNVDIEKVMITDEEEIRTTNPVATEQYGSVSTNLQRGNRQAATADVNTQGVLPGMVWQDRDVYLQGPIWAKIPHTDGHFHPSPLMGGFGLKHPPPQILIKNTPVPANPSTTFSAAKFASFITQYSTGQVSVEIEWELQKENSKRWNPEIQYTSNYNKSINVDFTVDTNGVYSEPRPIGTRYLTRN

SEQ ID NO: 178 - protein, 738 aa, Adeno-associated virus 2
MAADGYLPDWLEDTLSEGIRQWWKLKPGPPPPKPAERHKDDSRGLVLPGYKYLGPFNGLDKGEPVNEADAAALEHDKAYDRQLDGGDNPYLKYNHADAEFQERLKEDTSFGGNLGRAVFQAKKRVLEPLGLVEEPVKTAPGKKRPVEHSPVEPDSSSGTGKAGQQPARKRLNFGQTGDADSVPDPQPLGQPPAAPSGLGTNTMATGSGAPMADNNEGADGVGNSSGNWHCDSTWMGDRVITTSTRTWALPTYNNHLYKQISSQSGASNDNHYFGYSTPWGYFDFNRFHCHFSPRDWQRLINNNWGFRPKRLNFKLFNIQVKEVTQNDGTTTIANNLTSTVQVFTDSEYQLPYVLGSAHQGCLPPFPADVFMVPQYGYLTLNNGSQAVGRSSFYCLEYFPSQMLRTGNNFTFSYTFEDVPFHSSYAHSQSLDRLMNPLIDQYLYYLSRTNTPSGTTTQSGLQFSQAGASDIRDQSRNWLPGPCYRQQRVSKTSADNNNSEYSWTGATKYHLNGRDSLVNPGPAMASHKDDEEKFFPQSGVLIFGKQGSEKTNVDIEKVMITDEEEIRTTNPVATEQYGSVSTNLQRGNRQAATADVNTQGVLPGMVWQDRDVYLQGPIWAKIPHTDGHFHPSPLMGGFGLKHPPPQILIKNTPVPANPSTTFSAAKFASFITQYSTGQVSVEIEWELQKENSKRWNPEIQYTSNYNKSVNVDFTVDTNGVYSEPRPIGTRYLTRNLLRP

SEQ ID NO: 179 - DNA, 2208 bp, Adeno-associated virus
atggctgccgatggttatcttccagattggctcgaggacactctctctgaaggaataagacagtggtggaagctcaaacctggcccaccaccaccaaagcccgcagagcggcataaggacgacagcaggggtcttgtgcttcctgggtacaagtacctcggacccttcaacggactcgacaagggggagccggtcaacgaggcagacgccgcggccctcgagcacgacaaggcctacgaccggcagctcgacagcggagacaacccgtacctcaagtacaaccacgccgacgcagagtttcaggagcgccttaaagaagatacgtcttttgggggcaacctcggacgagcagtcttccaggcgaaaaagagggttcttgaacctctgggcctggttgaggaacctgttaagacggctccgggaaaaaagaggccggtagagcactctcctgtggagccagactcctcctcgggaaccggaaaagcgggccagcagcctgcaagaaaaagattaaattttggtcagactggagacgcagactccgtacctgacccccagcctctcggacagccaccagcagccccctctggtctgggatctactacaatggctacaggcagtggcgcaccaatggcagacaataacgagggtgccgatggagtgggtaattcctcaggaaattggcattgcgattcccaatggctgggcgacagagtcatcaccaccagcacccgaacctgggccctgcccacatacaacaaccacctctacaagcaaatctccagccaatcaggagccagcaacgacaaccactactttggctacagcaccccctgggggtattttgacttcaacagattccactgccacttttcaccacgtgactggcaaagactcatcaacaacaactggggattccggcccaaaagactcaacttcaagctctttaatattcaagtcaaagaggtcacgcagaatggcggtacgacgacgattgccaataaccttaccagcacggttcaggtgtttactgactcggagtaccagctcccgtacgtcctgggctcggcgcatcaaggatgcctcccgccgtttccagcggacgtcttcatggtcccacagtatggatacctcaccctgaacaacgggagtcaggcggtaggacgctcttccttttactgcctggagtactttccttctcagatgctgcgtactggaaacaactttcagttcagctacacttttgaagacgtgcctttccacagcagctacgctcacagccagagtctggatcggctgatgaatcctctgatcgaccagtacctgtattatctgaacaagacacaaacaaatagtggaactcttcagcagtctcggctactgtttagccaagctggaccaaccaacatgtctcttcaagctaaaaactggctgcctggaccttgctacagacagcagcgtctgtcaaaacaggcaaacggcaacaacaacagcaactttccctggactgcagctacaaagtatcatctaaatggccgggactcgttggttaatccaggaccagctatggccagtcacaaggatgacgaagaaaagtttttccccatgcatggaaccctgatatttggtaaacaaggaacaaatgccaacgacgcggatttggaaaatgtcatgattacagatgaagaagaaatcagggccaccaatcccgtggctacggagcagtacgggactgtgtcaaataatttgcaaaactcaaacactggtccaactactggaactgtcaatcaccaaggagcgttacctggtatggtgtggcaggatcgagacgtgtacctgcagggacccatttgggccaagattcctcacaccgatggacactttcatccttctccactgacgggaggttttggactcaaacacccgcctcctcagatcatgatcaaaaacactcccgttccagccaatcctcccacaaacttcagttctgccaagtttgcttctttcatcacacagtattccacgggacaggtcagcgtggagatcgagtgggagctgcagaaggagaacagcaaacgctggaatcccgaaattcagtacacttccaactacaacaagtctgttaatgtggactttactgtggacactaatggtgtgtattcagagcctcgccccattggcaccagatacctgactcgtaatctgtaa

SEQ ID NO: 180 - protein, 735 aa, Adeno-associated virus
MAADGYLPDWLEDTLSEGIRQWWKLKPGPPPPKPAERHKDDSRGLVLPGYKYLGPFNGLDKGEPVNEADAAALEHDKAYDRQLDSGDNPYLKYNHADAEFQERLKEDTSFGGNLGRAVFQAKKRVLEPLGLVEEPVKTAPGKKRPVEHSPVEPDSSSGTGKAGQQPARKRLNFGQTGDADSVPDPQPLGQPPAAPSGLGSTTMATGSGAPMADNNEGADGVGNSSGNWHCDSQWLGDRVITTSTRTWALPTYNNHLYKQISSQSGASNDNHYFGYSTPWGYFDFNRFHCHFSPRDWQRLINNNWGFRPKRLNFKLFNIQVKEVTQNGGTTTIANNLTSTVQVFTDSEYQLPYVLGSAHQGCLPPFPADVFMVPQYGYLTLNNGSQAVGRSSFYCLEYFPSQMLRTGNNFQFSYTFEDVPFHSSYAHSQSLDRLMNPLIDQYLYYLNKTQTNSGTLQQSRLLFSQAGPTNMSLQAKNWLPGPCYRQQRLSKQANGNNNSNFPWTAATKYHLNGRDSLVNPGPAMASHKDDEEKFFPMHGTLIFGKQGTNANDADLENVMITDEEEIRATNPVATEQYGTVSNNLQNSNTGPTTGTVNHQGALPGMVWQDRDVYLQGPIWAKIPHTDGHFHPSPLTGGFGLKHPPPQIMIKNTPVPANPPTNFSSAKFASFITQYSTGQVSVEIEWELQKENSKRWNPEIQYTSNYNKSVNVDFTVDTNGVYSEPRPIGTRYLTRNL

SEQ ID NO: 181 - DNA, 2208 bp, Adeno-associated virus
atggctgccgatggttatcttccagattggctcgaggacactctctctgaaggaataagacagtggtggaagctcaaacctggcccaccaccaccaaagctcgcagagcggcatcaggacgacagcaggggtcttgtgcttcctgggtacaagtacctcggacccttcaacggactcgacaaaggagagccggtcaacgaggcagacgccgcggccctcgagcacgacaaggcctacgaccggcagctcgacagcggagacaacccgtacctcaagtacaaccacgccgacgcggagtttcaggagcgtcttaaagaagatacgtcttttgggggcaacctcggacgagcagtcttccaggcgaaaaagagggttcttgaacctctgggcctggttgaggaacctgttaagacggctccgggaaaaaagaggccggtagagcactctcctgtggagccagactcctcctcgggaaccggaaaggcgggccatcagcctgcgagaaagagattgaattttggtcagactggagacgcagactccgtacctgacccccagcctctcggacagccaccagcagcccccacaagtctgggatctactacaatggctacaggcagtggcgcaccaatggcagacaataacgagggtgccgatggagtgggtaattcctcaggaaattggcattgcgattcccaatggctgggcgacagagtcatcaccaccagcacccgaacctgggccctgcccacctacaacaaccacctctacaagcaaatctccagccaatcaggagcctcgaacgacaaccactactttggctacagcaccccctgggggtattttgacttcaacagattccactgtcacttctccccacgtgattggcaaagactcatcaacaacaactggggattccgacccaagagactcaacttcaagctctttaacattcaagtcaaagaggtcacgcagaatgacggtacgacgacgattgccaataaccttaccagcacggttcaggtgtttactgactcggagtaccagctcccgtacgtcctcggctcggcgcatcaaggatgcctcccgccgtttccagcggacgtcttcacggtcccacagtatggatacctcaccctgaacaacgggagtcaggcggtaggacgctcttccttttactgcctggagtactttccttctcagatgctgcgtactggaaacaaccttaccttcagctacacctttgaggacgttcctttccacagcagctacgctcacagccagagtttggaccggctgatgaatcctctgatcgaccagtatctatattatctgaacaggacacaatcaaatagtggaactcttcagcagtctaggctactgtttagccaagctggacccaccagcatgtctcttcaagctaaaaactggctgcctggaccttgctacagacagcagcgtctttcaaagcaggcaaacgacaacaacaacagcaactttccctggactgcggctacaaagtatcatctaaatggccgggactcgttggttaatccaggaccagctatggccagccacaaagacgatgaagaaaagtttttccccatgcatggaaccctgatatttggtaaacaaggaacaaatgctaacgacgcggatttggagcatgttatgattacagatgaagaagaaatcaggaccaccaatcctgtggctacagagcagtacggaaacgtgtcaaataatttgcaaaactcaaatactggtccaactacagaaaatgtcaatcaccagggagcgttacctggtatggtgtggcaggatcgagacgtgtacctgcagggacccatttgggccaagattcctcacaccgacggacactttcacccttctccactgatgggaggttttggactcaaacacccgcctcctcaaatcatgatcaaaaacactcccgttccagccaatcctcccacaaactacagttctgccaagtttgcttctttcatcacacagtattccacgggccaggtcagcgtggagattgagtgggagctgcggaaggagaacagcaaacgctggaaccccgagatccagtatacttccaactacaacaaatctgttaatgtggactttactgtggacactaatggtgtgtattcagagcctcgccccattggcaccagatacctgactcgtaatctgtaa

SEQ ID NO: 182 - protein, 735 aa, Adeno-associated virus
MAADGYLPDWLEDTLSEGIRQWWKLKPGPPPPKLAERHQDDSRGLVLPGYKYLGPFNGLDKGEPVNEADAAALEHDKAYDRQLDSGDNPYLKYNHADAEFQERLKEDTSFGGNLGRAVFQAKKRVLEPLGLVEEPVKTAPGKKRPVEHSPVEPDSSSGTGKAGHQPARKRLNFGQTGDADSVPDPQPLGQPPAAPTSLGSTTMATGSGAPMADNNEGADGVGNSSGNWHCDSQWLGDRVITTSTRTWALPTYNNHLYKQISSQSGASNDNHYFGYSTPWGYFDFNRFHCHFSPRDWQRLINNNWGFRPKRLNFKLFNIQVKEVTQNDGTTTIANNLTSTVQVFTDSEYQLPYVLGSAHQGCLPPFPADVFTVPQYGYLTLNNGSQAVGRSSFYCLEYFPSQMLRTGNNLTFSYTFEDVPFHSSYAHSQSLDRLMNPLIDQYLYYLNRTQSNSGTLQQSRLLFSQAGPTSMSLQAKNWLPGPCYRQQRLSKQANDNNNSNFPWTAATKYHLNGRDSLVNPGPAMASHKDDEEKFFPMHGTLIFGKQGTNANDADLEHVMITDEEEIRTTNPVATEQYGNVSNNLQNSNTGPTTENVNHQGALPGMVWQDRDVYLQGPIWAKIPHTDGHFHPSPLMGGFGLKHPPPQIMIKNTPVPANPPTNYSSAKFASFITQYSTGQVSVEIEWELRKENSKRWNPEIQYTSNYNKSVNVDFTVDTNGVYSEPRPIGTRYLTRNL

SEQ ID NO: 183 - DNA, 2208 bp, Adeno-associated virus
atggctgccgatggttatcttccagattggctcgaggacactctctctgaaggaataagacagtggtggaagctcaaacctggcccaccaccaccaaagcccgcagagcggcatcaggacgacagcaggggtcttgtgcttcctgggtacaagtacctcggacccttcaacggactcgacaaaggagagccggtcaacgaggcagacgccgcggccctcgagcacgacaaggcctacgaccggcagctcgacagcggagacaacccgtacctcaagtacaaccacgccgacgcggagtttcaggagcgtcttaaagaagatacgtcttttgggggcaacctcggacgagcagtcttccaggcgaaaaagagggttcttgaacctctgggcctggttgaggaacctgttaagacggctccgggaaaaaagaggccggtagagcactctcctgtggagccagactcctcctcgggaaccggaaaagcgggccatcagcctgcgagaaagagattgaattttggtcagactggagacgcagactccgtacctgacccccagcctctcggacagccaccagcagcccccacaagtttgggatctactacaatggctacaggcagtggcgcaccaatggcagacaataacgagggtgccgatggagtgggtaattcctcaggaaattggcattgcgattcccaatggctgggcgacagagtcatcaccaccagcacccgaacctgggccctgcccacctacaacaaccacctctacaagcaaatctccagccaatcaggagcctcgaacgacaaccactactttggctacagcaccccctgggggtattttgacttcaacagattccactgtcacttctccccacgtgattggcaaagactcatcaacaacaactggggattccgacccaagagactcaacttcaagctctttaacattcaagtcaaggaggtcacgcagaatgacggtacgacgacgattgccaataaccttaccagcacggttcaggtgtttactgactcggagtaccagctcccgtacgtcctcggctcggcgcatcaaggatgcctcccgccgtttccagcggacgtcttcatggtcccacagtatggatacctcaccctgaacaacgggagtcaggcggtaggacgctcttccttttactgcctggagtactttccttctcagatgctgcgtactggaaacaactttaccttcagctacacctttgaggacgttcctttccacagcagctacgctcacagccagagtttggaccggctgatgaatcctctgatcgaccagtatctatattatctgaacaggacacaatcaaatagtggaactcttcagcagtctaggctactgtttagccaagctggacccaccagcatgtctcttcaagctaaaaactggctgcctggaccttgctacagacagcagcgtctttcaaagcaggcaaacgacaacaacaacagcaactttccctggactgcggctacaaagtatcgtctaaatggccgggactcgttggttaatccaggaccagctatggccagccacaaagacgatgaagaaaagtttttccccatgcatggaaccctgatatttggtaaacaaggaacaaatgctaacgacgcggatttggagcatgttatgattacagatgaagaagaaatcaggaccaccaatcctgtggctacagagcagtacggaaacgtgtcaaataatttgcaaaactcaaatactggtccaactacagaaaatgtcaatcaccagggagcgttacctggtatggtgtggcaggatcgagacgtgtacctgcagggacccatttgggccaagattcctcacaccgacggacactttcacccttctccactgatgggaggttttggactcaaacacccgcctcctcaaatcatgatcaaaaacactcccgttccagccaatcctcccacaaacttcagttctgccaagtttgcttctttcatcacacagtattccacgggccaggtcagcgtggagattgagtgggagctgcagaaggagaacagcaaacgctggaaccccgagatccagtatacttccaactacaacaaatctgttaatgtggactttactgtggacactaatggtgtgtattcagagcctcgccccattggcaccagatacctgactcgtaatctgtaa

SEQ ID NO: 184 - protein, 735 aa, Adeno-associated virus
MAADGYLPDWLEDTLSEGIRQWWKLKPGPPPPKPAERHQDDSRGLVLPGYKYLGPFNGLDKGEPVNEADAAALEHDKAYDRQLDSGDNPYLKYNHADAEFQERLKEDTSFGGNLGRAVFQAKKRVLEPLGLVEEPVKTAPGKKRPVEHSPVEPDSSSGTGKAGHQPARKRLNFGQTGDADSVPDPQPLGQPPAAPTSLGSTTMATGSGAPMADNNEGADGVGNSSGNWHCDSQWLGDRVITTSTRTWALPTYNNHLYKQISSQSGASNDNHYFGYSTPWGYFDFNRFHCHFSPRDWQRLINNNWGFRPKRLNFKLFNIQVKEVTQNDGTTTIANNLTSTVQVFTDSEYQLPYVLGSAHQGCLPPFPADVFMVPQYGYLTLNNGSQAVGRSSFYCLEYFPSQMLRTGNNFTFSYTFEDVPFHSSYAHSQSLDRLMNPLIDQYLYYLNRTQSNSGTLQQSRLLFSQAGPTSMSLQAKNWLPGPCYRQQRLSKQANDNNNSNFPWTAATKYRLNGRDSLVNPGPAMASHKDDEEKFFPMHGTLIFGKQGTNANDADLEHVMITDEEEIRTTNPVATEQYGNVSNNLQNSNTGPTTENVNHQGALPGMVWQDRDVYLQGPIWAKIPHTDGHFHPSPLMGGFGLKHPPPQIMIKNTPVPANPPTNFSSAKFASFITQYSTGQVSVEIEWELQKENSKRWNPEIQYTSNYNKSVNVDFTVDTNGVYSEPRPIGTRYLTRNL

SEQ ID NO: 185 - DNA, 2208 bp, Adeno-associated virus
atggctgccgatggttatcttccagattggctcgaggacactctctctgaaggaataagacagtggtggaagctcaaacctggcccaccaccaccaaagcccgcagagcggcatcaggacgacagcaggggtcttgtgcttcctgggtacaagtacctcggacccttcaacggactcgacaaaggagagccggtcaacgaggcagacgccgcggccctcgagcacgacaaggcctacgaccggcagctcgacagcggagacaacccgtacctcaagtacaaccacgccgacgcggagtttcaggagcgtcttaaagaagatacgtcttttgggggcaacctcggacgagcagtcttccaggcgaaaaagagggttcttgaacctctgggcctggttgaggaacctgttaagacggctccgggaaaaaagaggccggtagagcactctcctgtggagccagactcctcctcgggaaccggaaaagcgggccatcagcctgcgagaaagagattgaattttggtcagactggagacgcagactccgtacctgacccccagcctctcggacagccaccagcagcccccacaagtttgggatctactacaatggctacaggcagtggcgcaccaatggcagacaataacgagggtgccgatggagtgggtaattcctcaggaaattggcattgcgattcccaatggctgggcgacagagtcatcaccaccagcacccgaacctgggccctgcccacctacaacaaccacctctacaagcaaatctccagccaatcaggagcctcgaacgacaaccactactttggctacagcaccccctgggggtattttgacttcaacagattccactgtcacttctccccacgtgattggcaaagactcatcaacaacaactggggattccgacccaagagactcaacttcaagctctttaacattcaagtcaaagaggtcacgcagaatgacggtacgacgacgattgccaataaccttaccagcacggttcaggtgtttactgactcggagtaccagctcccgtacgtcctcggctcggcgcatcaaggatgcctcccgccgtttccagcggacgtcttcatggtcccacagtatggatacctcaccctgaacaacgggagtcaggcggtaggacgcccttccttttactgcctggagtactttccttctcagatgctgcgtactggaaacaactttaccttcagctacacctttgaggacgttcctttccacagcagctacgctcacagccagagtttggaccggctgatgaatcctctgatcgaccagtatctatattatctgaacaggacacaatcaaatagtggaactcttcagcagtctaggctactgtttagccaagctggacccaccagcatgtctcttcaagctaaaaactggctgcctggaccttgctacagacagcagcgtctttcaaagcaggcaaacgacaacaacaacagcaactttccctggactgcggctacaaagtatcatctaaatggccgggactcgttggttaatccaggaccagctatggccagccacaaagacgatgaagaaaagtttttccccatgcatgggaccctgatatttggtaaacaaggaacaaatgctaacgacgcggatttggagcatgttatgattacagatgaagaagaaatcaggaccaccaatcctgtggctacagagcagtacggaaacgtgtcaaataatttgcaaaactcaaatactggtccaactacagaaaatgtcaatcaccagggagcgttacctggtatggtgtggcaggatcgagacgtgtacctgcagggacccatttgggccaagattcctcacaccgacggacactttcacccttctccactgatgggaggttttggactcaaacacccgcctcctcaaatcatgatcaaaaacactcccgttccagccaatcctcccacaaacttcagttctgccaagtttgcttctttcatcacacagtattccacgggccaggtcagcgtggagattgagtgggagctgcagaaggagaacagcaaacgctggaaccccgagatccagtatacttccaactacaacaaatctgttaatgtggactttactgtggacactaatggtgtgtattcagagcctcgccccattggcaccagatacctgactcgtaatctgtaa

SEQ ID NO: 186 - protein, 735 aa, Adeno-associated virus
MAADGYLPDWLEDTLSEGIRQWWKLKPGPPPPKPAERHQDDSRGLVLPGYKYLGPFNGLDKGEPVNEADAAALEHDKAYDRQLDSGDNPYLKYNHADAEFQERLKEDTSFGGNLGRAVFQAKKRVLEPLGLVEEPVKTAPGKKRPVEHSPVEPDSSSGTGKAGHQPARKRLNFGQTGDADSVPDPQPLGQPPAAPTSLGSTTMATGSGAPMADNNEGADGVGNSSGNWHCDSQWLGDRVITTSTRTWALPTYNNHLYKQISSQSGASNDNHYFGYSTPWGYFDFNRFHCHFSPRDWQRLINNNWGFRPKRLNFKLFNIQVKEVTQNDGTTTIANNLTSTVQVFTDSEYQLPYVLGSAHQGCLPPFPADVFMVPQYGYLTLNNGSQAVGRPSFYCLEYFPSQMLRTGNNFTFSYTFEDVPFHSSYAHSQSLDRLMNPLIDQYLYYLNRTQSNSGTLQQSRLLFSQAGPTSMSLQAKNWLPGPCYRQQRLSKQANDNNNSNFPWTAATKYHLNGRDSLVNPGPAMASHKDDEEKFFPMHGTLIFGKQGTNANDADLEHVMITDEEEIRTTNPVATEQYGNVSNNLQNSNTGPTTENVNHQGALPGMVWQDRDVYLQGPIWAKIPHTDGHFHPSPLMGGFGLKHPPPQIMIKNTPVPANPPTNFSSAKFASFITQYSTGQVSVEIEWELQKENSKRWNPEIQYTSNYNKSVNVDFTVDTNGVYSEPRPIGTRYLTRNL

SEQ ID NO: 187 - DNA, 2208 bp, Adeno-associated virus
atggctgccgatggttatcttccagattggctcgaggacactctctctgaaggaataagacagtggtggaagctcaaacctggcccaccaccaccaaagcccgcagagcggcataaggacgacagcaggggtcttgtgcttcctgggtacaagtacctcggacccttcaacggactcgacaagggagagccggtcaacgaggcagacgccgcggccctcgagcacgacaaggcctacgaccggcagctcgacagcggagacaacccgtacctcaagtacaaccacgccgacgcggagtttcaggagcgccttaaagaagatacgtcttttgggggcaacctcggacgagcagtcttccaggcaaaaaagagggttcttgaacctctgggcctggttgaggagcctgttaaaacggctccgggaaaaaagaggccggtagagcactctcctgcggagccagactcctcctcgggaaccggaaaagcgggccagcagcctgcaagaaaaagattgaatttcggtcagactggagacgcagactccgtacctgacccccagcctctcggacagccaccagcagccccctctggtctgggaactaatacgatggcttcaggcagtggcgcaccaatggcagacaataacgagggcgccgacggagtgggtaattcctcgggaaattggcattgcgattccacatggatgggcgacagagtcatcaccaccagcacccgaacttgggccctgcccacctacaacaaccatctctacaagcaaatctccagccaatcaggagccagcaacgacaaccactactttggctacagcaccccttgggggtattttgacttcaacagattccactgccacttttcaccacgtgactggcaaagactcatcaacaacaactggggattccggcccaagagactcaacttcaagctctttaacattcaagtcaaagaggtcacgcagaatgacggtacgacgacgattgccaataaccttaccagcacggttcaggtgtttactgactcggagtaccagctcccgtacgtcctcggctcggcgcatcaaggatgcctcccgccgttcccagcagacgtcttcatggtgccacagtatggatacctcaccctgaacaacgggagtcaggcagtaggacgctcttcattttactgcctggagtactttccttctcagatgctgcgtaccggaaacaactttaccttcagctacacctttgaggacgttcctttccacagcagctacgctcacagccagagtttggaccgtctcatgaatcctctcatcgaccagtacctgtattacttgagcagaacaaacactccaagcggaaccaccacgcagtccaggcttcagttttctcaggccggagcaagtgacattcgggaccagtctaggaactggcttcctggaccctgttaccgccagcagcgagtatcaaagacatctgcggataacaacaacagtgaatactcgtggactggagctaccaagtaccacctcaatggcagagactctctggtgaatccgggcccggccatggccagccacaaggacgatgaagaaaagttttttcctcagagcggggttctcatctttgggaagcaaggctcagagaaaacaaatgtggacattgaaaaggtcatgattacagacgaagaggaaatcaggaccaccaatcccgtggctacggagcagtatggttctgtatctaccaacctgcagggcggcaacacacaagcagctaccgcagatgtcaacacacaaggcgttcttccaggcatggtctggcaggacagagacgtgtacctgcaggggcccatctgggcaaagattccacacacggacggacattttcacccctctcccctcatgggcggattcggacttaaacaccctcctccacagattctcatcaagaacaccccggtacctgcgaatccttcgaccaccttcagtgcggcaaagtttgcttctttcatcacacagtattccacggggcaggtcagcgtggagatcgagtgggagctgcagaaggagaacagcaaacgctggaatcccgagatccagtacacttccaactacaacaaatctgttaatgtggactttactgttgacactaatggcgtgtattcagagcctcgccccattggcaccagatacctgactcgtaatctgtaa

SEQ ID NO: 188 - protein, 735 aa, Adeno-associated virus
MAADGYLPDWLEDTLSEGIRQWWKLKPGPPPPKPAERHKDDSRGLVLPGYKYLGPFNGLDKGEPVNEADAAALEHDKAYDRQLDSGDNPYLKYNHADAEFQERLKEDTSFGGNLGRAVFQAKKRVLEPLGLVEEPVKTAPGKKRPVEHSPAEPDSSSGTGKAGQQPARKRLNFGQTGDADSVPDPQPLGQPPAAPSGLGTNTMASGSGAPMADNNEGADGVGNSSGNWHCDSTWMGDRVITTSTRTWALPTYNNHLYKQISSQSGASNDNHYFGYSTPWGYFDFNRFHCHFSPRDWQRLINNNWGFRPKRLNFKLFNIQVKEVTQNDGTTTIANNLTSTVQVFTDSEYQLPYVLGSAHQGCLPPFPADVFMVPQYGYLTLNNGSQAVGRSSFYCLEYFPSQMLRTGNNFTFSYTFEDVPFHSSYAHSQSLDRLMNPLIDQYLYYLSRTNTPSGTTTQSRLQFSQAGASDIRDQSRNWLPGPCYRQQRVSKTSADNNNSEYSWTGATKYHLNGRDSLVNPGPAMASHKDDEEKFFPQSGVLIFGKQGSEKTNVDIEKVMITDEEEIRTTNPVATEQYGSVSTNLQGGNTQAATADVNTQGVLPGMVWQDRDVYLQGPIWAKIPHTDGHFHPSPLMGGFGLKHPPPQILIKNTPVPANPSTTFSAAKFASFITQYSTGQVSVEIEWELQKENSKRWNPEIQYTSNYNKSVNVDFTVDTNGVYSEPRPIGTRYLTRNL

SEQ ID NO: 189 - DNA, 3161 bp, Adeno-associated virus
gattgaatttagcggccgcgaattcgcccttgctgcgtcaactggaccaatgagaactttccattcaatgattgcgtcgacaagatggtgatctggtgggaggagggaaagatgaccgccaaggtcatggagtcggccaaagccattctcggaggaagcaaggtgcgcgtggaccagaaatgtaagtcctcggcccagatagacccgactcccgtgattgtcacctccaacaccaacatgtgcgccgtgattgacgggaactcaacgaccttcgagcaccagcagccgttgcaagaccggatgttcaaatttgaactcacccgccgtctggatcatgactttgggaaggtcaccaagcaggaagtcaaagactttttccggtgggcaaaggatcacgtggttgaggtggagcatgaattctacgtcaaaaagggtggagccaagaaaagacccgcccccagtgacgcagatataagtgagcccaaacgggcgcgcgggtcagttgcgcagccatcgacgtcagacgcggaagcttcgatcaactacgcggacaggtaccaaaacaaatgttctcgtcacgtgggcatgaatctgatgctgtttccctgcagacaatgcgagagaatgaatcaaaattcaaatatctgcttcactcacggacagaaggactgtttagagtgctttcccgtgtcagaatctcaacccgtttctgtcgtcaaaaaggcgtatcagaaactttgctacattcatcatatcatgggaaaggtgccagacgcttgcactgcctgcgatctggtcaatgtggatttggatgactgcatctctgaacaataaatgatttaaatcaggtatggctgccgatggttatcttccagattggctcaaggacactctctctgaaggaataagacagtggtggaagctcaaacctggcccaccaccaccaaagcccgcagagcggcataaggacgacagcgggggtcttgtgcttcctgggtacaagtacctcggacccttcaacggactcgacaagggagagccggtcaacgaggcagacgccgcggccctcgagtacgacaaggcctacgaccggcagctcgacagcggagacaacccgtacctcaagtacaaccacgccgacgcggagtttcaggagcgccttaaagaagatacgtcttttgggggcaacctcggacgagcagtcttccaggcgaaaaagagggttcttgaacctctgggcctggttgaggaacctgttaagacggctccgggaaaaaagaggccggtagagcactctcctgtggagccagactcctcctcgggaacaggaaaagcgggccagcagcctgcgagaaagagattgaattttggtcagactggagacgcagactccgtacctgacccccagcctctcggacagccaccagcagccccctctggtctgggaactaatacgatggctacaggcagtggcgcaccaatggcagacaataacgagggcgccgacggagtgggtaattcctcgggaagttggcattgcgattccacatggatgggcgacagagtcatcaccaccagcacccgaacctgggctctgcccacctacaacaaccatctgtacaagcagatctccagccaatcaggagccagcaacgacaaccactactttggctacagcaccccttgggggtattttgacttcaacagattccactgccacttttcaccacgtgactggcaaagactcatcaacaacaactggggattccggcccaagagactcaacttcaagctctttaacattcaagtcaaggaggtcacgcagaatgacggtacgacgacgattgccaataaccttaccagcacggttcaggtgtttactgactcggagtaccagctcccgtacgtccccggctcggcgcatcaaggatgcctcccgccgttcccagcagacgtcttcatggtgccacagtatggatacctcaccctgaacaacgggagtcaggcagtaggacgctcttcattttactgcctggagtactttccttctcagatgcttcgtaccggaaacaactttaccttcagctacacctttgaggatgttcctttccacagcagctacgctcacagccagagtttggaccgtctcatgaatcctctcatcgaccagtacctgtattacttgagcagaacaaacactccaagcggaaccaccacgcagtccaggcttcagttttctcaggccggagcaagtgacattcgggaccagtctaggaactggcttcctggaccctgttaccgccagcagcgagtatcaaagacagctgcggacaacaacaacagtgaatactcgtggactggagctaccaagtaccacctcaatggcagagactctctggtgaatccgggcccggccatggccagccacaaggacgatgaagaaaagttttttcctcaaagcggggttctcatctttgggaagcaaggctcagagaaaacaaatgtggacattgaaaaggtcatgattacagacgaagaggaaatcagaaccaccaatcccgtggccacggagcagtatggttctgtatctaccaacctccagagcggcaacacacaagcagctactgcagatgtcaacacacaaggcgttcttccaggcatggtctggcaggacagagacgtgcacctgcaggggcctatctgggcaaagattccacacacggacggacattttcacccctctcccctcatgggcggatttggacttaaacaccctcctccacagattctcatcaagaacaccccggtacctgcaaatccttcgaccaccttcagtgcggcaaagtttgcttccttcatcacacagtattccacagggcaggtcagcgtggagatcgagtgggagctgcagaaggagaacagcaaacgctggaaccccgagatccagtacacttccaactacaacaaatctgttaatgtggactttactgtggacactaatggtgtgtattcagagcctcgccccattggcaccagatacctgactcgtaatctgtaattgcttgttaatcaataaaccgtttaattcgtttcagttgaactttggtctctgcgaagggcgaattcgtttaaaccctgcaggactagtccctttagtgagg

SEQ ID NO: 190 - DNA, 3162 bp, Adeno-associated virus
gaattgaatttagcggccgcgaattcgcccttcgcagagaccaaagttcaactgaaacgaattaaacggtttattgattaacaagcaattacagattacgagtcaggtatctggtgccaatggggcgaggctctgaatacacgccattagtgtccacagtaaagtccacattaacagacttgttgtagttggaagtgtactgaatttcgggattccagcgtttgctgttttccttctgcagctcccactcgatctccacgctgacctgtcccgtggagtactgtgtgatgaaggaagcaaactttgccgcactgaaggtggtcgaaggattcgcaggtaccggggtgttcttgatgagaatctgtggaggagggtgtttaagtccgaatccacccatgaggggagaggggtgaaaatgtccgtccgtgtgtggaatctttgcccagatgggcccctgaaggtacacatctctgtcctgccagaccatgcctggaagaacgccttgtgtgttgacatctgcggtagctgcttgtctgttgcctctctggaggttggtagatacagaaccgtactgctccgtagccacgggattggttgtcctgatttcctcttcgtctgtaatcatgaccttttcaatgtccacatttgttttctctgagccttgcttcccaaagatgagaaccccgctctgaggaaaaaacttttcttcattgtccttgtggcttgccatggccgggcccggattcaccagagagtctctgccattgaggtggtacttggtagctccagtccacgagtattcactgttgttgttatccgcagatgtctttgatactcgctgctggcggtaacagggtccaggaagccagttcctagactggtcccgaatgtcactcgctccggcctgagaaaactgaagccttgactgcgtggtggttccacttggagtgtttgttgtgctcaagtaatacaggtactggtcgatgagaggattcatgagacggtccagactctggctgtgagcgtagccgctgtggaaaggaacgtcctcaaaagtgtagctgaaggtaaagttgtttccggtacgcagcatctgagaaggaaagtactccaggcagtaaaatgaagagcgtcctactgcctgactcccgttgttcagggtgaggtatccatactgtggcaccatgaagacgtctgctgggaacggcgggaggcatccttgatgcgccgagccgaggacgtacgggagctggtactccgagtcagtaaacacctgaaccgtgctggtaaggttattggcaatcgtcgtcgtaccgtcattctgcgtgacctctttgacttgaatgttaaagagcttgaagttgagtctcttgggtcggaatccccagttgttgttgatgagtctttgccagtcacgtggtgaaaagtggcagtggaatctgttgaagtcaaaatacccccaaggggtgctgtagccaaagtagtgattgtcgttcgaggctcctgattggctggaaatttgtttgtagaggtggttgttgtaggtgggcagggcccaggttcgggtgctggtggtgatgactctgtcgcccatccatgtggaatcgcaatgccaatttcccgaggaattacccactccgtcggcgccctcgttattgtctgccattggtgcgccactgcctgtagccatcgtattagttcccagaccagagggggctgctggtggctgtccgagaggctgggggtcaggtactgagtctgcgtctccagtctgaccaaaattcaatctttttcttgcaggctgctggcccgcctttccggttcccgaggaggagtctggctccacaggagagtgctctaccggcctcttttttcctggagccgtcttgacaggttccccaaccaggcccagaggttcaagaaccctctttttcgcctggaagactgctcgtccgaggttgcccccaaaagacgtatcttctttaaggcgctcctgaaactccgcgtcggcgtggttgtacttgaggtacgggttgtctccgctgtcgagctgccggtcgtaggctttgtcgtgctcgagggccgcggcgtctgcctcgttgaccggctctcccttgtcgagtccgttgaagggtccgaggtacttgtacccaggaagcacaagacccctgctgtcgtccttatgccgctctgcgggctttggtggtggtgggccaggtttgagcttccaccactgtcttattccttcagagagagtgtcctcgagccaatctggaagataaccatcggcagccatacctgatttaaatcatttattgttcaaagatgcagtcatccaaatccacattgaccagatcgcaggcagtgcaagcgtctggcacctttcccatgatatgatgaatgtagcacagtttctgatacgcctttttgacgacagaaacgggttgagattctgacacgggaaagcactctaaacagtctttctgtccgtgagtgaagcagatatttgaattctgattcattctctcgcattgtctgcagggaaacagcatcagattcatgcccacgtgacgagaacatttgttttggtacctgtctgcgtagttgatcgaagcttccgcgtctgacgtcgatggctgcgcaactgactcgcgcacccgtttgggctcacttatatctgcgtcactgggggcgggtcttttcttggctccaccctttttgacgtagaattcatgctccacctcaaccacgtgatcctttgcccaccggaaaaagtctttgacttcctgcttggtgaccttcccaaagtcatgatccagacggcgggtgagttcaaatttgaacatccggtcttgcaacggctgctggtgttcgaaggtcgttgagttcccgtcaatcacggcgcacatgttggtgttggaggtgacgatcacgggagtcgggtctatctgggccgaggacttgcatttctggtccacgcgcaccttgcttcctccgagaatggctttggccgactccacgaccttggcggtcatcttcccctcctcccaccagatcaccatcttgtcgacacagtcgttgaagggaaagttctcattggtccagttgacgcagcaagggcgaattcgtttaaacctgcaggactagtccctttagtgaggg

SEQ ID NO: 191 - DNA, 3164 bp, Adeno-associated virus
gcgaattgaatttagcggccgcgaattcgcccttcgcagagaccaaagttcaactgaaacgaattaaacggtttattgattaacaagcaattacaaattacgagtcaggtatctggtgccaatggggcgaggctctgaatacacgccattagtgtccacagtaaagtccacattaacagacttgttgtagttggaagtgtactgaatttcgggattccagcgtttgctgttttccttctgcagctcccactcgatctccacgctgacctgtcccgtggagtactgtgtgatgaaggaagcaaactttgccgcactgaaggtggtcgaaggattcgcaggtaccggggtgttcttgatgagaatctgtggaggagggtgtttaggtccgaatccacccatgaggggagaggggtgaaaatgtccgtccgtgtgtggaatctttgcccagatgggcccctgaaggtacacatctctgtcctgccagaccatgcctggaagaacgccttgtgtgttgacatctgcggtagctgcttgtctgttgcctctctggaggttggtagatacagaaccatactgctccgtagccacgggattggttgtcctgatttcctcttcgtctgtaatcatgaccttttcaatgtccacatttgttttctctgagccttgcttcccaaagatgagaaccccgctctgaggaaaaaacttttcttcattgtccttgtggcttgccatggccgggcccggattcaccagagagtctctgccattgaggtggtacttggtagctccagtccacgagtattcactgttgttgttatccgcagatgtctttgatactcgctgctggcggtaacagggtccaggaagccagttcctagactggtcccgaatgtcactcgctccggcctgagaaaactgaagccttgactgcgtggtggttccacttggagtgtttgttgtgctcaagtaatacaggtactggtcgatgagaggattcatgagacggtccagactctggctgtgagcgtagctgctgtggaaaggaacgtcctcaaaagtgtagctgaaggtaaagttgtttccggtacgcagcatctgagaaggaaagtactccgggcagtaaaatgaagagcgtcctactgcctgactcccgttgctcagggtgaggtatccatactgtggcaccatgaagacgtctgctgggaacggcgggaggcatccttgatgcgccgagccgaggacgtacgggagctggtactccgagtcagtaaacacctgaaccgtgctggtaaggttattggcaatcgtcgtcgtaccgtcattctgcgtgacctctttgacttgaatgttaaagagcttgaagttgagtctcttgggtcggaatccccagttgttgttgatgagtctttgccagtcacgtggtgaaaagtggcagtggaatctgttgaagtcaaaatacccccaaggggtgctgtagccaaagtagtgattgtcgttcgaggctcctgattggctggaaatttgtctgtagaggtggttgttgtaggtgggcagggcccaggttcgggtgctggtggtgatgactctgtcgcccatccatgtggaatcgcaatgccgatttcccgaggaattacccactccgtcggcgccctcgttattgtctgccattggtgcgccactgcctgtagccatcgtattagttcccagaccagagggggctgctggtggctgtccgagaggctgggggtcaggtactgagtctgcgtctccagtctgaccaaaattcaatctttttcttgcaggctgctggcccgcctttccggttcccgaggaggagtctggctccacaggagagtgctctaccggcctcttttttcccggagccgtcttaacaggttccccaaccaggcccagaggttcaagaaccctctttttcgcctggaagactgctcgtccgaggttgcccccaaaagacgtatcttctttaaggcgctcctgaaactccgcgtcggcgtggttgtacttgaggtacgggttgtctccgctgtcgagctgccggtcgtaggctttgtcgtgctcgagggccgcggcgtctgcctcgttgaccggctctcccttgtcgagtccgttgaagggtccgaggtacttgtacccaggaagcacaagacccctgctgtcgtccttatgccgctctgcgggctttggtggtggtgggccaggtttgagcttccaccactgtcttattccttcagagagagtgtcctcgagccaatctggaagataaccatcggcagccatacctgatttaaatcatttattgttcaaagatgcagtcatccaaatccacattgaccagatcgcaggcagtgcaagcgtctggcacctttcccatgatatgatgaatgtagcacagtttctgatacgcctttttgacgacagaaacgggttgagattctgacacgggaaagcactctaaacagtctttctgtccgtgagtgaagcagatatttgaattctgattcattctctcgcattgtctgcagggaaacagcatcagattcatgcccacgtgacgagaacatttgttttggtacctgtctgcgtagttgatcgaagcttccgcgtctgacgtcgatggctgcgcaactgactcgcgcacccgtttgggcccacttatatctgcgtcactgggggcgggtcttttcttggctccaccctttttgacgtagaattcatgctccacctcaaccacgtgatcctttgcccaccggaaaaagtctttgacttcctgcttggtgaccttcccaaagtcatgatccagacggcgggtgagttcaaatttgaacatccggtcttgcaacggctgctggtgttcgaaggtcgttgagttcccgtcaatcacggcgcacatgttggtgttggaggtgacgatcacgggagtcgggtctatctgggccgaggacttgcatttctggtccacgcgcaccttgcttcctccgagaatggctttggccgactccacgaccttggcggtcatcttcccctcctcccaccagatcaccatcttgtcgacacagtcgttgaagggaaagttctcattggtccagttgacgcagcaagggcgaattcgtttaaacctgcaggactagtccctttagtgaggg

SEQ ID NO: 192 - DNA, 3163 bp, Adeno-associated virus
accctcactaaagggactagtcctgcaggtttaaacgaattcgcccttgctgcgtcaactggagcaatgagaactttcccttcaacgactgtgtcgacaagatggtgatttggtgggaggaggggaagatgaccgccaaggtcgtggagtcggccaaagccattctcggaggaagcaaggtgcgcgtggaccagaaatgcaagtcctcggcccagatagatccgactcccgtgatcgtcacctccaacaccaacatgtgcgccgtgattgacgggaactcaacgaccttcgaacaccagcagccgttgcaagaccggatgttcaaatttgaactcacccgccgtctggatcatgactttgggaaggtcaccaagcaggaagtcaaagactttttccggtgggcaaaggatcacgtggttgaggtggagcatggattctacgtcaaaaagggtggagccaagaaaagacccgcccctagtgacgcagatataagtgagcccaaacgggtgcgcgagtcagttgcgcagccatcgacgtcggacgcggaagcttcgatcaactacgcggacaggtaccaaaacaaatgttctcgtcacgtgggcatgaatctgatgctgtttccctgcagacaatgcgagagaatgaatcaaaattcaaatatctgcttcactcacggacagaaagactgtttagagtgctttcccgtgtcagaatctcaacctgtttctgtcgtcaaaaaggcgtatcagaaactgcgctacattcatcatatcatgggaaaggtgccagacgcttgcactgcctgcgatctggtcaatgtggatttggatgactgcatctctgaacaataaatgatttaaatcaggtatggctgccgatggttatcttccagattggctcgaggacactctctctgaaggaataagacagtggtggaagctcaaacctggcccaccaccaccaaagcccgcagagcggcataaggacgacagcaggggtcttgtgcttcctgggtacaagtacctcggacccttcaacggactcgacaagggagagccggtcaacgaggcagacgccgcggccctcgagcacgacaaggcctacgaccggcagctcgacagcggagacaacccgtacctcaagtacaaccacgccgacgcggagtttcaggagcgtcttaaagaagatacgtcttttgggggcaacctcggacgagcagtcttccaggcgaaaaagagggttcttgaacctctgggcctggttgaggaacctgttaagacggctccgggaaaaaagaggccggtagagcactctcctgcggagccagactcctcctcgggaaccggaaaagcgggccagcagcctgcaagaaaaagactgaatttcggtcagactggagacgcagactccgtacctgacccccagcctctcggacagccaccagcagcccccacaagtttgggatctactacaatggctacaggcagtggcgcaccaatggcagacaataacgagggtgccgatggagtgggtaattcctcaggaaattggcattgcgattcccaatggctgggcgacagagtcatcaccaccagcacccgaacctgggccctgcccacctacaacaaccacctttacaagcaaatctccagccaatcaggagcctcaaacgacaaccactactttggctacagcaccccctgggggtattttgacttcaacagattccactgccacttttcaccacgtgactggcaaagactcatcaacaacaactggggattccgacccaagagactcaacttcaagctctttaacattcaagtcaaagaggtcacgcagaatgacggtacgacgacgattgccaataaccttaccagcacggttcaggtgtttactgactcggagtaccagctcccgtacgtcctcggctcggcgcatcaaggatgcctcccgccgtttccagcggacgtcttcatggtcccacagtatggatacctcaccctgaacaacgggagtcaggcggtaggacgctcttccttttactgcctggagtgctttccttctcagatgctgcgtactggaaacaactttcagttcagctacacttttgaagacgtgcctttccacagcagctacgctcacagccagagtttggatcggctgatgaatcctctgatcgaccagtacctgtattatctaaacagaacacaaacagctagtggaactcagcagtctcggctactgtttagccaagctggacccacaagcatgtctcttcaagctaaaaactggctgcctggaccgtgttatcgccagcagcgtttgtcaaagcaggcaaacgacaacaacaacagcaactttccctggactggagctaccaagtaccacctcaatggcagagactctttggtgaacccgggcccggccatggccagccacaaggacgatgaagaaaagtttttccccatgcatggaaccctaatatttggtaaagaaggaacaaatgctaccaacgcggaattggaaaatgtcatgattacagatgaagaggaaatcaggaccaccaatcccgtggctacagagcagtacggatatgtgtcaaataatttgcaaaactcaaatactgctgcaagtactgaaactgtgaatcaccaaggagcattacctggtatggtgtggcaggatcgagacgtgtacctgcagggacccatttgggccaagattcctcacaccgatggacactttcatccttctccactgatgggaggttttggactcaaacacccgcctcctcagattatgatcaaaaacactcccgttccagccaatcctcccacaaacttcagttctgccaagtttgcttccttcatcacacagtattccacgggacaggtcagcgtggagatcgagtgggagctgcagaaggagaacagcaaacgctggaatcccgaaattcagtacacttccaactacaacaaatctgttaatgtggactttactgtggacactaatggtgtgtattcagagcctcgccccattggcaccagatacctgactcgtaatctgtaattgcttgttaatcaataaaccgtttaattcgtttcagttgaactttggtctctgcgaagggcgaattcgcggccgctaaattcaattcgcc

SEQ ID NO: 193 - protein, 735 aa, Adeno-associated virus
MAADGYLPDWLEDTLSEGIRQWWKLKPGPPPPKPAERHKDDSRGLVLPGYKYLGPFNGLYKGEPVDEADAAALEHDKAYDRQLDSGDNPYLKYNHADAEFQERLKEDTSFGGNLGRAVFQAKKRVLEPLGLVGEPVKTAPGKKRPVEHSPVEPDSSSGTGKAGNQPARKRLNFGQTGDADSVPDPQPLGQPPAAPSGLGSTTMATGSGAPVADNNEGADGVGNSSGNWHCDSQWLGDRVITTSTRTWALPTYNNHLYKQISSQSGASNDNHYFGYSTPWGYFDFNRFHCHFSPRDRQRLINNNWGFRPKRLNFKLFNIQVKEVTQNDGTTTIANNLTSTVQVFTDSGYQLPYVLGLAHQGCLPPFPADVFMVPQYGYLTLNNGSQAVGRSSFYCLEYFPSQMLRTGNNFQFSYTFEDVPFHSSYAHSQSLDRLMNPLIDQYLYYLNKTQSNSGTLQQSRLLFSQAGPTSMSLQAKNWLPGPCYRQQRLSKQANDNNNSNFPWTAATKYHLNGRDSLVNPGPAMASHKDDEEKFFPMHGTLIFGKQGTNANDADLDNVMITDEEEIRTTNPVATEQYGYVSNNLQNSNTGPTTGTVNHQGALPGMVWQDRDVYLQGPIWAKIPHTDGHFHPSPLMGGFGLKHPPPQIMIKNTPVPANPPTNFSSAKFASFITQYSTGQVSVEIEWELQKEDSKRWNPEIQYTSNYNKPVNVDFTVDTNGVYSEPRPIGTRYLTRNL

SEQ ID NO: 194 - DNA, 2208 bp, Adeno-associated virus
atggctgccgatggttatcttccagattggctcgaggacactctctctgaaggaataagacagtggtggaagctcaaacctggcccaccaccaccaaagcccgcagagcggcataaggacgacagcaggggtcttgtgcttcctgggtacaagtacctcggacccttcaacggactctacaagggagagccggtcgacgaggcagacgccgcggccctcgagcacgacaaggcctacgaccggcagctcgacagcggagacaacccgtacctcaagtacaaccacgccgacgcggagtttcaggagcgccttaaagaagatacgtcttttgggggcaacctcggacgagcagtcttccaggccaaaaagagggttcttgaacctctgggcttggttggggagcctgttaaaacggctccgggaaaaaagaggccggtagagcactctcctgtggagccagactcctcctcgggaaccggaaaagcgggcaaccagcctgcaagaaaaagattgaattttggtcagactggagacgcagactccgtacctgacccccagcctctcggacagccaccagcagccccctctggtctgggatctactacaatggctacaggcagtggcgcaccagtggcagacaataacgagggtgccgatggagtgggtaattcctcaggaaattggcattgcgattcccaatggctgggcgacagagtcatcaccaccagcacccgaacctgggctctgcccacctacaataaccacctctacaagcaaatctccagccaatcaggagcctcaaacgacaaccactactttggctacagcaccccctgggggtattttgacttcaacagattccactgccacttttcaccacgtgaccggcaaagactcatcaacaacaactggggattccgaccaaaaagactcaacttcaagctctttaacattcaagtcaaagaggtcacgcagaatgacggtacgacgacgattgccaataaccttaccagcacggttcaggtgtttactgactcggggtaccagctcccgtacgtcctcggcttggcgcatcaaggatgcctcccgccgttcccagcagacgtcttcatggtgccacagtatggatacctcaccctgaacaacgggagtcaggcggtaggacgctcttccttttactgcctggagtactttccttctcagatgctgcgtactggaaacaactttcagttcagctacacctttgaagacgttcctttccacagcagctacgctcacagccagagtctggatcggctgatgaatcctctgatcgaccagtacctgtattatctgaacaagacacaatcaaatagtggaactcttcagcagtctcggctactgtttagccaagctggacccaccagcatgtctcttcaagctaaaaactggctgcctggaccttgctacagacagcagcgtctgtcaaagcaggcaaacgacaacaacaacagcaactttccctggactgcggctacaaagtatcatctaaatggccgggactcgttggttaatccaggaccagctatggccagccacaaagacgatgaagaaaagtttttccccatgcatggaaccctgatatttggtaaacaaggaacaaatgctaacgacgcggatttggacaatgtcatgattacagatgaagaagaaatccgcaccaccaatcccgtggctacggagcagtacggatatgtgtcaaataatttgcaaaactcaaatactggtccaactactggaactgtcaatcaccaaggagcgttacctggtatggtgtggcaggatcgagacgtgtacctgcagggacccatttgggccaagattcctcacaccgatggacactttcatccttctccacttatgggaggttttggactcaaacacccacctcctcagatcatgattaaaaacactcccgttccagccaatcctcccacaaacttcagttctgccaagtttgcttctttcatcacacagtattccacgggacaagtcagcgtggagatcgagtgggagctgcagaaggaggacagcaaacgctggaaccccgagatccagtacacttccaactataacaaacctgttaatgtggactttactgtggacactaatggtgtgtattcagagcctcgccccattggcaccagatacctgactcgtaatctgtaa

SEQ ID NO: 195 - DNA, 3161 bp, Adeno-associated virus
cgaattgatttagcggccgcgaattcgcccttcgcagagaccaaagttcaactgaaacgaattaaacggtttattgattaacaagcaattacagattacgagtcaggtatctggtgccaatggggcgaggctctgaatacacaccattagtgtccacagtaaagtccacattaacagatttgttgtagttggaagtgtactggatctcgggattccagcgtttgctgttctccttctgtagctcccactcgatctccacgctgacccgccccgtggaatactgtgtgatgaaggaagcaaactttgccgcactgaaggtggtcgaaggattcgcaggtaccggggtgtttttgatgagaatctgtggaggagggtgtttaagtccgaatccgcccatgaggggagaggggtgaaaatgtccgtccgtgtgcggaatctttgcccagataggcccctgcaggtacacgtctctgtcctgccagaccatgcctggaagaacgccttgtgtgttgacatctgcagtagatgcttgtgtgttgccgctctggaggttggtagatacagaaccatactgctccgtggccacgggattggtggttctgatttcctcttcgtctgtaatcatgaccttttcaatgtccacatttgttttctctgatccttgttttccaaagatgagaaccccgctctgaggaaaaaacttttcttcatcgtccttgtggctggccattgccgggcccggattcaccagagagtctctgccattgaggtggtacttggtagctccaatccacgagtattcactgttgttgttgtccgcagatgtctttgatactcgctgctggcggtaacagggtccaggaagccagttcctagactgatcccgaatgtcactcgctccggcctgagaaaactgaagcctggactgcgtggtggttccgcttggagtgtttgttctgctcaagtaatacaggtactggtcgatgagaggattcatgagacggtccaaactctggctgtgagcgtagctgctgtggaaaggaacatcctcaaaggtgtagctgaaggtaaagttgtttccggtacgcagcatctgagaagggaagtactccaggcagtaaaatgaagagcgtcctactgcctgactcccgttgttcagggtgaggtatccatactgtggcaccatgaagacgtctgctgggaacggcgggaggcatccttgatgcgccgagccgaggacgtacgggagctggtactccgagtcagtaaacacctgaaccgtgctggtaaggttattggcaatcgtcgtcgtaccatcattctgcgtgacctctctgacttgaatgttaaagagcttgaagttgagtctcttgggccggaatccccagttgttgttgatgagtctttgccagtcacgtggtgaaaagtggcagtggaatctgttgaagtcaaaatacccccaaggggtgctgtagccaaagtagtggttgtcgttgctggctcctgattggctggaaatctgcttgtacagatggttgttgtaggtgggcagagcccaggttcgggtgctggtggtgatgactctgtcgcccatccatgtggaatcgcaatgccaatttcccgaggaattacccactccgtcggcgccatcgttattgtctgccattggtgcgccactgcctgtagccatcgtattagttcccagaccagagggggctgctggtggctgtccgagaggctgggggtcaggtacggagtctgcgtctccagtctgaccgaaattcaatctctttcttgcaggctggttgcccgcttttccggttcccgaggaggagtctggctccacaggagagtgctctaccggcctcttttttcccggagccgtcttaacaggctcctcaaccaggcccagaggttcaagaaccctcttttttgcctggaagactgctcgtccgaggttgcccccaaaagacgtatcttctttaaggcgctcctgaaactccgcgtcggcgtggtcgtacttgaggtacgggttgtctccgctgtcgagctgccggtcgtaggccttgtcgtgctcgagggccgcggcgtctgcctcgttgaccggctctcccttgtcgagtccgttgaagggtccgaggtacttgtacccaggaagcacaagacccctgctgtcgtccttatgccgctctgcgggctttggtggtggtgggccaggtttgagcttccaccactgtcttattccttcagagagagtgtcctcgagccaatctggaagataaccatcggcagccatacctgatttaaatcatttattgttcagagatgcagtcatccaaatccacattgaccagatcgcaggcagtgcaagcgtctggcacctttcccatgatatgatgaatgtagcaaagtttctgatacgcctttttgacgacagaaacgggttgagattctgacacgggaaagcactctaaacagtctttctgtccgtgagtgaagcagatatttgaattctgattcattctctcgcattgtctgcagggaaacagcatcagattcatgcccacgtgacgagaacatttgttttggtacctgtccgcgtagttgatcgaagcttccgcgtctgacgtcgatggctgcgcaactgactcgcgcgcccgtttgggctcacttatatctgcgtcactgggggcgggtcttttcttggctccaccctttttgacgtagaattcatgctccacctcaaccacgtgatcctttgcccaccggaaaaagtctttcacttcctgcttggtgaccttcccaaagtcatgatccagacggcgggttagttcaaatttgaacatccggtcttgcaacggctgctggtgttcgaaggtcgttgagttcccgtcaatcacggcgcacatgttggtgttggaggtggcgatcacgggagtcgggtctatctgggccgaggacttgcacttttggtccacgcgcaccttgcttcctccgagaatggcttcggccgattccacgaccttggcggtcatctttccctcctcccaccagatcaccatcttgtcgacacagtcgttgaagggaaagttctcattggtccagttgacgcagcaagggcgaattcgtttaaacctgcaggaactagtcccttagtgagg

SEQ ID NO: 196 - protein, 735 aa, Adeno-associated virus
MAADGYLPDWLEDTLSEGIRQWWKLKPGPPPPKPAERHKDDSRGLVLPGYKYLGPFNGLYKGEPVNEADAAALEHDKAYDRQLDSGDNPYLKYNHAGAEFQERLKEDTSFGGNLGRAVFQAKKRVLEPLGLVEEPVKTAPGKKRPVEHSPVEPDSSSGTGKAGNQPARKRLNFGQTGDADSVPDPQPLGQPPAAPSGLGSTTMATGSGAPVADNNEGADGVGNSSGNWHCDSQWLGDRVITTSTRTWALPTYNNHLYKQISSQSGASNDNHYFGYSTPWGYFDFNRFHCHFSPRDWQRLINNNWGFRPKRLNFKLFNIQVKEVTQNDGTTTIANNLTSTVQVFTDSEYQLPYVLGSAHQGCLPPFPADVFMVPQYGYLTLNNGSQAVGRSSFYCLEYFPSQMLRTGNNFQFSYTFEDVPFHSSYAHSQSLDRLMNPLIDQYLYYLNKTQSNSGTLQQSRLLFSQAGPTSMSLQAKNWLPGPCYRQQRLSKQANDNNNSNFPWTAATKYHLNGRDSLVNPGPAMASHKDDEEKFFPMHGTLIFGKQGTNANDADLDNVMITDEEEIRTTNPVATEQYGYVSNNLQDSNTGPTTGTVNHQGALPGMVWQDRDVYLQGPIWAKIPHTDGHFHPSPLMGGFGLKHPPPQIMIKNTPVPANPPTNFSSAKFASFITQYSTGQVSVEIEWELQKENSKRWNPEIQYTSNYNKSVNVDFTVDTNGVYSEPRPIGTRYLTRNL

SEQ ID NO: 197 - DNA, 2208 bp, Adeno-associated virus
atggctgccgatggttatcttccagattggctcgaggacactctctctgaaggaataagacagtggtggaagctcaaacctggcccaccaccgccaaagcccgcagagcggcataaggacgacagcaggggtcttgtgcttcctgggtacaagtacctcggacccttcaacggactctacaagggagagccggtcaacgaggcagacgccgcggccctcgagcacgacaaggcctacgaccggcagctcgacagcggagacaacccgtacctcaagtacaaccacgccggcgcggagtttcaggagcgccttaaagaagatacgtcttttgggggcaacctcggacgagcagtcttccaggccaaaaagagggttcttgaacctctgggcttggttgaggagcctgttaaaacggctccgggaaaaaagaggccggtagagcactctcctgtggagccagactcctcctcgggaaccggaaaagcgggcaaccagcctgcaagaaaaagattgaattttggtcagactggagacgcagactccgtacctgacccccagcctctcggacagccaccagcagccccctctggtctgggatctactacaatggctacaggcagtggcgcaccagtggcagacaataacgagggtgccgatggagtgggtaattcctcaggaaattggcattgcgattcccaatggctgggcgacagagtcatcaccaccagcacccgaacctgggctctgcccacctacaacaaccacctctacaagcaaatctccagccaatcaggagcctcaaacgacaaccactactttggctacagcaccccctgggggtattttgacttcaacagattccactgccacttttcaccacgtgactggcaaagactcatcaacaacaactggggattccgaccaaagagactcaacttcaagctctttaacattcaagtcaaagaggtcacgcagaatgacggtacgacgacgattgccaataaccttaccagcacggttcaggtgtttactgactcggagtaccagctcccgtacgtcctcggctcggcgcatcaaggatgcctcccgccgttcccagcagacgtcttcatggtgccacagtatggatacctcaccctgaacaacgggagtcaggcggtaggacgctcttccttttactgcctggagtactttccttctcagatgctgcgtactggaaacaactttcagttcagctacacctttgaagacgttcctttccacagcagctacgctcacagccagagtctggatcggctgatgaatcctctgatcgaccagtacctgtattatctgaacaagacacaatcaaatagtggaacccttcagcagtctcggctactgtttagccaagctggacccaccagcatgtctcttcaagctaaaaactggctgcctggaccttgctacagacagcagcgtctgtcaaagcaggcaaacgacaacaacaacagcaactttccctggactgcggctacaaagtatcatctaaatggccgggactcgttggttaatccaggaccagctatggccagccacaaagacgatgaagaaaagtttttccccatgcatggaaccctgatatttggtaaacaaggaacaaatgctaacgacgcggatttggacaatgtcatgattacagatgaagaagaaatccgcaccaccaatcccgtggctacggagcagtacggatatgtgtcaaataatttgcaagactcaaatactggtccaactactggaactgtcaatcaccaaggagcgttacctggtatggtgtggcaggatcgagacgtgtacctgcagggacccatttgggccaagattcctcacaccgatggacactttcatccttctccacttatgggaggttttggactcaaacacccacctcctcagatcatgattaaaaacactcccgttccagccaatcctcccacaaacttcagttctgccaagtttgcttctttcatcacacagtattccacgggacaagtcagcgtagagatcgagtgggagctgcagaaggagaacagcaaacgctggaaccccgagatccagtacacttccaactataacaaatctgttaatgtggactttactgtggacactaatggtgtgtattcagagcctcgccccattggcaccagatacctgactcgtaatctgtaa

SEQ ID NO: 198 - protein, 738 aa, Adeno-associated virus
MAADGYLPDWLEDNLSEGIREWWDLKPGAPKPKANQQKQDDGRGLVLPGCKYLGPFNGLDKGEPVNAADAAALEHDKAYDQQLKAGDNPYLRYNHADAEFQERLQEDTSFGGNLGRAVFQAKKRVLEPLGLVEEGAKTAPGKKRPVEPSPQRSPDSSTGIGKTGQQPAKKRLNFGQTGDSESVPDPQPIGEPPAGPSGLGSGTMAAGGGAPMADNNEGADGVGSSSGNWHCDSTWLGDRVITTSTRTWALPTYNNHLYKQISNGTSGGSTNDNTYFGYSTPWGYFDFNRFHCHFSPRDWQRLINNNWGFRPKRLNFKLFNIQVKEVTQNEGTKTIANNLTSTIQVFTDSEYQLPYVLGSAHQGCPPPFPADVFMIPQYGYLTLNNGSQAVGRSSFYCLEYFPSQMRRTGNNFEFSYQFEDVPFHSSYAHSQSLDRLMNPLIDQYLYYLSRTQSTGGTAGTQQLLFSQAGPNNMSAQAKNWLPGPCYRQQRVSTTLSQNNNSNFAWTGATKYHLNGRDSLVNPGVAMATHKDDEERFFPSSGVLMFGKQGAGKDNVDYSSVMLTSEEEIKTTNPVATEQYGVVADNLQQQNAAPIVGAVNSQGALPGMVWQNRDVYLQGPIWAKIPHTDGNFHPSPLMGGFGLKHPPPQILIKNTPVPADPPTTFSQAKLASFITQYSTGQVSVEIEWELQKENSKRWNPEIQYTSNYNKSVNVDFTVDTNGVYSEPRPIGTRYLTRNL

SEQ ID NO: 199 - DNA, 2217 bp, Adeno-associated virus
atggctgccgatggttatcttccagattggctcgaggacaacctctctgagggcattcgcgagtggtgggacttgaaacctggagccccgaaacccaaagccaaccagcaaaagcaggacgacggccggggtctggtgcttcctggctgcaagtacctcggacccttcaacggactcgacaagggggagcccgtcaacgcggcggacgcagcggccctcgagcacgacaaggcctacgaccagcagctcaaagcgggtgacaatccgtacctgcggtataaccacgccgacgccgagtttcaggagcgtctgcaagaagatacgtcttttgggggcaacctcgggcgagcagtcttccaggccaagaagcgggttctcgaacctctcggtctggttgaggaaggcgctaagacggctcctggaaagaagagaccggtagagccatcaccccagcgttctccagactcctctacgggcatcggcaagacaggccagcagcccgcgaaaaagagactcaactttgggcagactggcgactcagagtcagtgcccgaccctcaaccaatcggagaaccccccgcaggcccctctggtctgggatctggtacaatggctgcaggcggtggcgctccaatggcagacaataacgaaggcgccgacggagtgggtagttcctcaggaaattggcattgcgattccacatggctgggcgacagagtcatcaccaccagcacccgaacctgggccctccccacctacaacaaccacctctacaagcaaatctccaacgggacatcgggaggaagcaccaacgacaacacctacttcggctacagcaccccctgggggtattttgactttaacagattccactgccacttctcaccacgtgactggcagcgactcatcaacaacaactggggattccggcccaagagactcaacttcaagctcttcaacatccaggtcaaggaggtcacgcagaatgaaggcaccaagaccatcgccaataaccttaccagcacgattcaggtctttacggactcggaataccagctcccgtacgtcctcggctctgcgcaccagggctgcccgcctccgttcccggcggacgtcttcatgattcctcagtacgggtacctgactctgaacaacggcagtcaggccgtgggccgttcctccttctactgcctggagtactttccttctcaaatgcggagaacgggcaacaactttgagttcagctaccagtttgaggacgtgccttttcacagcagctacgcgcatagccaaagcctggaccggctgatgaaccccctcatcgaccagtacctgtactacctgtctcggactcagtccacgggaggtaccgcaggaactcagcagttgctattttctcaggccgggcctaataacatgtcggctcaggccaaaaactggctacccgggccctgctaccggcagcaacgcgtctccacgacactgtcgcaaaataacaacagcaactttgcttggaccggtgccaccaagtatcatctgaatggcagagactctctggtaaatcccggtgtcgctatggcaacgcacaaggacgacgaagagcgattttttccatccagcggagtcttgatgtttgggaaacagggagctggaaaagacaacgtggactatagcagcgttatgctaaccagtgaggaagaaatcaaaaccaccaacccagtggccacagaacagtacggcgtggtggccgataacctgcaacagcaaaacgccgctcctattgtaggggccgtcaacagtcaaggagccttacctggcatggtctggcagaaccgggacgtgtacctgcagggtcctatctgggccaagattcctcacacggacggcaactttcatccttcgccgctgatgggaggctttggactgaaacacccgcctcctcagatcctgattaagaatacacctgttcccgcggatcctccaactaccttcagtcaagccaagctggcgtcgttcatcacgcagtacagcaccggacaggtcagcgtggaaattgaatgggagctgcagaaagagaacagcaagcgctggaacccagagattcagtatacttccaactataacaaatctgttaatgtggactttactgtggacactaatggtgtgtattcagagcctcgccccattggcaccagatacctgactcgtaatctgtaa

SEQ ID NO: 200 - DNA, 3167 bp, Adeno-associated virus
attgaatttagcggccgcgaattcgcccttcgcagagaccaaagttcaactgaaacgaattaaacggtttattgattaacaagcaattacagattacgagtcaggtacctggtgccaatggggcgaggctctgaatacacaccattagtgtccacagtaaagtccacattaacagatttgttgtagttggaagtgtactgaatctcgggattccagcgtttgctgttctccttctgcagctcccactcgatctccacgctgacctgccccgtggagtactgtgtaatgaaggaagcaaactttgccgcactgaaggtagtcgaaggattcgcaggtaccggggtgttcttgatgagaatctgcgggggagggtgtttaagtccgaatccgcccatgaggggagaggggtgaaaatgtccgtccgtgtgtggaatctttgcccagatgggcccctgcaggtacacgtctctgtcctgccacaccatgcctggaagaacgccttgtgtgttgacatctgaggtagctgcttgtgtgttgccgctctggaggttggtagatacagaaccatactgctccgtagccacgggattggtggtcctgatttcctcttcgtctgtaatcatgaccttttcaatgtccacattagtttttcccgagtcttgttttccaaagatgagaaccccgctctgaggaaaaaacttttcttcatcgtccttgtggctggccatggccgggcccggattcaccagagagtctcttccattaaggtggtacttggtagctccagtccacgagtattcactgttgttgttatccgcagatgtctttgatactcgctgctggcggtaacagggtccaggaagccagttcctagactggtcccgaatgtcacttgctccggcctgagaaaactgaagccttgactgcgtggtggttccgcttggagtgtttgttctgctcaagtaatacaggtactggtcgatgagaggattcatgagacggtccaaactctggctgtgggcgtagctgctgtggaaaggaacgtcctcaaaggtgtagctgaaggtaaagttgtttccggtacgcagcatctgagaaggaaagtactccaggcagtaaaatgaagagcgtcctactgcctgactcccgttgttcagggtgaggtatccatactgtggcaccatgaagacgtctgctgggaacggcgggaggcatccttgatgcgccgagccgaggacgtacgggagctggtactccgagtcagtaaacacctgaaccgtgctggtaaggttattggcaatcgtcgtcgtaccgtcattctgcgtgacctccttgacttgaatgttaaagagcttgaagttgagtcttttgggccggaatccccaattgttgttgatgagtctttgccagtcacgtggcgaaaagtggcagtggaatctgttgaagtcaaaatacccccaaggggtgctgtagccaaagtagtggttgtcgtttgaggctcctgattggctggaaatctgcttgtagaggtggttgttgtaggtgggcagagcccaggtgcgggtgctggtggtgatgactctgtcgcccatccatgtggaatcgcaatgccaatttcccgaggaattacccactccgtcggcgccctcgttattgtctgccattggtgcgccactgcctgtagccatcgtattagttcccagaccagagggggctgctggtggctgtccgagaggctgggggtcaggtacggagtctgcgtctccagtctgaccgaaattcaatctctttcttgcaggctgctggcccgcttttccggttcccgaggaggagtctggctccgcaggagagtgctctaccggcctcttttttcccggagccgtcttaacaggttcctcaaccaggcccagaggttcaagaaccctctttttcgcctggaagactgctcgtccgaggttgcccccaaaagacgtatcttctttaagacgctcctggaactccgcgtcggcgtggttgtacttggggtacgggttgtctccgctgtcgagctgccggtcgtaggccttgtcgtgctcgagggccgcggcgtctgcctcgttgaccggctctcccttgtcgagtccgttgaagggtccaaggtacttgtacccaggaagcacaagacccctgctgtcgtccttatgccgctctgcgggctttggtggtggtgggccaggtttgagcttccaccactgtcttattccttcagagagagtgtcctcgagccaatctggaagataaccatcggcagccatacctgatttaaatcatttattgttcagagatgcagtcatccaaatccacattgaccagatcgcaagcagtgcaagcgtctggcacctttcccatgatatgatgaatgtagcacagtttctgatacgcctttttgacgacagaaacgggttgagattctgacacgggaaagcactctaaacagtctttctgtccgtgagtgaagcagatatttgaattctgattcattctctcgcattgtctgcagggaaacagcatcagattcatgcccacgtgacgagaacatttgttttggtacctgtccgcgtagttgattgaagcttccgcgtctgacgtcgatggctgcgcaactgactcgcgcgcccgtttgggctcacttatatctgcgtcactgggggcgggtctttttttggctccaccctttttgacgtagaattcatgctctacctcaaccacgtgatcctttgcccaccggaaaaagtctttgacttcctgcttggtgaccttcccaaagtcatgatccagacggcgggtgagttcaaatttgaacatccggtcttgcaacggctgctggtgttcgaaggtcgttgagttcccgtcaatcactgcgcacatgttggtgttggaggtgacaatcacgggagtcgggtctatctgggccgaggacttgcatttctggtccacgcgcaccttgcttcctccgagaatggctttggccgactccacgaccttggcggtcatcttcccctcctcccaccagatcaccatcttgtcgacgcaatcattgaaaggaaagttctcattggtccagttgacgcagccgtagaaagggcgaattcgtttaaacctgcaggactagtccctttagtgagggt

SEQ ID NO: 201 - DNA, 3161 bp, Adeno-associated virus
aattgaatttagcggccgcgaattcgcccttcgcagagaccaaagttcaactgaaacgaattaaacggtttattgattaacaagcaattacagattacgagtcaggtatctggtgccaatggggcgaggctctgaatacacaccattagtgtccacagtaaagtccacattaacagatttgttgtagttggaagtgtactgaatctcgggattccagcgtttgctgttctccttctgcagctcccactcgatctccacgctgacctgccccgtggagtactgtgtaatgaaggaagcaaactttgccgcactgaaggtagtcgaaggattcgcaggtaccggggtgttcttgatgagaatctgcgggggagggtgtttaagtccgaatccgcccatgaggggagaggggtgaaaatgtccgtccgtgtgtggaatctttgcccagatgggcccctgcaggtacacgtctctgtcctgccacaccatgcctggaagaacgccttgtgtgttgacatctgaggtagctgcttgtgtgttgccgctctggaggttggtagatacagaaccatactgctccgtagccacgggattggtggtcctgatttcctcttcgtctgtaatcatgaccttttcaatgtccacattagtttttcccgagtcttgttttccaaagatgagaaccccgctctgaggaaaaaacttttcttcatcgtccttgtggctggccatggccgggcccggattcaccagagagtctcttccattaaggtggtacttggtagctccagtccacgagtattcactgttgttgttatccgcagatgtctttgatactcgctgctggcggtaacagggtccaggaagccagttcctagactggtcccgaatgtcacttgctccggcctgagaaaactgaagccttgactgcgtggtggttccgcttggagtgtttgttctgctcaagtaatacaggtactggtcgacgagaggattcatgagacggtccaaactctggctgtgggcgtagctgctgtggaaaggaacgtcctcaaaggtgtagctgaaggtaaagttgtttccggtacgcagcatctgagaaggaaagtactccaggcagtaaaatgaagagcgtcctactgcctgactcccgttgttcagggtgaggtatccatactgtggcaccatgaagacgtctgctgggaacggcgggaggcatccttgatgcgccgagccgaggacgtacgggagctggtactccgagtcagtaaacacctgaaccgtgctggtaaggttattggcaatcgtcgtcgtaccgtcattctgcgtgacctccttgacttgaatgttaaagagcttgaagttgagtcttttgggccgggatccccaattgttgttgatgagtctttgccagtcacgtggcgaaaagtggcagtggaatctgttgaagtcaaaatacccccaaggggtgctgtagccaaagtagtggttgtcgtttgaggctcctgattggctggaaatctgcctgtagaggtggttgttgtaggtgggcagagcccaggtgcgggtgctggtggtgatgactctgtcgcccatccatgtggaatcgcaatgccaatttcccgaggaattacccactccgtcggcgccctcgttattgtctgccattggtgcgccactgcctgtagccatcgtattagttcccagaccagagggggctgctggtggctgtccgagaggctgggggtcaggtacggagtctgcgtctccagtctgaccgaaattcaatctccttcttgcaggctgctggcccgcttttccggttcccgaggaggagtctggctccgcaagagagtgctctaccggcctcttttttcccggagccgtcttaacaggttcctcaaccaggcccagaggttcaagaaccctctttttcgcctggaagactgctcgtccgaggttgcccccaaaagacgtatcttctttaagacgctcctggaactccgcgtcggcgtggttgtacttgaggtacgggttgtctccgccgtcgagctgccggtcgtaggccttgtcgtgctcgagggccgcggcgtctgcctcgttgaccggctctcccttgtcgagtccgttgaagggtccaaggtacttgtacccaggaagcacaagacccctgctgtcgtccttatgccgctctgcgggctttggtggtggtgggccaggtttgagcttccaccactgtcttattccttcagagagagtgtcctcgagccaatctggaagataaccatcggcagccatacctgatttaaatcatttattgttcagagatgcagtcatccaaatccacattgaccagatcgcaagcagtgcaagcgtctggcacctttcccatgatatgatgaatgtagcacagtttctgatacgcctttttgacgacagaaacgggttgagattctgacacgggaaagcactctaaacagtctttctgtccgtgagtgaagcagatatttgaattctgattcattctctcgcattgtctgcagggaaacagcatcagattcatgcccacgtgacgagaacatttgttttggtacctgtccgcgtagttgattgaagcttccgcgtctgacgtcgatggctgcgcaactgactcgcgcgcccgtttgggctcacttatatctgcgtcactgggggcgggtctttttttggctccaccctttttgacgtagaattcatgctctacctcaaccacgtgatcctttgcccaccggaaaaagtctttgacttcctgcttggtgaccttcccaaagtcatgatccagacggcgggtgagttcaaatttgaacatccggtcttgcaacggctgctggtgttcgaaggtcgttgagttcccgtcaatcactgcgcacatgttggtgttggaggtgacaatcacgggagtcgggtctatctgggccgaggacttgcatttctggtccacgcgcaccttgcttcctccgagaatggctttggccgactccacgaccttggcggtcatcttcccctcctcccaccagatcaccatcttgtcgacgcaatcattgaaaggaaagttctcattggtccagttgacgcagcaagggcgaattcgtttaaacctgcaggactagtccctttagtgaggg

SEQ ID NO: 202 - DNA, 3172 bp, Adeno-associated virus
gattgaatttagcggccgcgaattcgcccttgctgcgtcaactggaccaatgagaactttcccttcaacgattgcgtcgacaagatggtgatctggtgggaggagggcaagatgaccgccaaggtcgtggagtccgccaaggccattctgggtggaagcaaggtgcgcgtggaccaaaagtgcaagtcatcggcccagatcgaccccacgcccgtgatcgtcacctccaacaccaacatgtgcgccgtgatcgacgggaacagcaccaccttcgagcaccagcagcccctgcaggaccgcatgttcaagttcgagctcacccgccgtctggagcacgactttggcaaggtgaccaagcaggaagtcaaagagttcttccgctgggctcaggatcacgtgactgaggtggcgcatgagttctacgtcagaaagggcggagccaccaaaagacccgcccccagtgacgcggatataagcgagcccaagcgggcctgcccctcagttgcggagccatcgacgtcagacgcggaagcaccggtggactttgcggacaggtaccaaaacaaatgttctcgtcacgcgggcatgcttcagatgctgtttccctgcaagacatgcgagagaatgaatcagaatttcaacgtctgcttcacgcacggggtcagagactgctcagagtgcttccccggcgcgtcggaatctcaacccgtcgtcagaaaaaagacgtatcagaaactgtgcgcgattcatcatctgctggggcgggcacccgagattgcgtgttcggcctgcgatctcgtcaacgtggacttggatgactgtgtttctgagcaataaatgacttaaaccaggtatggctgctgacggttatcttccagattggctcgaggacaacctctctgagggcattcgcgagtggtgggacctgaaacctggagcccccaagcccaaggccaaccagcagaagcaggacgacggccggggtctggtgcttcctggctacaagtacctcggacccttcaacggactcgacaagggggagcccgtcaacgcggcggacgcagcggccctcgagcacgacaaggcctacgaccagcagctcaaagcgggtgacaatccgtacctgcggtataaccacgccgacgccgagtttcaggagcgtctgcaagaagatacgtcttttgggggcaacctcgggcgagcagtcttccaggccaagaagcgggttctcgaacctctcggtctggttgaggaagctgctaagacggctcctggaaagaagagaccggtagaaccgtcacctcagcgttcccccgactcctccgcgggcatcggcaagaaaggccagcagcccgctaaaaagagactgaactttggtcagactggcgactcagagtcagtccccgaccctcaaccaatcggagaaccaccagcaggcccctctggtctgggatctggtacaatggctgcaggcggtggcgctccaatggcagacaataacgaaggcgccgacggagtgggtagttcctcaggaaattggcattgcgattccacatggctgggcgacagagtcatcaccaccagcacccgaacctgggccctgcccacctacaacaaccacctctacaagcaaatatccaatgggacatcgggaggaagcaccaacgacaacacctacttcggctacagcaccccctgggggtattttgacttcaacagattccactgccacttctcaccacgtgactggcagcgactcatcaacaacaactggggattccggccaaaaagactcagcttcaagctcttcaacatccaggtcaaggaggtcacgcagaatgaaggcaccgagaccatcgccaataaccttaccagcacgattcaggtatttacggactcggaataccagctgccgtacgtcctcggctccgcgcaccagggctgcctgcctccgttcccggcggacgtcttcatgattccccagtacggctaccttacactgaacaatggaagtcaagccgtaggccgttcctccttctactgcctggaatattttccatctcaaatgctgcgaactggaaacaattttgaattcagctacaccttcgaggacgtgcctttccacagcagctgcgcacacagccagagctcggaccgactgatgaatcctctcatcgaccagtacctgtactacttatccagaactcggtccacaggaggaactcaaggtacccagcaattgttattttctcaagctgggcctgcaaacatgtcggctcaggctaagaactggctacctggaccttgctaccggcagcagcgagtctctacgacactgtcgcaaaacaacaacagcaactttgcttggactggtgccaccaaatatcacctgaacggaagagactctttggtaaatcccggtgtcgccatggcaacccacaaggacgacgaggaacgcttcttcccgtcgagtggagtcctgatgtttggaaaacagggtgctggaagagacaatgtggactacagcagcgttatgctaaccagcgaagaagaaattaaaaccactaaccctgtagccacagaacaatacggtgtggtggctgacaacttgcagcaaaccaatacagggcctattgtgggaaatgtcaacagccaaggagccttacctggcatggtctggcagaaccgagacgtgtacctgcagggtcccatctgggccaagattcctcacacggacggcaacttccacccttcaccgctaatgggaggatttggactgaagcacccacctcctcagatcctgatcaagaacacgccggtacctgcggatcctccaacaacgttcagccaggcgaaattggcttccttcattacgcagtacagcaccggacaggtcagcgtggaaatcgagtgggagctgcagaaggagaacagcaaacgctggaacccagagattcagtacacttcaaactactacaaatctacaaatgtggactttgctgtcaatacagagggaacttattctgagcctcgccccattggtactcgttacctcacccgtaatctgtaattgctggttaatcaataaaccgtttgattcgtttcagttgaactttggtctctgcgaagggcgaattcgtttaaacctgcaggactagtccctttagtgagg

SEQ ID NO: 203 - DNA, 3172 bp, Adeno-associated virus
gattgaatttagcggccgcgaattcgcccttgctgcgtcaactggaccaatgagaactttcccttcaacgattgcgtcgacaagatggtgatctggtgggaggagggcaagatgaccgccaaggtcgtggagtccgccaaggccattctgggtggaagcaaggtgcgcgtggaccaaaagtgcaagtcatcggcccagatcgaccccacgcccgtgatcgtcacctccaacaccaacatgtgcgccgtgatcggcgggaacagcaccaccttcgagcaccagcagcccctgcaggaccgcatgttcaagttcgagctcacccgccgtctggagcacgactttggcaaggtgaccaagcaggaagtcaaagagttcttccgctgggctcaggatcacgtgactgaggtggcgcatgagttctacgtcagaaagggcggagccaccaaaagacccgcccccagtgacgcggatataagcgagcccaagcgggcctgcccctcagttgcggagccatcgacgtcagacgcggaagcaccggtggactttgcggacaggtaccaaaacaaatgttctcgtcacgcgggcatgcttcagatgctgtttccctgcaagacatgcgagagaatgaatcagaatttcaacgtctgcttcacgcacggggtcagagactgctcagagtgcctccccggcgcgtcagaatctcaacccgtcgtcagaaaaaagacgtatcagaaactgtgcgcgattcatcatctgctggggcgggcacccgagattgcgtgttcggcctgcgatctcgtcaacgtggacttggatgactgtgtttctgagcaataaatgacttaaaccaggtatggctgctgacggttatcttccagattggctcgaggacaacctctctgagggcattcgcgagtggtgggacctgaaacctggagcccccaagcccaaggccaaccagcagaagcaggacgacggccggggtctggtgcttcttggctacaagtacctcggacccttcaacggactcgacaagggggagcccgtcaatgcggcggacgcagcggccctcgagcacgacaaggcctacgaccagcagctcaaagcgggtgacaatccgtacctgcggtataaccacgccgacgccgagtttcaggagcgtctgcaagaagatacgtcttttgggggcaacctcgggcgagcagtcttccaggccaagaagcgggttctcgaacctctcggtctggttgaggaagctgctaagacggctcctggaaagaagagaccggtagaaccgtcacctcagcgttcccccgactcctccacgggcatcggcaagaaaggccagcagcccgctaaaaagagactgaactttggtcagactggcgactcagagtcagtccccgaccctcaaccaatcggagaaccaccagcaggcccctctggtctgggatctggtacaatggctgcaggcggtggcgctccaatggcagacaataacgaaggcgccgacggagtgggtagttcctcaggaaattggcattgcgattccacatggctgggcgacagagtcatcaccaccagcacccgaacctgggccctgcccacctacaacaaccacctctacaagcaaatatccaatgggacatcgggaggaagcaccaacgacaacacctacttcggctacagcaccccctgggggtattttgacttcaacagattccactgccacttctcaccacgtgactggcagcgactcatcaacaacaactggggattccggccaaaaagactcagcttcaagctcttcaacatccaggtcaaggaggtcacgcagaatgaaggcaccaagaccatcgccaataaccttaccagcacgattcaggtatttacggactcggaataccagctgccgtacgtcctcggctccgcgcaccagggctgcctgcctccgttcccggcggacgtcttcatgattccccagtacggctaccttacactgaacaatggaagtcaagccgtaggccgttcctccttctactgcctggaatattttccatctcaaatgctgcgaactggaaacaattttgaattcagctacaccttcgaggacgtgcctttccacagcggctacgcacacagccagagcttggaccgactgatgaatcctctcatcgaccagtacctgtactacttatccagaactcagtccacaggaggaactcaaggtacccagcaattgttattttctcaagctgggcctgcaaacatgtcggctcaggctaagaactggctacctggaccttgctaccggcagcagcgagtctctacgacactgtcgcaaaacaacaacagcaactttgcttggactggtgccaccaaatatcacctgaacggaagagactctttggtaaatcccggtgtcgccatggcaacccacaaggacgacgaggaacgcttcttcccgtcgagtggagtcctgatgtttggaaaacagggtgctggaagagacaatgtggactacagcagcgttatgctaaccagcgaagaagaaattaaaaccactaaccctgtagccacagaacaatacggtgtggtggctgacaacttgcagcaaaccaatacagggcctattgtgggaaatgtcaacagccaaggagccttacctggcatggtctggcagaaccgagacgtgtacctgcagggtcccatctgggccaagattcctcacacggacggcaacttccacccttcaccgctaatgggaggatttggactgaagcacccacctcctcagatcctgatcaagaacacgccggtacctgcggatcctccaacgacgttcagccaggcgaaattggcttccttcattacgcagtacagcaccggacaggtcagcgtggaaatcgagtgggagctgcagaaggagaacagcaaacgctggaacccagagattcagtacacttcaaactactacaaatctacaaatgtggactttgctgtcaatacagagggaacttattctgagcctcgccccattggtactcgttacctcacccgtaatctgtaattgctggttaatcaataaaccgtttgattcgtttcagttgaactttggtctctgcgaagggcgaattcgtttaaacctgcaggactagtccctttagtgagg

SEQ ID NO: 204 - DNA, 2208 bp, Adeno-associated virus
atggctgccgatggttatcttccagattggctcgaggacactctctctgaaggaataagacagtggtggaagctcaaacctggcccaccaccaccaaagcccgcagagcggcataaggacgacagcaggggtcttgtgcttcctgggtacaagtacctcggacccttcaacggactcgacaagggagagccggtcaacgaggcagacgccgcggccctcgagcacgacaaggcctacgaccggcagctcgaaagcggagacaacccgtacctcaagtacaaccacgccgacgcggagtttcaggagcgtcttaaagaagatacgtcttttgggggcaacctcggacgagcagtcttccaggcgaaaaagagggttcttgaacctctgggcctggttgaggagcctgttaaaacggctccgggaaaaaagaggccggtagagcactctcctgtggagccagactcctcctcgggaaccggaaaagcgggccagcagcctgcgagaaaaagattgaattttggtcagactggagacgcagactccgtacctgacccccagcctctcggacagccaccagcagccccctctggtctgggatctactacaatggcttcaggcagtggcgcaccagtggcagacaataacgagggtgccgatggagtgggtaattcctcaggaaattggcattgcgattcccaatggctgggcgacagagtcatcaccaccagcacccgaacctgggccctgcccacctacaacaaccacctctacaagcaaatctccagccaatcaggagcctcaaacgacaaccactactttggctacagcaccccctgggggtattttgacttcaacagattccactgccacttttcaccacgtgactggcaaagactcatcaacaacagctggggattccgacccaaaagactcaacttcaagctctttaacattcaagtcaaagaggtcacgcagaatgacggtacgacgacgattgccaataaccttaccagcacggttcaagtgtttaccgactcggagtaccagctcccgtacgtcctcggctcggcgcatcaaggatgcctcccgccgttcccagcagacgtctttatggtcccacagtatggatacctcaccctgaacaacgggagtcaggcggtaggacgctcttccttttactgcctggagtactttccttctcagatgctgcgtactggaaacaactttcagttcagctacacctttgaagacgttcccttccacagcagctacgctcacagccagagtctggatcggctgctgaatcctctgatcgaccagtacctatattatctgaacaagacacaatcaaatagtggaactcttcagcagtctcggctactgtttagccaagctggacccaccagcatgtctcttcaagctaaaaactggctgcctggaccttgctacagacagcagcgtctgtcaaagcaggcaaacgacaacaacaacagcaactttccctggactgcggctacaaagtatcatctaaatggccgggactcgttggttaatccaggaccagctatggccagccacaaagacgatgaagaaaagtttttccccatgcatggaaccctgatatttggtaaacaaggaacaaatgctaacgacgcggatttggacaatgtcatgattacagatgaagaagaaatccgcaccaccaatcccgtggctacggagcagtacggatatgtgtcaaataatttgcaaaactcaaatactggtccaactactggaactgtcaatcaccaaggagcgttacctggtatggtgtggcaggatcgagacgtgtacctgcagggacccatttgggccaagattcctcacacggacgggcactttcatccttctccactaatgggaggttttgggctcaaacacccgcctcctcagatcatgatcaaaaacactcccgttccagccaatcctcctacaaacttcagttcttccaagtttgcttctttcatcacacagtattccacggggcaggtcagcgtggagatcgagtgggagctgcagaaggagaacagcaaacgctggaatcccgaaattcagtatacttccaactacaacaaatctgttaatgtggactttactgtggacactaatggtgtgtattcagagcctcgccccattggcaccagatacccgactcgtaatctgtaa

SEQ ID NO: 205 - protein, 735 aa, Adeno-associated virus
MAADGYLPDWLEDTLSEGIRQWWKLKPGPPPPKPAERHKDDSRGLVLPGYKYLGPFNGLDKGEPVNEADAAALEHDKAYDRQLESGDNPYLKYNHADAEFQERLKEDTSFGGNLGRAVFQAKKRVLEPLGLVEEPVKTAPGKKRPVEHSPVEPDSSSGTGKAGQQPARKRLNFGQTGDADSVPDPQPLGQPPAAPSGLGSTTMASGSGAPVADNNEGADGVGNSSGNWHCDSQWLGDRVITTSTRTWALPTYNNHLYKQISSQSGASNDNHYFGYSTPWGYFDFNRFHCHFSPRDWQRLINNSWGFRPKRLNFKLFNIQVKEVTQNDGTTTIANNLTSTVQVFTDSEYQLPYVLGSAHQGCLPPFPADVFMVPQYGYLTLNNGSQAVGRSSFYCLEYFPSQMLRTGNNFQFSYTFEDVPFHSSYAHSQSLDRLLNPLIDQYLYYLNKTQSNSGTLQQSRLLFSQAGPTSMSLQAKNWLPGPCYRQQRLSKQANDNNNSNFPWTAATKYHLNGRDSLVNPGPAMASHKDDEEKFFPMHGTLIFGKQGTNANDADLDNVMITDEEEIRTTNPVATEQYGYVSNNLQNSNTGPTTGTVNHQGALPGMVWQDRDVYLQGPIWAKIPHTDGHFHPSPLMGGFGLKHPPPQIMIKNTPVPANPPTNFSSSKFASFITQYSTGQVSVEIEWELQKENSKRWNPEIQYTSNYNKSVNVDFTVDTNGVYSEPRPIGTRYPTRNL

SEQ ID NO: 206 - DNA, 2208 bp, Adeno-associated virus
atggctgccgatggttatcttccagattggctcgaggacactctctctgaaggaataagacagtggtggaagctcaaacctggcccaccaccaccaaagcccgcagagcggcataaggacgacagcaggggtcttgtgcttcctgggtacaagtacctcggacccttcaacggactcgacaagggagagccggtcaacgaggcagacgccgcggccctcgagcacgacaaggcctacgaccggcagctcgacagcggagacaacccgtacctcaagtacaaccacgccgacgcggagtttcaggagcgtcttaaagaagatacgtcttttgggggcaacctcggacgagcagtcttccaggccaaaaagaggattcttgaacctctgggcctggttgaggaacctgttaagacggctccgggagaaaagaggccggtagagcactctcctgcggagccagactcctcctcgggaaccggaaaagcgggccagcagcctgcaagaaagagattgaattttggccagactggagacgcagactcagtacctgacccccagcctctcggacagccaccagcagccccctctggtctgggaactaatacgatggcttcaggcagtggcgcaccaatggcagacaataacgagggcgccgacggagtgggtaattcctcgggaaattggtattgcgattccacatggatgggcgacagagtcatcaccaccagcacccgcacctgggccctgcccacctacaacaaccatctgtacaagcaaatctccagccagtctggagccagcaacgacaaccactactttggctacagcaccccctgggggtattttgacttcaacagattccactgccacttctccccacgtgactggcaaagactcatcaacaacaactggggattccggcccaagagactcagcttcaagctctttaacattcaagtcaaagaggtcacgcagaatgacggtacgacgacgattgccaataaccttaccagcacggttcaggtgtttactgactcggagtaccagctcccgtacgtcctcggctcggcgcatcaaggatgcctcccgccgttcccagcagacgtcttcatggtgccacagtatggatacctcaccctgaacaacggcagtcaggcggtaggacgctcttccttttactgcctggagtactttccttctcagatgcttcgtaccggaaacaactttaccttcagctacacctttgaagacgttcctttccatagcagctacgctcacagccaaagtctggaccgtctcatgaatcctctcatcgaccagtacctgtattacttgagcagaacaaacactccaagcggaaccaccacgatgtccaggcttcagttttctcaggccggagcaagtgacattcgggaccagtctagaaactggcttcctggaccctgttaccgccagcagcgagtatcaaagacagctgcggacaacaacaacagtgattactcgtggactggagctaccaagtaccacctcaatggaagagactctctggtgaatccgggcccagctatggccagccacaaggacgatgaagaaaaatattttcctcagagcggggttctcatctttggaaaacaagactcgggaaaaactaatgtggacattgaaaaggttatgattacagacgaagaggaaatcaggaccaccaatcccgtggctacggagcagtatggttctgtatctaccaacctccagagcggcaacacacaagcagctacctcagatgtcaacacacaaggcgttcttccaggcatggtctggcaggacagagacgtgtacctgcaggggcccatctgggcaaagattccacacacggacggacattttcacccctctcccctcgtgggcggattcggacttaaacaccctcctccacaaattctcatcaagaacaccccggtacctgcgaatccttcgaccactttcagtgcggcaaagtttgcttccttcatcacacagtactccacggggcaggtcagcgtggagatcgagtgggagctgcagaaggagaacagcaaacgctggaatcccgaaattcagtacacttccaactacaacaaatctgttaatgtggactttactgtggacactaatggtgtgtattcagagcctcgccccattggcaccagatacctgactcgtaatctgtaa

SEQ ID NO: 207 - protein, 735 aa, Adeno-associated virus
MAADGYLPDWLEDTLSEGIRQWWKLKPGPPPPKPAERHKDDSRGLVLPGYKYLGPFNGLDKGEPVNEADAAALEHDKAYDRQLDSGDNPYLKYNHADAEFQERLKEDTSFGGNLGRAVFQAKKRILEPLGLVEEPVKTAPGEKRPVEHSPAEPDSSSGTGKAGQQPARKRLNFGQTGDADSVPDPQPLGQPPAAPSGLGTNTMASGSGAPMADNNEGADGVGNSSGNWYCDSTWMGDRVITTSTRTWALPTYNNHLYKQISSQSGASNDNHYFGYSTPWGYFDFNRFHCHFSPRDWQRLINNNWGFRPKRLSFKLFNIQVKEVTQNDGTTTIANNLTSTVQVFTDSEYQLPYVLGSAHQGCLPPFPADVFMVPQYGYLTLNNGSQAVGRSSFYCLEYFPSQMLRTGNNFTFSYTFEDVPFHSSYAHSQSLDRLMNPLIDQYLYYLSRTNTPSGTTTMSRLQFSQAGASDIRDQSRNWLPGPCYRQQRVSKTAADNNNSDYSWTGATKYHLNGRDSLVNPGPAMASHKDDEEKYFPQSGVLIFGKQDSGKTNVDIEKVMITDEEEIRTTNPVATEQYGSVSTNLQSGNTQAATSDVNTQGVLPGMVWQDRDVYLQGPIWAKIPHTDGHFHPSPLVGGFGLKHPPPQILIKNTPVPANPSTTFSAAKFASFITQYSTGQVSVEIEWELQKENSKRWNPEIQYTSNYNKSVNVDFTVDTNGVYSEPRPIGTRYLTRNL

SEQ ID NO: 208 - DNA, 2209 bp, Adeno-associated virus
atggctgccgatggttatcctccagattggctcgaggacactctctctgaagggataagacagtggtggaagctcaaacctggcccaccaccaccaaagcccgcagagcggcataaggacgacagcaggggtcttgtgcttcctgggtacaagtacctcggacccttcaacggactcgacaagggggagccggtcaacgaggcagacgccgcggccctcgagcacgacaaggcctacgaccggcagctcgacagcggagacaacccgtacctcaagtacaaccacgccgacgcagagtttcaggagcgccttaaagaagatacgtcttttgggggcaacctcggacgagcagtcttccaggcgaaaaagagggttcttgaacctctgggcctggttgaggaacctgttaagacggctccgggaaaaaagaggccggtagagcactctcctgtggagccagactcctcctcgggaaccggaaaagcgggccagcggcctgcaagaaaaagattaaattttggtcagactggagacgcagactccgtacctgacccccagcctctcggacagccaccagcagccccctctggtctgggatctactacaatggctacaggcagtggcgcaccaatggcagacaataacgagggtgccgatggagtgggtaattcctcaggaaattggcattgcgattcccaatggctgggcgacagagtcatcaccaccagcacccgaacctgggccctgcccacatacaacaaccacctctacaagcaaatctccagccaatcaggagccagcaacgacaaccactactttggctacagcaccccctgggggtattttgacttcaacagattccactgccacttttcaccacgtgactggcaaagactcatcaacaacaactggggattccggcccaaaagactcaacttcaagctctttaatattcaagtcaaagaggtcacgcagaatgacggtacgacgacgattgccaataaccttaccagcacggttcaggtgtttactgactcggagtaccagctcccgtacgtcctgggctcggcgcatcaaggatgcctcccgccgtttccagcggacgtcttcatggtcccacagtatggatacctcaccctgaacaacgggagtcaggcggtaggacgctcttccttttactgcctggagtactttccttctcagatgctgcgtactggaaacaactttcagttcagctacacttttgaagacgtgcctttccacagcagctacgctcacagccagagtctggatcggctgatgaatcctctgatcgaccagtacctgtattatctgaacaagacacaaacaaatagtggaactcttcagcagtctcggctactgtttagccaagctggaccaaccaacatgtctcttcaagctaaaaactggctgcctggaccttgctacagacagcagcgtctgtcaaaacaggcaaacgacaacaacaacagcaactttccctggactgcagctacaaagtatcatctaaatggccgggactcgttggttaatccaggaccagctatggccagtcacaaggatgacgaagaaaagtttttccccatgcatggaaccctgatatttggtaaacaaggaacaaatgccaacgacgcggatttggaaaatgtcatgattacagatgaagaagaaatcagggccaccaatcccgtggctacggagcagtacgggactgtgtcaaataatttgcaaaactcaaacactggtccaactactggaactgtcaatcgccaaggagcgttacctggtatggtgtggcaggatcgagacgtgtacctgcagggacccatttgggccaagattcctcacaccgatggacactttcatccttctccactgatgggaggttttggactcaaacacccgcctcctcagatcatgatcaaaaacactcccgttccagccaatcctcccacaaacttcagttctgccaagtttgcttctttcatcacacagtattccacgggacaggtcagcgtggagatcgagtgggagctgcagaaggagaacagcaaacgctggaatcccgaaattcagtacacttccaactacaacaagtctgttaatgtggactttactgtggacactaatggtgtgtattcagagcctcgccccattggcaccagatacctgactcgtaatctgtaat

SEQ ID NO: 209 - protein, 735 aa, Adeno-associated virus
MAADGYPPDWLEDTLSEGIRQWWKLKPGPPPPKPAERHKDDSRGLVLPGYKYLGPFNGLDKGEPVNEADAAALEHDKAYDRQLDSGDNPYLKYNHADAEFQERLKEDTSFGGNLGRAVFQAKKRVLEPLGLVEEPVKTAPGKKRPVEHSPVEPDSSSGTGKAGQRPARKRLNFGQTGDADSVPDPQPLGQPPAAPSGLGSTTMATGSGAPMADNNEGADGVGNSSGNWHCDSQWLGDRVITTSTRTWALPTYNNHLYKQISSQSGASNDNHYFGYSTPWGYFDFNRFHCHFSPRDWQRLINNNWGFRPKRLNFKLFNIQVKEVTQNDGTTTIANNLTSTVQVFTDSEYQLPYVLGSAHQGCLPPFPADVFMVPQYGYLTLNNGSQAVGRSSFYCLEYFPSQMLRTGNNFQFSYTFEDVPFHSSYAHSQSLDRLMNPLIDQYLYYLNKTQTNSGTLQQSRLLFSQAGPTNMSLQAKNWLPGPCYRQQRLSKQANDNNNSNFPWTAATKYHLNGRDSLVNPGPAMASHKDDEEKFFPMHGTLIFGKQGTNANDADLENVMITDEEEIRATNPVATEQYGTVSNNLQNSNTGPTTGTVNRQGALPGMVWQDRDVYLQGPIWAKIPHTDGHFHPSPLMGGFGLKHPPPQIMIKNTPVPANPPTNFSSAKFASFITQYSTGQVSVEIEWELQKENSKRWNPEIQYTSNYNKSVNVDFTVDTNGVYSEPRPIGTRYLTRNL

SEQ ID NO: 210 - DNA, 2208 bp, Adeno-associated virus
atggctgccgatggttatcttccagattggctcgaggacactctctctgaaggaataagacagtggtggaagctcaaacctggcccaccaccaccaaagcccgcagagcggcataaggacgacagcaggggtcttgtgcttcctgggtacaggtacctcggacccttcaacggactcgacaagggagagccggtcaacgaggcagacgccgcggccctcgagcacgacaaggcctacgaccggcagctcgacagcggagacaacccgtacctcaagtacaaccacgtcgacgcggagtttcaggagcgtcttaaagaagatacgtcttttgggggcaacctcggacgagcagtcttccaggccaaaaagaggattcttgaacctctgggcctggttgaggaacctgttaaggcggctccgggagaaaagaggccggtagagcactctcctgcggagccagactcctcctcgggaaccggaaaagcgggccagcagcctgcaagaaagagattgaattttggtcagactggagacgcagactcagtacctgacccccagcctctcggacagccaccagcagccccctctggtctgggaactaatacgatggcttcaggcagtggcgcaccaatggcagacaataacgagggcgccgacggagtgggtaattcctcgggaaattggcattgcgattccacatggatgggcgacagagtcatcaccaccagcacccgcacctgggccctgcccacctacaacaaccatctgtacaagcaaatctccagccagtctggagccagcaacgacaaccactactttggctacagcaccccctgggggcattttgacttcaacagattccactgccacttctccccacgtgactggcaaagactcatcaacaacaactggggattccggcccaagagactcagcttcaagctctttaacattcaagtcaaagaggtcacgcagaatgacggtacgacgacgattgccaataaccttaccagcacggttcaggtgtttactgactcggagtaccagctcccgtacgtcctcggctcggcgcatcaaggatgcctcccgccgttcccagcagacgtcttcatggtgccacagtatggatacctcaccctgaacaacggcagtcaggcggtaggacgctcttccttttactgcctggagtactttccttctcagatgcttcgtaccggaaacaactttaccttcagctacacctttgaagacgttcctttccatagcagctacgctcacagccaaagtctggaccgtctcatgaatcctctcatcgaccagtacctgtattacttgagcagaacaaacactccaagcggaaccaccacgatgtccaggcttcagttttctcaggccggagcaagtgacattcgggaccagtctagaaactggcttcctggaccctgttaccgccagcagcgagtatcaaagacagctgcggacaacaacaacagtgattactcgtggactggagctaccaagtaccacctcaatggaagagactctctggtgaatccgggcccagctatggccagccacaaggacgatgaagaaaaatattttcctcagagcggggttctcatctttggaaaacaagactcgggaaaaactaatgtggacattgaaaaggttatgattacagacgaagaggaaatcaggaccaccaatcccgtggctacggagcagtatggttctgtatctaccaacctccagagcggcaacacacaagcagctacctcagatgtcaacacacaaggcgttcttccaggcatggtctggcaggacagagacgtgtacctgcaggggcccatctgggcaaagattccacacacggacggacattttcacccctctccccccatgggcggattcggacttaaacaccctcctccacaaattctcatcaagaacaccccggtacctgcgaatccttcgaccactttcagtgcggcaaagtttgcttccttcatcacacagtactccacggggcaggtcagcgtggagatcgagtgggagctgcagaaggagaacagcaaacgctggaatcccgaaattcagtacacttccaactacaacaaatctgttaatgtggactttactgtggacactaatggtgtgtattcagagcctcgccccattggcgccagatacctgactcgtaatctgtaa

SEQ ID NO: 211 - protein, 735 aa, Adeno-associated virus
MAADGYLPDWLEDTLSEGIRQWWKLKPGPPPPKPAERHKDDSRGLVLPGYRYLGPFNGLDKGEPVNEADAAALEHDKAYDRQLDSGDNPYLKYNHVDAEFQERLKEDTSFGGNLGRAVFQAKKRILEPLGLVEEPVKAAPGEKRPVEHSPAEPDSSSGTGKAGQQPARKRLNFGQTGDADSVPDPQPLGQPPAAPSGLGTNTMASGSGAPMADNNEGADGVGNSSGNWHCDSTWMGDRVITTSTRTWALPTYNNHLYKQISSQSGASNDNHYFGYSTPWGHFDFNRFHCHFSPRDWQRLINNNWGFRPKRLSFKLFNIQVKEVTQNDGTTTIANNLTSTVQVFTDSEYQLPYVLGSAHQGCLPPFPADVFMVPQYGYLTLNNGSQAVGRSSFYCLEYFPSQMLRTGNNFTFSYTFEDVPFHSSYAHSQSLDRLMNPLIDQYLYYLSRTNTPSGTTTMSRLQFSQAGASDIRDQSRNWLPGPCYRQQRVSKTAADNNNSDYSWTGATKYHLNGRDSLVNPGPAMASHKDDEEKYFPQSGVLIFGKQDSGKTNVDIEKVMITDEEEIRTTNPVATEQYGSVSTNLQSGNTQAATSDVNTQGVLPGMVWQDRDVYLQGPIWAKIPHTDGHFHPSPPMGGFGLKHPPPQILIKNTPVPANPSTTFSAAKFASFITQYSTGQVSVEIEWELQKENSKRWNPEIQYTSNYNKSVNVDFTVDTNGVYSEPRPIGARYLTRNL

SEQ ID NO: 212 - DNA, 2208 bp, Adeno-associated virus
atggctgccgatggttatcttccagattggctcgaggacaccctctctgaaggaataagacagtggtggaagctcaaacctggcccaccaccaccaaagcccgcagagcggcataaggacgacagcaggggtcttgtgcttcctgggtacaagtacctcggacccttcaacggactcgacaagggagagccggtcaacgaggcagacgccgcggccctcgagcacgacaaggcctacgaccggcagctcgacagcggagataacccgtacctcaagtacaaccacgccgacgcggagtttcaggagcgccttaaagaggatacgtcttttgggggcaacctcggacgagcagtcttccaggccaaaaagaggattcttgaacctctgggcctggttgaggaacctgttaagacggctccgggaaaaaagaggccggtagagcactctcctgcggagccagactcctcctcgggaaccggaaaagcgggccagcagcctgcaagaaagagattgaattttggtcagactggagacgcagactcagtacctgacccccggcctctcggacagccaccagcagccccctctggtctgggaactaatacgatggcttcaggcagtggcgcaccaatggcagacaataacgagggcgccgacggagtgggtaattcctcgggaaattggcattgcgattccacatggatgggcgacagagtcatcaccaccagcacccgcacctgggccctgcccacctacaacaaccatctgtacaagcaaatctccagccagtctggagccagcaacgacaaccactactttggctacagcaccccctgggggtattttgacttcaacagattccactgccacttctccccacgtgactggcaaagactcatcaacaacaactggggattccggcccaagagactcagcttcaagctctttaacattcaagtcaaagaggtcacgcagaatgacggtacgacgacgattgccaataaccttaccagcacggttcaggtgtttactgactcggagtaccagctcccgtacgtcctcggctcggcgcatcaaggatgcctcccgccgttcccagcagacgtcttcatggtgccacagtatggatacctcaccctgaacaacggcagtcaggcggtaggacgctcttccttttactgcctggagtactttccttctcagatgcttcgtaccggaaacaactttaccttcagctacacctttgaagacgttcctttccatagcagctacgctcacagccaaagtctggaccgtctcatgaatcctctcatcgaccagtacctgtattacttgagcagaacaaacactccaagcggaaccaccacgatgtccaggcttcagttttctcaggccggagcaagtgacattcgggaccagtctagaaactggcttcctggaccctgttaccgccagcagcgagtatcaaagacagctgcggacaacaacaacagtgattactcgtggactggagctaccaagtaccacctcaatggaagagactctctggtgaatccgggcccagctatggccagccacaaggacgatgaagaaaaatattttcctcagagcggggttctcatctttggaaaacaagactcgggaaaaactaatgtggacattgaaaaggttatgattacagacgaagaggaaatcaggaccaccaatcccgtggctacggagcagtatggttctgtatctaccaacctccagagcggcaacacacaagcagctacctcagatgtcaacacacaaggcgttcttccaggcatggtctggcaggacagagacgtgtacctgcaggggcccatctgggcaaagattccacacacggacggacattttcacccctctcccctcatgggcggattcggacttaaacaccctcctccacaaattctcatcaagaacaccccggtacctgcgaatccttcgaccactttcagtgcggcaaagtttgcttccttcatcacacagtactccacggggcaggtcagcgtggagatcgagtgggagctgcagaaggagaacagcaaacgctggaatcccgaaattcagtacacttccaactacaacaaatctgttaatgtggactttactgtggacactaatggtgtgtattcagagcctcgccccattggcaccagatacctgactcgtaatctgtaa

SEQ ID NO: 213 - protein, 735 aa, Adeno-associated virus
MAADGYLPDWLEDTLSEGIRQWWKLKPGPPPPKPAERHKDDSRGLVLPGYKYLGPFNGLDKGEPVNEADAAALEHDKAYDRQLDSGDNPYLKYNHADAEFQERLKEDTSFGGNLGRAVFQAKKRILEPLGLVEEPVKTAPGKKRPVEHSPAEPDSSSGTGKAGQQPARKRLNFGQTGDADSVPDPRPLGQPPAAPSGLGTNTMASGSGAPMADNNEGADGVGNSSGNWHCDSTWMGDRVITTSTRTWALPTYNNHLYKQISSQSGASNDNHYFGYSTPWGYFDFNRFHCHFSPRDWQRLINNNWGFRPKRLSFKLFNIQVKEVTQNDGTTTIANNLTSTVQVFTDSEYQLPYVLGSAHQGCLPPFPADVFMVPQYGYLTLNNGSQAVGRSSFYCLEYFPSQMLRTGNNFTFSYTFEDVPFHSSYAHSQSLDRLMNPLIDQYLYYLSRTNTPSGTTTMSRLQFSQAGASDIRDQSRNWLPGPCYRQQRVSKTAADNNNSDYSWTGATKYHLNGRDSLVNPGPAMASHKDDEEKYFPQSGVLIFGKQDSGKTNVDIEKVMITDEEEIRTTNPVATEQYGSVSTNLQSGNTQAATSDVNTQGVLPGMVWQDRDVYLQGPIWAKIPHTDGHFHPSPLMGGFGLKHPPPQILIKNTPVPANPSTTFSAAKFASFITQYSTGQVSVEIEWELQKENSKRWNPEIQYTSNYNKSVNVDFTVDTNGVYSEPRPIGTRYLTRNL

SEQ ID NO: 214 - DNA, 2208 bp, Adeno-associated virus
atggctgccgatggttatcttccagattggctcgaggacactctctctgaaggaataagacagtggtggaagctcaaacctggcccaccaccaccaaagcccgcagagcggcataaggacgacagcaggggtcttgtgcttcctgggtacaagtacctcggacccttcaacggactcgacaagggagagccggtcaacgaggcagacgccgcggccctcgagcacgacaaggcctacgaccggcagctcgacagcggagacaacccgtacctcaagtacaaccacgccgacgcggagtttcaggagcgccttaaaggagatacgtcttttgggggcaacctcggacgagcagtcttccaggccaaaaagaggattcttgaacctctgggcctggttgaggaacctgttaagacggctccgggaaaaaagaggccggtagagcactctcctgcggagccagactcctcctcgggaaccggaaaagcgggccagcagcctgcaagaaagagattgaattttggtcagactggagacgcagactcagtacctgacccccagcctctcggacagccaccagcagccccctctggtctgggaactaatacgatggcttcaggcagtggcgcaccaatggcagacaataacgagggcgccgacggagtgggtaattcctcgggaaattggcattgcgattccacatggatgggcggcagagtcatcaccaccagcacccgcacctgggccctgcccacctacaacaaccatctgtacaagcaaatctccagccagtctggagccagcaacgacaaccactactttggctacagcaccccctgggggtattttgacttcaacagattccactgccacttctccccacgtgactggcaaagactcatcaacaacaactggggattccggcccaagagactcagcttcaagctctttaacattcaagtcaaagaggtcacgcagaatgacggtacgacgacgattgccaataaccttaccagcacggttcaggtgtttactgactcggagtaccagctcccgtacgtcctcggctcggcgcatcaaggatgcctcccgccgttcccagcagacgtcttcatggtgccacagtatggatacctcaccctgaacaacggcagtcaggcggtaggacgctcttccttttactgcctggagtactttccttctcagacgcttcgtaccggaaacaactttaccttcagctacacctttgaagacgttcctttccatagcagctacgctcacagccaaagtctggaccgtctcatgaatcctctcatcgaccagtacctgtattacttgagcagaacaaacactccaagcggaaccaccacgatgtccaggcttcagttttctcaggccggagcaagtgacattcgggaccagtctagaaactggcttcctggaccctgttaccgccagcagcgagtatcaaagacagctgcggacaacaacaacagtgattactcgtggactggagctaccaagtaccacctcaatggaagagactctctggtgaatccgggcccagctatggccagccacaaggacgatgaagaaaaatattttcctcagagcggggttctcatctttggaaaacaagactcgggaaaaactaatgtggacattgaaaaggttatgattacagacgaagaggaaatcaggaccaccaatcccgtggctacggagcagtatggttctgtatctaccaacctccagagcggcaacacacaagcagctacctcagatgtcaacacacaaggcgttcttccaggcatggtctggcaggacagagacgtgtacctgcaggggcccatctgggcaaagattccacacacggacggacattttcacccctctcccctcatgggcggattcggacttaaacaccctcctccacaaattctcatcaagaacaccccggtacctgcgaatccttcgaccactttcagtgcggcaaagtttgcttccttcatcacacagtactccacggggcaggtcagcgtggagatcgagtgggagctgcagaaggagaacagcaaacgctggaatcccgaaattcagtacacttccaactacaacaaatctgttaatgtggactttactgtggacactaatggtgtgtattcagagcctcgccccattggcaccagatacctgactcgtaatctgtaa

SEQ ID NO: 215 - protein, 735 aa, Adeno-associated virus
MAADGYLPDWLEDTLSEGIRQWWKLKPGPPPPKPAERHKDDSRGLVLPGYKYLGPFNGLDKGEPVNEADAAALEHDKAYDRQLDSGDNPYLKYNHADAEFQERLKGDTSFGGNLGRAVFQAKKRILEPLGLVEEPVKTAPGKKRPVEHSPAEPDSSSGTGKAGQQPARKRLNFGQTGDADSVPDPQPLGQPPAAPSGLGTNTMASGSGAPMADNNEGADGVGNSSGNWHCDSTWMGGRVITTSTRTWALPTYNNHLYKQISSQSGASNDNHYFGYSTPWGYFDFNRFHCHFSPRDWQRLINNNWGFRPKRLSFKLFNIQVKEVTQNDGTTTIANNLTSTVQVFTDSEYQLPYVLGSAHQGCLPPFPADVFMVPQYGYLTLNNGSQAVGRSSFYCLEYFPSQTLRTGNNFTFSYTFEDVPFHSSYAHSQSLDRLMNPLIDQYLYYLSRTNTPSGTTTMSRLQFSQAGASDIRDQSRNWLPGPCYRQQRVSKTAADNNNSDYSWTGATKYHLNGRDSLVNPGPAMASHKDDEEKYFPQSGVLIFGKQDSGKTNVDIEKVMITDEEEIRTTNPVATEQYGSVSTNLQSGNTQAATSDVNTQGVLPGMVWQDRDVYLQGPIWAKIPHTDGHFHPSPLMGGFGLKHPPPQILIKNTPVPANPSTTFSAAKFASFITQYSTGQVSVEIEWELQKENSKRWNPEIQYTSNYNKSVNVDFTVDTNGVYSEPRPIGTRYLTRNL

SEQ ID NO: 216 - DNA, 2208 bp, Adeno-associated virus
atggctgccgatggttatcttccagattggctcgaggacactctctctgaaggaataagacagtggtggaagctcaaacctggcccaccaccaccaaagcccgcagagcggcataaggacgacagcaggggtcttgtgcttcctgggtacaagtacctcggacccttcaacggactcgacaagggagagccggtcaacgaggcagacgccgcggccctcgagcacgacaaggcctacgaccggcagctcgacagcggagacaacccgtacctcaagtacaaccacgccgacgcggagtttcaggagcgtcttaaagaagatacgtcttttgggggcaacctcggacgagcagtcttccaggccaaaaagaggattcttgaacctctgggcctggttgaggaacctgttaagacggctccgggaaaaaagaggccggtagagcactctcctgcggagccagactcctcctcgggaaccggaaaagcgggccagcagcctgcaagaaagagattgaattttggtcagactggagacgcagactcagtacctgacccccagcctctcggacagccaccagcagccccctctggtctgggaactaatacgatggcttcaggcagtggcgcaccaatggcagacaataacgagggcgccgacggagtgggtaattcctcgggaaattggcattgcgattccacatggatgggcgacagagtcatcaccaccagcacccgcacctgggccctgcccacctgcaacaaccatctgtacaagcaaatctccagccagtctggagccagcaacgacaaccactactttggctacagcaccccctgggggtattttgacttcaacagattccactgccacttctccccacgtgactggcaaagactcatcaacaacaactggggattccggcccaagagactcagcttcaagctctttaacattcaagtcaaagaggtcacgcagaatgacggtacgacgacgattgccaataaccttaccagcacggttcaggtgtttactgactcggagtaccagctcccgtacgtcctcggctcggcgcatcaaggatgcctcccgccgttcccagcagacgtcttcatggtgccacagtatggatacctcaccctgaacaacggcagtcaggcggtaggacgctcttccttttactgcctggagtattttccttctcagatgcttcgtaccggaaacaactttaccttcagctacacctttgaagacgttcctttccatagcagctacgctcacagccaaagtctggaccgtctcatgaatcctctcatcgaccagtacctgtattacttgagcagaacaaacactccaagcggaaccaccacgatgtccaggcttcagttttctcaggccggagcaagtgacattcgggaccagtctagaaactggcttcctggaccctgttaccgccagcagcgagtatcaaagacagctgcggacaacaacaacagtgattactcgtggactggagctaccaagtaccacctcaatggaagagactctctggtgaatccgggcccagctatggccagccacaaggacgatgaagaaaaatattttcctcagagcggggttctcatctttggaaaacaagactcgggaaaaactaatgtggacattgaaaaggttatgattacagacgaagaggaaatcaggaccaccaatcccgtggctacggagcagtatggttctgtatctacctacctccagagcggcaacacacaagcagctacctcagatgtcaacacacaaggcgttcttccaggcatggtctggcaggacagagacgtgtacctgcgggggcccatctgggcaaagattccacacacggacggacattttcacccctctcccctcatgggcggatttggacttaaacaccctcctccacaaattctcatcaagaacaccccggtacctgcgaatccttcgaccactttcagtgcggcaaagtttgcttccttcatcacacagtactccacggggcaggtcagcgtggagatcgagtgggagctgcagaaggagaacagcaaacgctggaatcccgaaattcagtacacttccaactacaacaaatctgttaatgtggactttactgtggacactaatggtgtgtattcagagcctcgccccattggcaccagatacctgactcgtaatctgtaa

SEQ ID NO: 217 - protein, 735 aa, Adeno-associated virus
MAADGYLPDWLEDTLSEGIRQWWKLKPGPPPPKPAERHKDDSRGLVLPGYKYLGPFNGLDKGEPVNEADAAALEHDKAYDRQLDSGDNPYLKYNHADAEFQERLKEDTSFGGNLGRAVFQAKKRILEPLGLVEEPVKTAPGKKRPVEHSPAEPDSSSGTGKAGQQPARKRLNFGQTGDADSVPDPQPLGQPPAAPSGLGTNTMASGSGAPMADNNEGADGVGNSSGNWHCDSTWMGDRVITTSTRTWALPTCNNHLYKQISSQSGASNDNHYFGYSTPWGYFDFNRFHCHFSPRDWQRLINNNWGFRPKRLSFKLFNIQVKEVTQNDGTTTIANNLTSTVQVFTDSEYQLPYVLGSAHQGCLPPFPADVFMVPQYGYLTLNNGSQAVGRSSFYCLEYFPSQMLRTGNNFTFSYTFEDVPFHSSYAHSQSLDRLMNPLIDQYLYYLSRTNTPSGTTTMSRLQFSQAGASDIRDQSRNWLPGPCYRQQRVSKTAADNNNSDYSWTGATKYHLNGRDSLVNPGPAMASHKDDEEKYFPQSGVLIFGKQDSGKTNVDIEKVMITDEEEIRTTNPVATEQYGSVSTYLQSGNTQAATSDVNTQGVLPGMVWQDRDVYLRGPIWAKIPHTDGHFHPSPLMGGFGLKHPPPQILIKNTPVPANPSTTFSAAKFASFITQYSTGQVSVEIEWELQKENSKRWNPEIQYTSNYNKSVNVDFTVDTNGVYSEPRPIGTRYLTRNL

SEQ ID NO: 218 - DNA, 2208 bp, Adeno-associated virus; identical to SEQ ID NO: 212

SEQ ID NO: 219 - protein, 735 aa, Adeno-associated virus; identical to SEQ ID NO: 213

SEQ ID NO: 220 - DNA, 2208 bp, Adeno-associated virus
atggctgccgatggttatcttccagattggctcgaggacactctctctgaaggaataagacagtggtggaagctcaaacctggcccaccaccaccaaagcccgcagagcggcataaggacggcagcaggggtcttgtgcttcctgggtacaagtacctcggacccttcaacggactcgacaagggagagccggtcaacgaggcagacgccgcggccctcgagcacgacaaggcctacgaccggcagctcaacagcggagacaacccgtacctcaagtacaaccacgccgacgcggagtttcaggagcgccttaaagaagatacgtcttttgggggcaacctcggacgagcagtcttccaggcaaaaaagagggttcttgaacctctgggcctggttgaggagcctgttaaaacggctccgggaaaaaagagaccggtagagcactctcctgcggagccagactcctcctcgggaaccggaaaagcgggccagcagcctgcaagaaagagattgaattttggtcagactggagacgcagactccgtacctgacccccagcctctcggacagccaccagcagccccctctggtctgggatctactacaatggctacaggcagtggcgcaccaatggcagacaataacgagggtgccgatggagtgggtaattcctcaggaaattggcattgcgattcccaatggctgggcgacagagtcatcaccacaagcactcgaacctgggccctgcccacctacaacaaccacctctacaagcaaatctccagccaatcaggagcctcaaacgacaaccactattttggctacagcaccccttgggggtattttgacttcaacagattccactgccacttttcaccacgtgactggcaaagactcatcaacaacaactggggattccgacccaagagactcaacttcaagctctttaacattcaagtcaaagaggtcacgcagaatgacggtacgacgacgattgccaataaccttaccagcacggttcaggtgtttactgactcggagtaccagctcccgtacgtcctcggctcggcgcatcaaggatgcctcccgccgttcccagcggacgtcttcatggtcccacagtatggatacctcaccctgaacaacgggagtcaggcggtaggacgctctcccttttactgcctggagtactttccttctcagatgctgcgtactggaaacaactttcagttcagctacacttttgaagacgtgcctttccacagcagctacgctcacagccagagtctggatcggctgatgaatcctctgatcgaccagtacctgtattatctgaacaagacacaaacaaatagtggaactcttcagcagtctcggctactgtttagccaagctggacccaccaacatgtctcttcaagctaaaaactggctgcctggaccttgctacagacagcagcgtctgtcaaagcaggcaaacgacaacaacaacagcaactttccctggactgcagctacaaagtatcatctaaatggccgggactcgttggttaatccaggaccagctatggccagtcacaaggatgacgaagaaaagtttttccccatgcatggaaccctgatatttggtaaacaaggaacaaatgccaacgacgcggatttggaaaatgtcatgattacagatgaagaagaaatcaggaccaccaatcccgtggctacggagcagtacgggactgtgtcaaataatttgcaaaactcaaacactggtccaactactggaactgtcaatcaccaaggagcgttacctggtatggtgtggcaggatcgagatgtgtaccttcagggacccatttgggccaagattcctcacaccgatggacactttcatccttctccactgatgggaggttttggactcaaacacccgcctcctcagattatgatcaaaaacactcccgttccagccaatcctcctacaaacttcagttctgccaagtttgcttctttcatcacacagtattccacggggcaggtcagcgtggagatcgagtgggagctgcagaaggagaacagcaaacgctggaatcccgaaattcagtacacttccaactacaacaaatctgttaatgtggactttactgtggacaataatggcgtgtactcagagcctcgccccattggcaccagatacctgactcgtaatctgtaa

SEQ ID NO: 221 - protein, 735 aa, Adeno-associated virus
MAADGYLPDWLEDTLSEGIRQWWKLKPGPPPPKPAERHKDGSRGLVLPGYKYLGPFNGLDKGEPVNEADAAALEHDKAYDRQLNSGDNPYLKYNHADAEFQERLKEDTSFGGNLGRAVFQAKKRVLEPLGLVEEPVKTAPGKKRPVEHSPAEPDSSSGTGKAGQQPARKRLNFGQTGDADSVPDPQPLGQPPAAPSGLGSTTMATGSGAPMADNNEGADGVGNSSGNWHCDSQWLGDRVITTSTRTWALPTYNNHLYKQISSQSGASNDNHYFGYSTPWGYFDFNRFHCHFSPRDWQRLINNNWGFRPKRLNFKLFNIQVKEVTQNDGTTTIANNLTSTVQVFTDSEYQLPYVLGSAHQGCLPPFPADVFMVPQYGYLTLNNGSQAVGRSPFYCLEYFPSQMLRTGNNFQFSYTFEDVPFHSSYAHSQSLDRLMNPLIDQYLYYLNKTQTNSGTLQQSRLLFSQAGPTNMSLQAKNWLPGPCYRQQRLSKQANDNNNSNFPWTAATKYHLNGRDSLVNPGPAMASHKDDEEKFFPMHGTLIFGKQGTNANDADLENVMITDEEEIRTTNPVATEQYGTVSNNLQNSNTGPTTGTVNHQGALPGMVWQDRDVYLQGPIWAKIPHTDGHFHPSPLMGGFGLKHPPPQIMIKNTPVPANPPTNFSSAKFASFITQYSTGQVSVEIEWELQKENSKRWNPEIQYTSNYNKSVNVDFTVDNNGVYSEPRPIGTRYLTRNL

SEQ ID NO: 222 - DNA, 2208 bp, Adeno-associated virus
atggctgccgatggttatcttccagattggctcgaggacactctctctgaaggaataagacagtggtggaagctcaaacctggcccaccaccaccaaagcccgcagagcggcataaggacgacagcaggggtcttgtgcttcctgggtacaagtacctcggacccttcaacggactcgacaagggagagccggtcaacgaggcagacgccgcggccctcgagcacgacaaggcctacgaccggcagctcgacagcggagacaacccgtacctcaagtacaaccacgccgacgcggagtttcaggagcgtcttaaagaagatacgtcttttgggggcaacctcggacgagcagtcttccaggccaaaaagaggattcttgaacctctgggcctggttgaggaacctgttaagacggctccgggaaaaaagaggccggtagagcactctcctgcggagccagactcctcctcgggaaccggaaaagcgggccagcagcctgcaagaaagagattgaattttggtcagactggagacgcagactcagtacctgacccccagcctctcggacagccaccagcagccccctctggtctgggaactaatacgatggcttcaggcagtggcgcaccaatggcagacaataacgagggcgccgacggagtgggtaattcctcgggaaattggcattgcgattccacatggatgggcgacagagtcatcaccaccagcacccgcacctgggccctgcccacctacaacaaccatctgtacaagcaaatctccagccagtctggagccagcaacgacaaccactactttggctacagcaccccctgggggtattttgacttcaacagattccactgccacttctccccacgtgactggcaaagactcatcaacaacaactggggattccggcccaagagactcagcttcaagctctttaacattcaagtcaaagaggtcacgcagaatgacggtacgacgacgattgccaataaccttaccagcacggttcaggtgtttactgactcggagtaccagctcccgtacgtcctcggctcggcgcatcaaggatgcctcccgccgttcccagcagacgtcttcatggtgccacagtatggatacctcaccctgaacaacggcagtcaggcggtaggacgctcttccttttactgcctggagtactttccttctcagatgcttcgtaccggaaacaactttaccttcagctacacctttgaagacgttcctttccatagcagctacgctcacagccaaagtctggaccgtctcatgaatcctctcatcgaccagtacctgtattacttgagcagaacaaacactccaagcggaaccaccacgatgtccaggcttcagttttctcaggccggagcaagtgacattcgggaccagtctagaaactggcttcctggaccctgttaccgccagcagcgagtatcaaagacagctgcggacaacaacaacagtgattactcgtggactggagctaccaagtaccacctcaatggaagagactctctggtgaatccgggcccagctatggccagccacaaggacgatgaagaaaaatattttcctcagagcggggttctcatctttggaaaacaagactcgggaaaaactaatgtggacattgaaaaggttatgattacagacgaagaggaaatcaggaccaccaatcccgtggctacggagcagtatggttctgtatctaccaacctccagagcggcaacacacaagcagctacctcagatgtcaacacacaaggcgttcttccaggcatggtctggcaggacagagacgtgtacctgcaggggcccatctgggcaaagattccacacacggacggacattttcacccctctcccctcatgggcggattcggacttaaacaccctcctccacaaattctcatcaagaacaccccggtacctgcgaatccttcgaccactttcagtgcggcaaagtttgcttccttcatcacacagtactccacggggcaggtcagcgtggagatcgagtgggagctgcagaaggagaacagcaaacgctggaatcccgaaattcagtacacttccaactacaacaaatctgttaatgtggactttactgtggacactaatggtgtgtattcagagcctcgccccattggcaccagatacctgactcgtaatctgtaa

SEQ ID NO: 223 - protein, 735 aa, Adeno-associated virus
MAADGYLPDWLEDTLSEGIRQWWKLKPGPPPPKPAERHKDDSRGLVLPGYKYLGPFNGLDKGEPVNEADAAALEHDKAYDRQLDSGDNPYLKYNHADAEFQERLKEDTSFGGNLGRAVFQAKKRILEPLGLVEEPVKTAPGKKRPVEHSPAEPDSSSGTGKAGQQPARKRLNFGQTGDADSVPDPQPLGQPPAAPSGLGTNTMASGSGAPMADNNEGADGVGNSSGNWHCDSTWMGDRVITTSTRTWALPTYNNHLYKQISSQSGASNDNHYFGYSTPWGYFDFNRFHCHFSPRDWQRLINNNWGFRPKRLSFKLFNIQVKEVTQNDGTTTIANNLTSTVQVFTDSEYQLPYVLGSAHQGCLPPFPADVFMVPQYGYLTLNNGSQAVGRSSFYCLEYFPSQMLRTGNNFTFSYTFEDVPFHSSYAHSQSLDRLMNPLIDQYLYYLSRTNTPSGTTTMSRLQFSQAGASDIRDQSRNWLPGPCYRQQRVSKTAADNNNSDYSWTGATKYHLNGRDSLVNPGPAMASHKDDEEKYFPQSGVLIFGKQDSGKTNVDIEKVMITDEEEIRTTNPVATEQYGSVSTNLQSGNTQAATSDVNTQGVLPGMVWQDRDVYLQGPIWAKIPHTDGHFHPSPLMGGFGLKHPPPQILIKNTPVPANPSTTFSAAKFASFITQYSTGQVSVEIEWELQKENSKRWNPEIQYTSNYNKSVNVDFTVDTNGVYSEPRPIGTRYLTRNL

SEQ ID NO: 224 - DNA, 2208 bp, Adeno-associated virus
atggctgccgatggttatcttccagattggctcgaggacactctctctgaaggaataagacagtggtggaagctcaaacctggcccaccaccaccaaagcccgcagagcggcataaggacgacagcaggggtcttgtgcttcctgggtacaagtacctcggacccttcaacggactcgacaagggagagccggtcaacgaggcagacgccgcggccctcgagcacgacaaggcctacgaccggcagctcgacagcggagacaacccgtacctcaagtacaaccacgccgacgcggagtttcaggagcgtcttaaagaagatacgtcttttgggggcaacctcggacgagcagtcttccaggccaaaaagaggattcttgaacctctgggcctggttgaggaacctgttaagacggctccgggaaaaaagaggccggtagagcactctcctgcggagccagactcctcctcgggaaccggaaaagcgggccagcagcctgcaagaaagagattgaattttggtcagactggagacgcagactcagtacctgacccccagcctctcggacagccaccagcagccccctctggtctgggaactaatacgatggcttcaggcagtggcgcaccaatggcagacaataacgagggcgccgacggagtgggtaattcctcgggaaattggcattgcgattccacatggatgggcgacagagtcatcaccaccagcacccgcacctgggccctgcccacctacaacaaccatctgtacaagcaaatctccagccagtctggagccagcaacgacaaccactactttggctacagcaccccctgggggtatttcgacttcaacagattccactgccacttctccccacgtgactggcaaagactcatcaacaacaactggggattccggcccaagagactcagcttcaagctctttaacattcaagtcaaagaggtcacgcagaatgacggtacgacgacgattgccaataaccttaccagcacggttcaggtgtttactgactcggggtaccagctcccgtacgtcctcggctcggcgcatcaaggatgccttccgccgttcccagcagacgtcttcatggtgccacagtatggatacctcaccctgaacaacggcagtcaggcggtaggacgctcttccttttactgcctggagtactttccttctcagatgcttcgtaccggaaacaactttaccttcagctacacctttgaagacgttcctttccatagcagctacgctcacggccaaagtctggaccgtctcatgaatcctctcatcgaccagtacctgtattacttgagcagaacaaacactccaagcggaaccaccacgatgtccaggcttcagttttctcaggccggagcaagtgacgttcgggaccagtctagaaactggcttcctggaccctgttaccgccagcagcgagtatcaaagacagctgcggacaacaacaacagtgattactcgtggactggagctaccaagtaccacctcaatggaagagactctctggtgaatccgggcccagctatggccagccacaaggacgatgaagaaaaatattttcctcagagcggggttctcgtctttggaaaacaagactcgggaaaaactaatgtggacattgaaaaggttatgattacagacgaagaggaaatcaggaccaccaatcccgcggctacggagcagtatggttctgtatctaccaacctccagagcggcaacacacaagcagctacctcagatgtcaacacacaaggcgttcttccaggcatggtctggcaggacagagacgtgtacctgcaggggcccatctgggcaaagattccacacacggacggacattttcacccctctcccctcatgggcggattcggacttaaacaccctcctccacaaattctcatcaagaacaccccggtacctgcgaatccttcgaccactttcagtgcggcaaagtttgtttccttcatcacacagtactccacggggcaggtcagcgtggagatcgagtgggagctgcagaaggagaacagcaaacgctggaatcccgaaattcagtacacttccaactacaacaaatctgttaatgtggactttactgtggacactaatggtgtgtattcagagcctcgccccattggcaccagatacctgactcgtaatctgtaa

SEQ ID NO: 225 - protein, 735 aa, Adeno-associated virus
MAADGYLPDWLEDTLSEGIRQWWKLKPGPPPPKPAERHKDDSRGLVLPGYKYLGPFNGLDKGEPVNEADAAALEHDKAYDRQLDSGDNPYLKYNHADAEFQERLKEDTSFGGNLGRAVFQAKKRILEPLGLVEEPVKTAPGKKRPVEHSPAEPDSSSGTGKAGQQPARKRLNFGQTGDADSVPDPQPLGQPPAAPSGLGTNTMASGSGAPMADNNEGADGVGNSSGNWHCDSTWMGDRVITTSTRTWALPTYNNHLYKQISSQSGASNDNHYFGYSTPWGYFDFNRFHCHFSPRDWQRLINNNWGFRPKRLSFKLFNIQVKEVTQNDGTTTIANNLTSTVQVFTDSGYQLPYVLGSAHQGCLPPFPADVFMVPQYGYLTLNNGSQAVGRSSFYCLEYFPSQMLRTGNNFTFSYTFEDVPFHSSYAHGQSLDRLMNPLIDQYLYYLSRTNTPSGTTTMSRLQFSQAGASDVRDQSRNWLPGPCYRQQRVSKTAADNNNSDYSWTGATKYHLNGRDSLVNPGPAMASHKDDEEKYFPQSGVLVFGKQDSGKTNVDIEKVMITDEEEIRTTNPAATEQYGSVSTNLQSGNTQAATSDVNTQGVLPGMVWQDRDVYLQGPIWAKIPHTDGHFHPSPLMGGFGLKHPPPQILIKNTPVPANPSTTFSAAKFVSFITQYSTGQVSVEIEWELQKENSKRWNPEIQYTSNYNKSVNVDFTVDTNGVYSEPRPIGTRYLTRNL

SEQ ID NO: 226 - DNA, 2208 bp, Adeno-associated virus
atggctgccgatggttatcttccagattggctcgaggacactctctctgaaggaataagacagtggtggaaactcaaacctggcccaccaccaccaaagcccgcagagcggcataaggacgacagcaggggtcttgtgcttcctgggtacaagtacctcggacccttcaacggactcgacaagggagagccggtcaacgaggcagacgccgcggccctcgagcacgacaaggcctacgaccggcagctcgacagcggagacaacccgtacctcaagtacaaccacgccgacgcggagtttcaggagcgccttaaagaagatacgtcttttgggggcaacctcggacgagcagtcttccaggcaaaaaagagggttctggaacctctgagcctggttgaggagcctgttaagacggctccgggaaaaaagaggccggtagagcactctcccgcagagccagattcctcctccggaactggaaagtcgggcaaccagcctgcaagaaagagattgaatttcggtcagactggagactcagactccgtacctgacccccagcctctcggacagccaccagcagccccctctggtctgggaactaatacgatggctacaggcagtggcgcaccaatggcagacaataacgagggcgccgacggagtgggtaattcctcgggaaattggcattgcgattccacatggatgggcgacagagtcatcaccaccagcacccgaacctgggccctgcccacctacaacaaccatctgtacaagcaaatatccagccagtctggagccagcaacgacaatcactactttggctacagcaccccctgggggtattttgacttcaacagattccactgccacttttcaccacgtgactggcaaagactcatcaacaacaactggggattccgacccaagagactcaacttcaagctctttaacattcaagtcaaagaggtcacgcagaatgacggtacgacgacgattgccaataaccttaccagcacggttcaggtgtttactgactcggagtaccagctcccgtacgtcctcggctcggcgcatcaaggatgcctcccgccgttcccagcagacgtcttcatggtgccacagtatggatacctcaccctgaacaacgggagtcaggcagtaggacgctcttcattttactgcctagagtactttccttctcagatgctgcgtaccggaaacaactttaccttcagctacacctttgaggacgttcctttccacagcagctacgctcacagccagagtttggaccgtctcatgaatcctctcatcgaccagtacctgtattacttgagcagaacaaacactccaagcggaaccaccacgcagtccaggcttcagttttctcaggccggagcgagtgacattcaggaccagtctaggaactggcttcctggaccctgttaccgtcagcagcgagtatcaaagacatctgcggataacaacaacagtgaatactcgtggactggagctaccaagtaccacctcaatggcagagactctctggtgaatccgggcccggccatggccagccacaaagacgatgaagaaaagttttttcctcagagcggggttcttatctttgggaagcaaggctcagagaaaacaaatgtggatattgaaaaggtcatgattacagacgaagaggaaatcaggaccaccaatcccgtggctacggagcagtatggttctgtatctaccaacctccagagcggcaacacacaagcagctaccgcagatgtcaacacacaaggcgttcttccaggcatggtcgggcaagacagagacgtgtacctgcaggggcctacttgggcaaagattccacacacggacggacattttcacccctctcccctcatgggcggatttggacttaaacaccctcctccacagattctcatcaagaacaccccggtacctgcgaatccttcgaccaccttcagtgcggcaaagtttgcttccttcattacacagtactccacggggcaggtcagcgtggagatcgagtgggagctgcagaaggagaacagcaaacgctggaatcccgagatccagtacacttccaactacaacaagtctgttaatgtggactttactgtggacactaatggcgtgtattcagagcctcgccccattggcaccagatacctgactcgtaatctgtaa

SEQ ID NO: 227 - protein, 735 aa, Adeno-associated virus
MAADGYLPDWLEDTLSEGIRQWWKLKPGPPPPKPAERHKDDSRGLVLPGYKYLGPFNGLDKGEPVNEADAAALEHDKAYDRQLDSGDNPYLKYNHADAEFQERLKEDTSFGGNLGRAVFQAKKRVLEPLSLVEEPVKTAPGKKRPVEHSPAEPDSSSGTGKSGNQPARKRLNFGQTGDSDSVPDPQPLGQPPAAPSGLGTNTMATGSGAPMADNNEGADGVGNSSGNWHCDSTWMGDRVITTSTRTWALPTYNNHLYKQISSQSGASNDNHYFGYSTPWGYFDFNRFHCHFSPRDWQRLINNNWGFRPKRLNFKLFNIQVKEVTQNDGTTTIANNLTSTVQVFTDSEYQLPYVLGSAHQGCLPPFPADVFMVPQYGYLTLNNGSQAVGRSSFYCLEYFPSQMLRTGNNFTFSYTFEDVPFHSSYAHSQSLDRLMNPLIDQYLYYLSRTNTPSGTTTQSRLQFSQAGASDIQDQSRNWLPGPCYRQQRVSKTSADNNNSEYSWTGATKYHLNGRDSLVNPGPAMASHKDDEEKFFPQSGVLIFGKQGSEKTNVDIEKVMITDEEEIRTTNPVATEQYGSVSTNLQSGNTQAATADVNTQGVLPGMVGQDRDVYLQGPTWAKIPHTDGHFHPSPLMGGFGLKHPPPQILIKNTPVPANPSTTFSAAKFASFITQYSTGQVSVEIEWELQKENSKRWNPEIQYTSNYNKSVNVDFTVDTNGVYSEPRPIGTRYLTRNL

SEQ ID NO: 228 - DNA, 2208 bp, Adeno-associated virus
atggctgccgatggttatcttccagattggctcgaggacactctctctgaaggaataagacagtggtggaagctcaaacctggcccaccaccaccaaagcccgcagagcggcataaggacgacagcaggggtcttgtgcttcctgggtacaagtacctcggacccttcaacggactcgacaagggagagccggtcaacgaggcagacgccgcggccctcgagcacgacaaggcctacgaccggcagctcgacagcggagacaacccgtacctcaagtacaaccacgccgacgcagagtttcaggagcgccttaaagaagatacgtcttttgggggcaacctcggacgagcagtcttccaggcaaaaaagagggttctggaacctctgggcctggttgaggagcctgttaagacggctccgggaaaaaagaggccggtagagcactctcctgcagagccagattcctcctccggaactggaaagtcgggcaaccagcctgcaagaaagagattgaatttcggtcagactggagactcagactccgtacctgacccccagcctctcggacagccaccagcagccccctctggtctgggaactaatacgatggctacaggcagtggcgcaccaatggcagacaataacgagggcgccgacggagtgggtaattcctcgggaaattggcattgcgattccacatggatgggcgacagagtcatcaccaccagcacccgaacctgggccctgcccacctacaacaaccatctgtacaagcaaatatccagccagtctggagccagcaacgacaatcactactttggctacagcaccccctgggggtattttgacttcaacagattccactgccacttttcaccacgtgactggcaaagactcatcaacaacaactggggattccgacccaagagactcaacttcaagctctttaacattcaagtcaaagaggtcacgcagaatgacggtacgacgacgattgccaataaccttaccagcacggttcaggtgtttactgactcggagtaccagctcccgtacgtcctcggctcggcgcatcaaggatgcctcccgccgttcccagcagacgtcttcatggtgccacagtatggatacctcaccctgaacaacgggagtcaggcagtaggacgctcttcattttactgcctagggtactttccttctcagatgctgcgtaccggaaacaactttaccttcagctacacctttgaggacgttcctttccacagcagctacgctcacagccagagtttggaccgtctcatgaatcctctcatcgaccagtacctgtattacttgagcagaacaaacactccaagcggaaccaccacgcagtccaggcttcagttttctcaggccggagcgagtgacattcgggaccagtctaggaactggcttcctggaccctgttaccgtcagcagcgagtatcaaagacatctgcggataacaacaacagtgaatactcgtggactggagctaccaagtaccacctcaatggcagagactctctggtgaatccgggcccggccatggccagccacaaagacgatgaagaaaagttttttcctcagagcggggttcttatctttgggaagcaaggcccagagaaaacaaatgtggatattgaaaaggtcatgattacagacgaagaggaaatcaggaccaccaatcccgtggctacggagcagtatggttctgtatctaccaacctccagagcggcaacacacaagcagctaccgcagatgtcaacacacaaggcgttcttccaggcatggtctggcaagacagagacgtgtacctgcaggggcctatttgggcaaagattccacacacggacggacattttcacccctctcccctcatgggcggatttggacttaaacaccctcctccacagattctcatcaagaacaccccggtacctgcgaatccttcgaccaccttcagtgcggcaaagtttgcttccttcattacacagtactccacggggcaggtcagcgtggagatcgagtgggagctgcagaaggagaacagcaaacgctggaatcccgagatccagtacacttccaactacaacaagtctgttaatgtggactttactgtggacactaatggcgtgtattcagagcctcgccccattggcaccagatacctgactcgtaatctgtaa

SEQ ID NO: 229 - protein, 735 aa, Adeno-associated virus
MAADGYLPDWLEDTLSEGIRQWWKLKPGPPPPKPAERHKDDSRGLVLPGYKYLGPFNGLDKGEPVNEADAAALEHDKAYDRQLDSGDNPYLKYNHADAEFQERLKEDTSFGGNLGRAVFQAKKRVLEPLGLVEEPVKTAPGKKRPVEHSPAEPDSSSGTGKSGNQPARKRLNFGQTGDSDSVPDPQPLGQPPAAPSGLGTNTMATGSGAPMADNNEGADGVGNSSGNWHCDSTWMGDRVITTSTRTWALPTYNNHLYKQISSQSGASNDNHYFGYSTPWGYFDFNRFHCHFSPRDWQRLINNNWGFRPKRLNFKLFNIQVKEVTQNDGTTTIANNLTSTVQVFTDSEYQLPYVLGSAHQGCLPPFPADVFMVPQYGYLTLNNGSQAVGRSSFYCLGYFPSQMLRTGNNFTFSYTFEDVPFHSSYAHSQSLDRLMNPLIDQYLYYLSRTNTPSGTTTQSRLQFSQAGASDIRDQSRNWLPGPCYRQQRVSKTSADNNNSEYSWTGATKYHLNGRDSLVNPGPAMASHKDDEEKFFPQSGVLIFGKQGPEKTNVDIEKVMITDEEEIRTTNPVATEQYGSVSTNLQSGNTQAATADVNTQGVLPGMVWQDRDVYLQGPIWAKIPHTDGHFHPSPLMGGFGLKHPPPQILIKNTPVPANPSTTFSAAKFASFITQYSTGQVSVEIEWELQKENSKRWNPEIQYTSNYNKSVNVDFTVDTNGVYSEPRPIGTRYLTRNL

SEQ ID NO: 230 - protein, 735 aa, Adeno-associated virus
MAADGYLPDWLEDTLSEGIRQWWKLKPGPPPPKPAERHKDDSRGLVLPGYKYLGPFNGLDKGEPVNEADAAALEHDKAYDRQLDSGDNPYLKYNHADAEFQERLKEDTSFGGNLGRAVFQAKKRVLEPLGLVEEPVKTAPGKKRPVEHSPAEPDSSSGTGKSGNQPARKRLNFGQTGDSDSVPDPQPLGQPPAAPSGLGTNTMATGSGAPMADNNEGADGVGNSSGNWHCDSTWMGDRVITTSTRTWALPTYNNHLYKQISSQSGASNDNHYFGYSTPWGYFDFNRFHCHFSPRDWQRLINNNWGFRPKRLNFKLFNIQVKEVTQNDGTTTIANNLTSTVQVFTDSEYQLPYVLGSAHQGCLPPFPADVFMVPQYGYLTLNNGSQAVGRSSFYCLEYFPSQMLRTGNNFTFSYTFEDVPFHSSYAHSQSLDRLMNPLIDQYLYYLSRTNTPSGTTTQSRLQFSQAGASDIRDQSRNWLPGPCYRQQRVSKTSADNNNSEYSWTGATKYHLNGRDSLVNPGPAMASHKDDEEKFFPQSGVLIFGKQGPEKTNVDIEKVMITDEEEIRTTNPVATEQYGSVSTNLQSGNTQAATADVNTQGVLPGMVWQDRDVYLQGPIWAKIPHTDGHFHPSPLMGGFGLKHPPPQILIKNTPVPANPSTTFSAAKFASFITQYSTGQVSVEIEWELQKENSKRWNPEIQYTSNYNKSVNVDFTVDTNGVYSEPRPIGTRYLTRNL

SEQ ID NO: 231 - protein, 735 aa, Adeno-associated virus; identical to SEQ ID NO: 230

SEQ ID NO: 232 - DNA, 2211 bp, Adeno-associated virus
atggctgccgatggttatcttccagattggctcgaggacactctctctgaaggaataagacagtggtggaagctcaaacctggcccaccaccaccaaagcccgcagagcggcataaggacgacagcaggggtcttgtgcttcctgggtacaagtacctcggacccttcaacggactcgacaagggggagccggtcaacgaggcagacgccgcggccctcgagcacgacaaggcctacgaccggcagctcgacagcggagacaacccgtacctcaagtacaaccacgccgacgcagagtttcaggagcgccttaaagaagatacgtcttttgggggcaacctcggacgagcagtcttccaggcgaaaaagagggttcttgaacctctgcggcctggtttgaggaaacctgttaagacggctccgggaaaaaagaggccggtagagcactctcctgtggagccagactcctcctcgggaaccggaaaagcgggccagcagcctgcaagaaaaagattaaattttggtcagactggagacgcagactccgtacctgacccccagcctctcggacagccaccagcagccccctctggtctgggatctactacaatggctacaggcagtggcgcaccaatggcagacaataacgagggtgccgatggagtgggtaattcctcaggaaattggcattgcgattcccaatggctggacgacagagtcatcgccaccagcacccgaacctgggccctgcccacatacaacaaccacctctacaagcaaatctccagccaatcaggagcctgcaacgacaaccactactttggctacagcaccccctgggggtattttgacttcaacagattccactgccacttttcaccacgtgactggcaaagactcatcaacagcaactggggattccggcccaaaagactcaacttcaagctctttaatattcaagtcaaagaggtcacgcagaatgacggtacgacgacgattgccaataaccttaccagcacggttcaggtgtttactgactcggagtaccagctcccgtacgtcccgggctcggcgcatcaaggatgcctcccgccgtttccagcggacgtcttcatggtcccacagtatggatacctcaccctgaacaacgggagtcaggcggtaggacgctcttccttttactgcctggagtactttccttctcagatgctgcgtactggaaacaactttcagttcagctacacttttgaagacgtgcctttccacagcagctacgctcactgccagagtctggatcggctgatgaatcctctgatcgaccagtacctgtattatctgaacaagacacaaacaaatagtggaactcttcagcagtctcggctactgtttagccaagctggaccaaccaacatgtctcttcaagctaaaaactggctgcctggaccttgctacagacagcagcgtctgtcaaaacaggcaaacgacaataacaactgcaactttccctggactgcagctacaaagtatcatctaaatggccgggactcgttggttaatccaggaccagctatggccagtcacaaggatgacgaagaaaagtttttccccatgcatggaaccctgatatttggtaaacaaggaacaaatgccaacgacgcggatttggaaaatgtcatgattacagatgaagaagaaatcaggcccaccaatcccgtggctacggagcagtacgggactgtgtcaaataatttgcaaaactcaaacactggtccaactacaggaactgtcaatcaccaaggagcgttacctggtatggtgtggcaggatcgagacgtgtacctgcagggacccatttgggccaagattcctcacaccgatggacactttcatccttctccactgatgggaggttttggactcaaacacccgcctcctcagatcatgatcaaaagcactcccgttccagccaatcctcccacaaacttcagttctgccaagtttgcttcttccatcacacagtattccacgggacaggtcagcgtggagatcgagtgggagctgcagaaggagaacagcaaacgctggaatcccgaaattcagtacacttccaactacaacaagtctgttaatgtggactttactgtggacactaatggtgtgtattcagagcctcgccccattggcaccagatacctgactcgtaatctgtaa

SEQ ID NO: 233 - protein, 736 aa, Adeno-associated virus
MAADGYLPDWLEDTLSEGIRQWWKLKPGPPPPKPAERHKDDSRGLVLPGYKYLGPFNGLDKGEPVNEADAAALEHDKAYDRQLDSGDNPYLKYNHADAEFQERLKEDTSFGGNLGRAVFQAKKRVLEPLRPGLRKPVKTAPGKKRPVEHSPVEPDSSSGTGKAGQQPARKRLNFGQTGDADSVPDPQPLGQPPAAPSGLGSTTMATGSGAPMADNNEGADGVGNSSGNWHCDSQWLDDRVIATSTRTWALPTYNNHLYKQISSQSGACNDNHYFGYSTPWGYFDFNRFHCHFSPRDWQRLINSNWGFRPKRLNFKLFNIQVKEVTQNDGTTTIANNLTSTVQVFTDSEYQLPYVPGSAHQGCLPPFPADVFMVPQYGYLTLNNGSQAVGRSSFYCLEYFPSQMLRTGNNFQFSYTFEDVPFHSSYAHCQSLDRLMNPLIDQYLYYLNKTQTNSGTLQQSRLLFSQAGPTNMSLQAKNWLPGPCYRQQRLSKQANDNNNCNFPWTAATKYHLNGRDSLVNPGPAMASHKDDEEKFFPMHGTLIFGKQGTNANDADLENVMITDEEEIRPTNPVATEQYGTVSNNLQNSNTGPTTGTVNHQGALPGMVWQDRDVYLQGPIWAKIPHTDGHFHPSPLMGGFGLKHPPPQIMIKSTPVPANPPTNFSSAKFASSITQYSTGQVSVEIEWELQKENSKRWNPEIQYTSNYNKSVNVDFTVDTNGVYSEPRPIGTRYLTRNL

SEQ ID NO: 234 - DNA, 2208 bp, Adeno-associated virus
atggctgccgatggttatcttccagattggctcgaggacactctctctgaaggaataagacagtggtggaagctcaaacctggcccaccaccaccaaagcccgcagagcggcataaggacgacagcaggggtcttgtgcttcctgggtacaagtacctcggacccttcaacggactcgacaagggagagccggtcaacgaggcagacgccgcggccctcgagcacgacaaggcctacgaccggcagctcgacagcggagacaacccgtacctcaagtacaaccacgccgacgcggagtttcaggagcgccttaaagaggatacgtcttttgggggcaacctcggacgagcagtcttccaggcaaaaaagagggttctggaacctctgggcctggttgaggagcctgttaagacggctccgggaaaaaagaggccggtagagcactctcctgcagagccagattcctcctccggaactggaaagtcgggcaaccagcctgcaagaaagagattgaatttcggtcagactggagactcagactccgtacctgacccccagcctctcggacagccaccagcagccccctctggtctgggaactaatacgatggctacaggcagtggcgcaccaatggcagacaataacgagggcgccgacggagtgggtaattcctcgggaaattggcattgcgattccacatggatgggcgacagagtcatcaccaccagcacccgaacctgggccctgcccacctacaacaaccatctgtacaagcaaatatccagccagtctggagccagcaacgacaatcactactttggctacagcaccccctgggggtattttgacttcaacagattccactgccacttttcaccacgtgactggcaaagactcatcaacaacaactggggattccgacccaagagactcaacttcaagctctttaacattcaagtcaaagaggtcacgcagaatgacggtacgacgacgattgccaataaccttaccagcacggttcaggtgtttactgactcggagtaccagctcccgtacgtcctcggctcggcgcatcaaggatgcctcccgccgttcccagcagacgtcttcatggtgccacagtatggatacctcaccctgaacaacgggagtcaggcagtaggacgctcttcattttactgcctagagtactttccttctcagatgctgcgtaccggaaacagctttaccttcagctacacctttgaggacgttcctttccacagcagctacgctcacagccagagtttggaccgtctcatgaatcctctcatcgaccagtacctgtattacttgagcagaacaaacactccaagcggaaccaccacgcagtccaggcttcagttttctcaggccggagcgagtgacattcgggaccagtctaggaactggcttcctggaccctgttaccgtcagcagcgagtatcaaagacatctgcggataacaacaacagtgaatactcgtggactggagctaccaagtaccacctcaatggcagagactctctggtgaatccgggcccggccatggccagccacaaagacgatgaagaaaagttctttcctcagagcggggttcttatctttgggaagcaaggctcagagaaaacaaatgtggatattgaaaaggtcatgattacagacgaagaggaaatcaggaccaccaatcccgtggctacggagcagtatggttctgtatctaccaacctccagagcggcaacacacaagcagctaccgcagatgtcaacacacaaggcgttcttccaggcatggtctggcaagacagagacgtgtacctgcaggggcctatttgggcaaagattccacacacggacggacattttcacccctctcccctcatgggcggatttggacttaaacaccctcctccacagattctcatcaagaacaccccggtacctgcgaatccttcgaccaccttcagtgcggcaaagtttgcttccttcattacacagtactccacggggcaggtcagcgtggagatcgagtgggagctgcagaaggagaacagcaaacgctggaatcccgagatccagtacacttccaactacaacaagtctgttaatgtggactttactgtggacactaatggcgtgtattcagagcctcgccccattggcaccagatacctgactcgtaatctgtaa

SEQ ID NO: 235 - protein, 735 aa, Adeno-associated virus
MAADGYLPDWLEDTLSEGIRQWWKLKPGPPPPKPAERHKDDSRGLVLPGYKYLGPFNGLDKGEPVNEADAAALEHDKAYDRQLDSGDNPYLKYNHADAEFQERLKEDTSFGGNLGRAVFQAKKRVLEPLGLVEEPVKTAPGKKRPVEHSPAEPDSSSGTGKSGNQPARKRLNFGQTGDSDSVPDPQPLGQPPAAPSGLGTNTMATGSGAPMADNNEGADGVGNSSGNWHCDSTWMGDRVITTSTRTWALPTYNNHLYKQISSQSGASNDNHYFGYSTPWGYFDFNRFHCHFSPRDWQRLINNNWGFRPKRLNFKLFNIQVKEVTQNDGTTTIANNLTSTVQVFTDSEYQLPYVLGSAHQGCLPPFPADVFMVPQYGYLTLNNGSQAVGRSSFYCLEYFPSQMLRTGNSFTFSYTFEDVPFHSSYAHSQSLDRLMNPLIDQYLYYLSRTNTPSGTTTQSRLQFSQAGASDIRDQSRNWLPGPCYRQQRVSKTSADNNNSEYSWTGATKYHLNGRDSLVNPGPAMASHKDDEEKFFPQSGVLIFGKQGSEKTNVDIEKVMITDEEEIRTTNPVATEQYGSVSTNLQSGNTQAATADVNTQGVLPGMVWQDRDVYLQGPIWAKIPHTDGHFHPSPLMGGFGLKHPPPQILIKNTPVPANPSTTFSAAKFASFITQYSTGQVSVEIEWELQKENSKRWNPEIQYTSNYNKSVNVDFTVDTNGVYSEPRPIGTRYLTRNL

SEQ ID NO: 236 - DNA, 2211 bp, Adeno-associated virus; identical to SEQ ID NO: 126

SEQ ID NO: 237 - protein, 736 aa, Adeno-associated virus
MAADGYLPDWLEDTLSEGIRQWWKLKPGPPPPKPAERHKDDSRGLVLPGYKYLGPGNGLDKGEPVNAADAAALEHDKAYDQQLKAGDNPYLKYNHADAEFQERLKEDTSFGGNLGRAVFQAKKRLLEPLGLVEEAAKTAPGKKRPVEQSPQEPDSSAGIGKSGSQPAKKKLNFGQTGDTESVPDPQPIGEPPAAPSGVGSLTMASGGGAPVADNNEGADGVGSSSGNWHCDSQWLGDRVITTSTRTWALPTYNNHLYKQISNSTSGGSSNDNAYFGYSTPWGYFDFNRFHCHFSPRDWQRLINNNWGFRPKRLNFKLFNIQVKEVTDNNGVKTIANNLTSTVQVFTDSDYQLPYVLGSAHEGCLPPFPADVFMIPQYGYLTLNDGGQAVGRSSFYCLEYFPSQMLRTGNNFQFSYEFENVPFHSSYAHSQSLDRLMNPLIDQYLYYLSKTINGSGQNQQTLKFSVAGPSNMAVQGRNYIPGPSYRQQRVSTTVTQNNNSEFAWPGASSWALNGRNSLMNPGPAMASHKEGEDRFFPLSGSLIFGKQGTGRDNVDADKVMITNEEEIKTTNPVATESYGQVATNHQSAQAQAQTGWVQNQGILPGMVWQDRDVYLQGPIWAKIPHTDGNFHPSPLMGGFGMKHPPPQILIKNTPVPADPPTAFNKDKLNSFITQYSTGQVSVEIEWELQKENSKRWNPEIQYTSNYYKSNNVEFAVSTEGVYSEPRPIGTRYLTRNL

SEQ ID NO: 238 - DNA, 2211 bp, Adeno-associated virus
atggctgccgatggttatcttccagattggctcgaggacactctctctgaaggaataagacagtggtggaagctcaaacctggcccaccaccaccaaagcccgcagagcggcataaggacgacagcaggggtcttgtgcttcctgggtacaagtacctcggacccggcaacggactcgacaagggggagccggtcaacgcagcagacgcggcggccctcgagcacgacaaggcctacgaccagcagctcaaggccggagacaacccgtacctcaagtacaaccacgccgacgccgagttccaggagcggctcaaagaagatacgtcttttgggggcaacctcgggcgagcagtcttccaggccaaaaagaggcttcttgaacctcttggtctggttgaggaagcggctaagacggctcctggaaagaagaggcctgtagagcagtctcctcaggaaccggactcctccgcgggtattggcaaatcgggttcacagcccgctaaaaagaaactcaatttcggtcagactggcgacacagagtcagtccccgaccctcaaccaatcggagaacctcccgcagccccctcaggtgtgggatctcttacaatggcttcaggtggtggcgcaccagtggcagacaataacgaaggtgccgatggagtgggtagttcctcgggaaattggcattgcgattcccaatggctgggggacagagtcatcaccaccagcacccgaacctgggccctgcccacctacaacaatcacctctacaagcaaatctccaacagcacatctggaggatcttcaaatgacaacgcctacttcggctacagcaccccctgggggtattttgacttcaacagattccactgccacttctcaccacgtgactggcagcgactcatcaacaacaactggggattccggcctaagcgactcaacttcaagctcttcaacattcaggtcaaagaggttacggacaacaatggagtcaagaccatcgccaataaccttaccagcacggtccaggtcttcacggactcagactatcagctcccgtacgtgctcgggtcggctcacgagggctgcctcccgccgttcccagcggacgttttcatgattcctcagtacgggtatctgacgcttaatgatgggagccaggccgtgggtcgttcgtccttttactgcctggaatatttcccgtcgcaaatgctaagaacgggtaacaacttccagttcagctacgagtttgagaacgtacctttccatagcagctacgctcacagccaaagcctggaccgactaatgaatccactcatcgaccaatacttgtactatctctcaaagactattaacggttctggacagaatcaacaaacgctaaaattcagcgtggccggacccagcaacatggctgtccagggaagaaactacatacctggacccagctaccgacaacaacgtgtctcaaccactgtgactcaaaacaacaacagcgaatttgcttggcctggagcttcttcttgggctctcaatggacgtaatagcttgatgaatcctggacctgctatggccagccacaaagaaggagaggaccgtttctttcctttgtctggatctttaatttttggcaaacaaggaactggaagagacaacgtggatgcggacaaagtcatgataaccaacgaagaagaaattaaaactactaacccggtagcaacggagtcctatggacaagtggccacaaaccaccagagtgcccaagcacaggcgcagaccggctgggttcaaaaccaaggaatacttccgggtatggtttggcaggacagagatgtgtacctgcaaggacccatttgggccaaaattcctcacacggacggcaactttcacccttctccgctaatgggagggtttggaatgaagcacccgcctcctcagatcctcatcaaaaacacacctgtacctgcggatcctccaacggctttcaataaggacaagctgaactctttcatcacccagtattctactggccaagtcagcgtggagattgagtgggagctgcagaaggaaaacagcaagcgctggaacccggagatccagtacacttccaactattacaagtctaataatgttgaatttgctgttaatactgaaggtgtatatagtgaaccccgccccattggcaccagatacctgactcgtaatctgtaa

SEQ ID NO: 239 - protein, 736 aa, Adeno-associated virus
MAADGYLPDWLEDTLSEGIRQWWKLKPGPPPPKPAERHKDDSRGLVLPGYKYLGPGNGLDKGEPVNAADAAALEHDKAYDQQLKAGDNPYLKYNHADAEFQERLKEDTSFGGNLGRAVFQAKKRLLEPLGLVEEAAKTAPGKKRPVEQSPQEPDSSAGIGKSGSQPAKKKLNFGQTGDTESVPDPQPIGEPPAAPSGVGSLTMASGGGAPVADNNEGADGVGSSSGNWHCDSQWLGDRVITTSTRTWALPTYNNHLYKQISNSTSGGSSNDNAYFGYSTPWGYFDFNRFHCHFSPRDWQRLINNNWGFRPKRLNFKLFNIQVKEVTDNNGVKTIANNLTSTVQVFTDSDYQLPYVLGSAHEGCLPPFPADVFMIPQYGYLTLNDGSQAVGRSSFYCLEYFPSQMLRTGNNFQFSYEFENVPFHSSYAHSQSLDRLMNPLIDQYLYYLSKTINGSGQNQQTLKFSVAGPSNMAVQGRNYIPGPSYRQQRVSTTVTQNNNSEFAWPGASSWALNGRNSLMNPGPAMASHKEGEDRFFPLSGSLIFGKQGTGRDNVDADKVMITNEEEIKTTNPVATESYGQVATNHQSAQAQAQTGWVQNQGILPGMVWQDRDVYLQGPIWAKIPHTDGNFHPSPLMGGFGMKHPPPQILIKNTPVPADPPTAFNKDKLNSFITQYSTGQVSVEIEWELQKENSKRWNPEIQYTSNYYKSNNVEFAVNTEGVYSEPRPIGTRYLTRNL

SEQ ID NO: 240 - DNA, 2208 bp, Adeno-associated virus
atggctgccgatggttatcttccagattggctcgaggacactctctctgaaggaataagacagcggtggaagctcaaacctggcccaccaccaccagagcccgcagagcggcataaggacgacagcaggggtcttgtgcttcctgggtacaagtacctcggacccttcaacggactcgacaagggagagccggtcaacgaggcagacgccgcggccctcgagcacgacaaagcctacgaccggcagctcgacagcggagacaacccgtacctcaagtacaaccacgccgacgcggagtttcaggagcgccttaaagaagatacgtcttttgggggcaacctcggacgagcagtcttccaggcgaaaaagagggtacttgaacctctgggcctggttgaggaacctgttaagacggctccgggaaaaaagaggccggtagagcactctcctgtggagccagactcctcctcgggaaccggaaaggcgggccagcagcctgcaagaaaaagattgaattttggtcagactggagacgcagactcagtacctgacccccagcctctcggacagccaccagcagccccctctggtctgggaactaatacgatggctacaggcagtggcgcaccaatggcagacaataacgagggcgccgacggagtgggtaattcctcgggaaattggcattgcgattccacatggatgggcgacagagtcatcaccaccagcacccgaacctgggccctgcccacctacaacaaccacctctacaaacaaatttccagccaatcaggagcctcgaacgacaatcactactttggctacagcaccccttgggggtattttgacttcaacagattccactgccacttttcaccacgtgactggcaaagactcatcaacaacaactggggattccgacccaagagactcaacttcaagctctttaacattcaagtcaaagaggtcacgcagaatgacggtacgacgacgattgccaataaccttaccggcacggttcaggtgtttactgactcggagtaccagctcccgtacgtcctcggctcggcgcatcaaggatgcctcccgccgttcccagcagacgtcttcatggtgccacagtatggatacctcaccctgaacaacgggagtcaggcagtaggacgctcttcattttactgcctggagtactttccttctcagatgctgcgtaccggaaacaactttaccttcagctacacttttgaggacgttcctttccacagcagctacgctcacagccagagtctgggccgtctcatgaatcctctcatcgaccagtacctgtattacttgagcagaacaaacactccaagtggaaccaccacgcagtcaaggcttcagttttctcaggccggagcgagtgacattcgggaccagtctaggaactggcttcctggaccctgttaccgccagcagcgagtatcaaagacatctgcggataacaacaacagtgaatactcgtggactggagctaccaagtaccacctcaatggcagagactctctggtgaatccgggcccggccatggcaagccacaaggacgatgaagaaaagttttttcctcagagcggggttctcatctttgggaagcaaggctcagagaaaacaaatgtggacattgaaaaggtcatgattacagacgaagaggaaatcaggacaaccaatcccgtggctacggagcagtatggttctgtatctaccaacctccagagaggcaacagacaagcagctaccgcagatgtcaacacacaaggcgttcttccaggcatggtctggcaggacagagatgtgtaccttcaggggcccatctgggcaaagattccacacacggacggacattttcacccctctcccctcatgggtggattcggacttaaacaccctcctccacagattctcatcaagaacaccccggtacctgcgaatccttcgaccaccttcagtgcggcaaagtttgcttccttcatcacacagtactccacgggacaggtcagcgtggagatcgagtgggagctgcagaaggaaaacagcaaacgctggaatcccgaaattcagtacacttccaactacaacaagtctgttaatgtggactttactgtggacactaatggcgtgtattcagagcctcgccccattggcaccagatacctgactcgtaatctgtaa

SEQ ID NO: 241 - protein, 735 aa, Adeno-associated virus
MAADGYLPDWLEDTLSEGIRQRWKLKPGPPPPEPAERHKDDSRGLVLPGYKYLGPFNGLDKGEPVNEADAAALEHDKAYDRQLDSGDNPYLKYNHADAEFQERLKEDTSFGGNLGRAVFQAKKRVLEPLGLVEEPVKTAPGKKRPVEHSPVEPDSSSGTGKAGQQPARKRLNFGQTGDADSVPDPQPLGQPPAAPSGLGTNTMATGSGAPMADNNEGADGVGNSSGNWHCDSTWMGDRVITTSTRTWALPTYNNHLYKQISSQSGASNDNHYFGYSTPWGYFDFNRFHCHFSPRDWQRLINNNWGFRPKRLNFKLFNIQVKEVTQNDGTTTIANNLTGTVQVFTDSEYQLPYVLGSAHQGCLPPFPADVFMVPQYGYLTLNNGSQAVGRSSFYCLEYFPSQMLRTGNNFTFSYTFEDVPFHSSYAHSQSLGRLMNPLIDQYLYYLSRTNTPSGTTTQSRLQFSQAGASDIRDQSRNWLPGPCYRQQRVSKTSADNNNSEYSWTGATKYHLNGRDSLVNPGPAMASHKDDEEKFFPQSGVLIFGKQGSEKTNVDIEKVMITDEEEIRTTNPVATEQYGSVSTNLQRGNRQAATADVNTQGVLPGMVWQDRDVYLQGPIWAKIPHTDGHFHPSPLMGGFGLKHPPPQILIKNTPVPANPSTTFSAAKFASFITQYSTGQVSVEIEWELQKENSKRWNPEIQYTSNYNKSVNVDFTVDTNGVYSEPRPIGTRYLTRNL

SEQ ID NO: 242 - DNA, 2208 bp, Adeno-associated virus
atggctgccgatggttatcttccagattggctcgaggacactctctctgaaggaataagacagcggtggaagctcaaacctggcccaccaccaccagagcccgcagagcggcataaggacgacagcaggggtcttgtgcttcctgggtacaagtacctcggacccttcaacggactcgacaagggagagccggtcaacgaggcagacgccgcggccctcgagcacgacaaagcctacgaccggcagctcgacagcggagacaacccgtacctcaagtacaaccacgccgacgcggagtttcaggagcgccttaaagaagatacgtcctttgggggcaacctcggacgagcagtcttccaggcgaaaaagagggtacttgaacctctgggcctggttgaggaacctgttaagacggctccgggaaaaaagaggccggtagagcactctcctgtggagccagactcctcctcgggaaccggaaaggcgggccagcagcctgcaagaaaaagattgaattttggtcagactggagacgcagactcagtacctgacccccagcctctcggacagccaccagcagccccctctggtctgggaactaatacgatggctacaggcagtggcgcaccaatggcagacaataacgagggcgccgacggagtgggtaattcctcgggaaattggcattgcgattccacatggatgggcgacagagtcatcaccaccagcacccgaacctgggccctgcccacctacaacaaccacctctacaaacaaatttccagccaatcaggagcctcgaacgacaatcactactttggctacagcaccccttgggggtattttgacttcaacagattccactgccacttttcaccacgtgactggcaaagactcatcaacaacaactggggattccgacccaagagactcaacttcaagctctttaacattcaagtcaaagaggtcacgcagaatgacggtacgacgacgattgccaataaccttaccagcacggttcaggtgtttactgactcggagtaccagctcccgtacgtcctcggctcggcgcatcaaggatgcctcccgccgttcccagcagacgtcttcatggtgccacagtatggatacctcaccctgaacaacgagagtcaggcagtaggacgctcttcattttactgcctggagtactttccttctcagatgctgcgtaccggaaacaactttaccttcagctacacttttgaggacgttcctttccacagcagctacgctcacagccagagtctgggccgtctcatgaatcctctcatcgaccagtacctgtattacttgagcagaacaaacactccaagtggaaccaccacgcagtcaaggcttcagttttctcaggccggagcgagtgacattcgggaccagtctaggaactggcttcctggaccctgttaccgccagcagcgagtatcaaagacatctgcggataacaacaacagtgaatactcgtggactggagctaccaagtaccacctcaatggcagagactctctggtgaatccgggcccggccatggcaagccacaaggacgatgaagaaaagttttttcctcagagcggggttctcatctttgggaagcaaggctcagagaaaacaaatgtggacattgaaaaggtcatgattacagacgaagaggaaatcaggacaaccaatcccgtggctacggagcagtatggttctgtatctaccaacctccagagaggcaacagacaagcagctaccgcagatgtcaacacacaaggcgttcttccaggcatggtctggcaggacagagatgtgtaccttcaggggcccatctgggcaaagattccacacacggacggacattttcacccctctcccctcatgggtggattcggacttaaacaccctcctccacagattctcatcaagaacaccccggtacctgcgaatccttcgaccaccttcagtgcggcaaagtttgcttccttcatcacacagtactccacgggacaggtcagcgtggagatcgagtgggagctgcagaaggaaaacagcaaacgctggaatcccgaaattcagtacacttccaactacaacaagtctgttaatgtggactttactgtggacactaatggcgtgtattcagagcctcgccccattggcaccagatacctgactcgtaatctgtaa

SEQ ID NO: 243 - protein, 735 aa, Adeno-associated virus
MAADGYLPDWLEDTLSEGIRQRWKLKPGPPPPEPAERHKDDSRGLVLPGYKYLGPFNGLDKGEPVNEADAAALEHDKAYDRQLDSGDNPYLKYNHADAEFQERLKEDTSFGGNLGRAVFQAKKRVLEPLGLVEEPVKTAPGKKRPVEHSPVEPDSSSGTGKAGQQPARKRLNFGQTGDADSVPDPQPLGQPPAAPSGLGTNTMATGSGAPMADNNEGADGVGNSSGNWHCDSTWMGDRVITTSTRTWALPTYNNHLYKQISSQSGASNDNHYFGYSTPWGYFDFNRFHCHFSPRDWQRLINNNWGFRPKRLNFKLFNIQVKEVTQNDGTTTIANNLTSTVQVFTDSEYQLPYVLGSAHQGCLPPFPADVFMVPQYGYLTLNNESQAVGRSSFYCLEYFPSQMLRTGNNFTFSYTFEDVPFHSSYAHSQSLGRLMNPLIDQYLYYLSRTNTPSGTTTQSRLQFSQAGASDIRDQSRNWLPGPCYRQQRVSKTSADNNNSEYSWTGATKYHLNGRDSLVNPGPAMASHKDDEEKFFPQSGVLIFGKQGSEKTNVDIEKVMITDEEEIRTTNPVATEQYGSVSTNLQRGNRQAATADVNTQGVLPGMVWQDRDVYLQGPIWAKIPHTDGHFHPSPLMGGFGLKHPPPQILIKNTPVPANPSTTFSAAKFASFITQYSTGQVSVEIEWELQKENSKRWNPEIQYTSNYNKSVNVDFTVDTNGVYSEPRPIGTRYLTRNL

SEQ ID NO: 244 - DNA, 2208 bp, Adeno-associated virus
atggctgccgatggttatcttccagattggctcgaggacactctctctgaaggaataagacagcggtggaagctcaaacctggcccaccaccaccagagcccgcagagcggcataaggacgacagcaggggtcttgtgcttcctgggtacaagtacctcggacccttcaacggactcgacaagggagagccggtcaacgaggcagacgccgcggccctcgagcacgacaaagcctacgaccggcagctcgacagcggagacaacccgtacctcaagtacaaccacgccgacgcggagtttcaggagcgccttaaagaagatacgtcttttgggggcaacctcggacgagcagtcttccaggcgaaaaagagggtacttgaacctctgggcctggttgaggaacctgttaagacggctccgggaaaaaagaggccggtagagcactctcctgtggagccagactcctcctcgggaaccggaaaggcgggccagcagcctgcaagaaaaagattgaattttggtcagactggagacgcagactcagtacctgacccccagcctctcggacagccaccagcagccccctctggtctgggaactaatacgatggctacaggcagtggcgcaccaatggcagacaataacgagggcgccgacggagtgggtaattcctcgggaaattggcattgcgattccacatggatgggcgacagagtcatcaccaccagcacccgaacctgggccctgcccacctacaacaaccacctctacaaacaaatttccagccaatcaggagcctcgaacgacaatcactactttggctacagcaccccttgggggtattttgacttcaacagattccactgccacttttcaccacgtgactggcaaagactcatcaacaacaactggggattccgacccaagagactcaacttcaagctctttaacattcaagtcaaagaggtcacgcagaatgacggtacgacgacgattgccaataaccttaccagcacggttcaggtgtttactgactcggagtaccagctcccgtacgtcctcggctcggcgcatcaaggatgcctcccgccgttcccagcagacgtcttcatggtaccacagtatggatacctcaccctgaacaacgggagtcaggcagtaggacgctcttcattttactgcctggagtactttccttctcagatgctgcgtaccggaaacaactttaccttcagctacacttttgaggacgttcctttccacagcagctacgctcacagccagagtctgggccgtctcatgaatcctctcatcgaccagtacctgtattacttgagcagaacaaacactccaagtggaaccaccacgcagtcaaggcttcagttttctcaggccggagcgagtgacattcgggaccagtctaggaactggcttcctggaccctgttaccgccagcagcgagtatcaaagacatctgcggataacaacaacagtgaatactcgtggactggagctaccaagtaccacctcaatggcagagactctctggtgaatccgggcccggccatggcaagccacaaggacgatgaagaaaagttttttcctcagagcggggttctcatctttgggaagcaaggctcagagaaaacaaatgtggacattgaaaaggtcatgattacagacgaagaggaaatcaggacaaccaatcccgtggctacggagcagtatggttctgtatctaccaacctccagagaggcaacagacaagcagctaccgcagatgtcaacacacaaggcgttcttccaggcatggtctggcaggacagagatgtgtaccttcaggggcccatctgggcaaagattccacacacggacggacattttcacccctctcccctcatgggtggattcggacttaaacaccctcctccacagattctcatcaagaacaccccggtacctgcgaatccttcgaccaccttcagtgcggcaaagtttgcttccttcatcacacagtactccacgggacaggtcagcgtggagatcgagtgggagctgcagaaggaaaacagcaaacgctggaatcccgaaattcagtacacttccaactacaacaagtctgttaatgtggactttactgtggacactaatggcgtgtattcagagcctcgccccattggcaccagatacctgactcgtaatctgtaa

SEQ ID NO: 245 - protein, 735 aa, Adeno-associated virus
MAADGYLPDWLEDTLSEGIRQRWKLKPGPPPPEPAERHKDDSRGLVLPGYKYLGPFNGLDKGEPVNEADAAALEHDKAYDRQLDSGDNPYLKYNHADAEFQERLKEDTSFGGNLGRAVFQAKKRVLEPLGLVEEPVKTAPGKKRPVEHSPVEPDSSSGTGKAGQQPARKRLNFGQTGDADSVPDPQPLGQPPAAPSGLGTNTMATGSGAPMADNNEGADGVGNSSGNWHCDSTWMGDRVITTSTRTWALPTYNNHLYKQISSQSGASNDNHYFGYSTPWGYFDFNRFHCHFSPRDWQRLINNNWGFRPKRLNFKLFNIQVKEVTQNDGTTTIANNLTSTVQVFTDSEYQLPYVLGSAHQGCLPPFPADVFMVPQYGYLTLNNGSQAVGRSSFYCLEYFPSQMLRTGNNFTFSYTFEDVPFHSSYAHSQSLGRLMNPLIDQYLYYLSRTNTPSGTTTQSRLQFSQAGASDIRDQSRNWLPGPCYRQQRVSKTSADNNNSEYSWTGATKYHLNGRDSLVNPGPAMASHKDDEEKFFPQSGVLIFGKQGSEKTNVDIEKVMITDEEEIRTTNPVATEQYGSVSTNLQRGNRQAATADVNTQGVLPGMVWQDRDVYLQGPIWAKIPHTDGHFHPSPLMGGFGLKHPPPQILIKNTPVPANPSTTFSAAKFASFITQYSTGQVSVEIEWELQKENSKRWNPEIQYTSNYNKSVNVDFTVDTNGVYSEPRPIGTRYLTRNL

SEQ ID NO: 246 - DNA, 2208 bp, Adeno-associated virus
atggctgccgatggttatcttccagattggctcgaggacactctctctgaaggaataagacagcggtggaagctcaaacctggcccaccaccaccagagcccgcagagcggcataaggacgacagcaggggtcttgtgcttcctgggtacaagtacctcggacccttcaacggactcgacaagggagagccggtcaacgaggcagacgccgcggccctcgagcacgacaaagcctacgaccggcagctcgacagcggagacaacccgtacctcaagtacaaccacgccgacgcggagtttcaggagcgccttaaagaagatacgtcttttgggggcaacctcggacgagcagtcttccaggcgaaaaagagggtactcgaacctctgggcctggttgaggaacctgttaagacggctccgggaaaaaagaggccggtagagcactctcctgtggagccagactcctcctcgggaaccggaaaggcgggccagcagcctgcaagaaaaagattgaattttggtcagactggagacgcagactcagtacctgacccccagcctctcggacagccaccagcagccccctctggtctgggaactaatacgatggctacaggcagtggcgcaccaatggcagacaataacgagggcgccgacggagtgggtaattcctcgggaaattggcattgcgattccacatggatgggcgacagagtcatcaccaccagcacccgaacctgggccctgcccacctacaacaaccacctctacaaacaaatttccagccaatcaggagcctcgaacgacaatcactactttggctacagcaccccttgggggtattttgacttcaacagattccactgccacttttcaccacgtgactggcaaagactcatcaacaacaactggggattccgacccaagagactcaacttcaagctctttaacattcaagtcaaagaggtcacgcagaatgacggtacgacgacgattgccaataaccttaccagcacggttcaggtgtttactgactcggagtaccagctcccgtacgtcctcggctcggcgcatcaaggatgcctcccgccgttcccagcagacgtcttcatggtgccacagtatggatacctcaccctgaacaacgggagtcaggcagcaggacgctcttcattttactgcctggagtactttccttctcagatgctgcgtaccggaaacaactttaccttcagctacacttttgaggacgttcctttccacagcagctacgctcacagccagagtctgggccgtctcatgaatcctctcatcgaccagtacctgtattacttgagcagaacaaacactccaagtggaaccaccacgcagtcaaggcttcagttttctcaggccggagcgagtgacattcgggaccagtctaggaactggcttcctggaccctgttaccgccagcagcgagtatcaaagacatctgcggataacaacaacagtgaatactcgtggactggagctaccaagtaccacctcaatggcagagactctctggtgaatccgggcccggccatggcaagccacaaggacgatgaagaaaagttttttcctcagagcggggttctcatctttgggaagcaaggctcagagaaaacaaatgtggacattgaaaaggtcatgattacagacgaagaggaaatcaggacaaccaatcccgtggctacggagcagtatggttctgtatctaccaacctccagagaggcaacagacaagcagctaccgcagatgtcaacacacaaggcgttcttccaggcatggtctggcaggacagagatgtgtaccttcaggggcccatctgggcaaagattccacacacggacggacattttcacccctctcccctcatgggtggattcggacttaaacaccctcctccacagattctcatcaagaacaccccggtacctgcgaatccttcgaccaccttcagtgcggcaaagtttgcttccttcatcacacagtactccacgggacaggtcagcgtggagatcgagtgggagctgcagaaggaaaacagcaaacgctggaatcccgaaattcagtacacttccaactacaacaagtccgttaatgtggactttactgtggacactaatggcgtgtattcagagcctcgccccattggcaccagatacctgactcgtaatctgtaa

SEQ ID NO: 247 - protein, 735 aa, Adeno-associated virus
MAADGYLPDWLEDTLSEGIRQRWKLKPGPPPPEPAERHKDDSRGLVLPGYKYLGPFNGLDKGEPVNEADAAALEHDKAYDRQLDSGDNPYLKYNHADAEFQERLKEDTSFGGNLGRAVFQAKKRVLEPLGLVEEPVKTAPGKKRPVEHSPVEPDSSSGTGKAGQQPARKRLNFGQTGDADSVPDPQPLGQPPAAPSGLGTNTMATGSGAPMADNNEGADGVGNSSGNWHCDSTWMGDRVITTSTRTWALPTYNNHLYKQISSQSGASNDNHYFGYSTPWGYFDFNRFHCHFSPRDWQRLINNNWGFRPKRLNFKLFNIQVKEVTQNDGTTTIANNLTSTVQVFTDSEYQLPYVLGSAHQGCLPPFPADVFMVPQYGYLTLNNGSQAAGRSSFYCLEYFPSQMLRTGNNFTFSYTFEDVPFHSSYAHSQSLGRLMNPLIDQYLYYLSRTNTPSGTTTQSRLQFSQAGASDIRDQSRNWLPGPCYRQQRVSKTSADNNNSEYSWTGATKYHLNGRDSLVNPGPAMASHKDDEEKFFPQSGVLIFGKQGSEKTNVDIEKVMITDEEEIRTTNPVATEQYGSVSTNLQRGNRQAATADVNTQGVLPGMVWQDRDVYLQGPIWAKIPHTDGHFHPSPLMGGFGLKHPPPQILIKNTPVPANPSTTFSAAKFASFITQYSTGQVSVEIEWELQKENSKRWNPEIQYTSNYNKSVNVDFTVDTNGVYSEPRPIGTRYLTRNL

SEQ ID NO: 248 - protein, 738 aa, Adeno-associated virus; identical to SEQ ID NO: 90

SEQ ID NO: 249 - DNA, 2217 bp, Adeno-associated virus
atggctgctgacggttatcttccagattggctcgaggacaacctctctgagggcattcgcgagtggtgggacctgaaacctggagcccccaagcccaaggccaaccagcagaagcaggacgacggccggggtctggtgcttcctggctacaagtacctcggacccttcaacggactcgacaagggggagcccgtcaacgcggcggacgcagcggccctcgagcacgacaaggcctacgaccagcagctcaaagcgggtgacaatccgtacctgcggtataaccacgccgacgccgagtttcaggagcgtctgcaagaagatacgtcttttgggggcaacctcgggcgagcagtcttccaggccaagaagcgggttctcgaacctctcggtctggttgaggaagctgctaagacggctcctggaaagaagagaccggtagaaccgtcacctcagcgttcccccgactcctccacgggcatcggcaagaaaggccagcagcccgctaaaaagagactgaactttggtcagactggcgactcagagtcagtccccgaccctcaaccaatcggagaaccaccagcaggcccctctggtctgggatctggtacaatggctgcaggcggtggcgctccaatggcagacaataacgaaggcgccgacggagtgggtagttcctcaggaaattggcattgcgattccacatggctgggcgacagagtcatcaccaccagcacccgaacctgggccctgcccacctacaacaaccacctctacaagcaaatatccaatgggacatcgggaggaagcaccaacgacaacacctacttcggctacagcaccccctgggggtattttgacttcaacagattccactgccacttctcaccacgtgactggcagcgactcatcaacaacaactggggattccggccaaaaagactcagcttcaagctcttcaacatccaggtcaaggaggtcacgcagaatgaaggcaccaagaccatcgccaataaccttaccagcacgattcaggtatttacggactcggaataccagctgccgtacgtcctcggctccgcgcaccagggctgcctgcctccgttcccggcggacgtcttcatgattccccagtacggctaccttacactgaacaatggaagtcaagccgtaggccgttcctccttctactgcctggaatattttccatctcaaatgctgcgaactggaaacaattttgaattcagctacaccttcgaggacgtgcctttccacagcagctacgcacacagccagagcttggaccgactgatgaatcctctcatcgaccagtacctgtactacttatccagaactcagtccacaggaggaactcaaggtacccagcaattgttattttctcaagctgggcctgcaaacatgtcggctcaggctaagaactggctacctggaccttgctaccggcagcagcgagtctctacgacactgtcgcaaaacaacaacagcaactttgcttggactggtgccaccaaatatcacctgaacggaagagactctttggtaaatcccggtgtcgccatggcaacccacaaggacgacgaggaacgcttcttcccgtcgagtggagtcctgatgttcggaaaacagggtgctggaagagacaatgtggactacagcagcgttatgctaaccagcgaagaagaaattaaaaccactaaccccgtagccacagaacaatacggtgtggtggctgacaacttgcagcaaaccaatacagggcctattgtgggaaatgtcaacagccaaggagccttacctggcatggtctggcagaaccgagacgtgtacctgcagggtcccatctgggccaagattcctcacacggacggcaacttccacccttcaccgctaatgggaggatttggactgaagcacccacctcctcagatcctgatcaagaacacgccggtacctgcggatcctccaacaacgttcagccaggcgaaattggcttccttcattacgcagtacagcaccggacaggtcagcgtggaaatcgagtgggagctgcagaaggagaacagcaaacgctggaacccagagattcagtacacttcaaactactacaaatctacaaatgtggactttgctgtcaatacagagggaacttattctgagcctcgccccattggtactcgttacctcacccgtaatctgtaa

SEQ ID NO: 250 - protein, 738 aa, Adeno-associated virus
MAADGYLPDWLEDNLSEGIREWWDLKPGAPKPKANQQKQDDGRGLVLPGYKYLGPFNGLDKGEPVNAADAAALEHDKAYDQQLKAGDNPYLRYNHADAEFQERLQEDTSFGGNLGRAVFQAKKRVLEPLGLVEEAAKTAPGKKRPVEPSPQRSPDSSTGIGKKGQQPAKKRLNFGQTGDSESVPDPQPIGEPPAGPSGLGSGTMAAGGGAPMADNNEGADGVGSSSGNWHCDSTWLGDRVITTSTRTWALPTYNNHLYKQISNGTSGGSTNDNTYFGYSTPWGYFDFNRFHCHFSPRDWQRLINNNWGFRPKRLSFKLFNIQVKEVTQNEGTKTIANNLTSTIQVFTDSEYQLPYVLGSAHQGCLPPFPADVFMIPQYGYLTLNNGSQAVGRSSFYCLEYFPSQMLRTGNNFEFSYTFEDVPFHSSYAHSQSLDRLMNPLIDQYLYYLSRTQSTGGTQGTQQLLFSQAGPANMSAQAKNWLPGPCYRQQRVSTTLSQNNNSNFAWTGATKYHLNGRDSLVNPGVAMATHKDDEERFFPSSGVLMFGKQGAGRDNVDYSSVMLTSEEEIKTTNPVATEQYGVVADNLQQTNTGPIVGNVNSQGALPGMVWQNRDVYLQGPIWAKIPHTDGNCHPSPLMGGFGLKHPPPQILIKNTPVPADPPTTFSQAKLASFITQYSTGQVSVEIEWELQKENSKRWNPEIQYTSNYYKSTNVDFAVNTEGTYSEPRPIGTRYLTRNL

SEQ ID NO: 251 - protein, 738 aa, Adeno-associated virus
MAADGYLPDWLEDNLSEGIREWWDLKPGAPKPKANQQKQDDGRGLVLPGYKYLGPFNGLDKGEPVNAADAAALEHDKAYDQQLKAGDNPYLRYNHADAEFQERLQEDTSFGGNLGRAVFQAKKRVLEPLGLVEEGAKTAPGKKRPVEPSPQRSPDSSTGIGKKGQQPARKRLNFGRTGDSESVPDPQPIGEPPAAPSSVGSGTMAAGGGAPMADNNEGADGVGSSSGNWHCDSTWLGDRVITTSTRTWALPTYNNHLYKQISNGTSGGSTNDNTYFGYSTPWGYLDFNRFHCHFSPRDWQRLINNNWGFRPKRLSFKLFNIQVKEVTQNEGTKTIANNLASTIQVFTDSEYQPPYVLGSAHQGCLPPFPADVFMIPQYGYLTLNNGSQAVGRSSFYCLEYFPSQMLRTGNNFSFSYTFEDVPFHSSYAHSQSLDRLMNPLIDQYLYYLSRTQSTGGTAGTQQLLFSRAGPSNMSAQARNWLPGPCYRQQRVSTTLSQNNNSNFAWTGATKYHLNGRDSLVNPGVAMATNKDDEDRFFPSSGILMFGKQGAGKDNVDYSNVMLTSEEEIKTTNPVATEQYGVVADNLQQQNTAPTVGAVNSQGALPGMVWQNRDVYLQGPIWAKIPHTDGNFHPSPLMGGFGLKHPPPQILIKNTPVPADPPTAFNQAKLNSFIAQYSTGQVSVEIEWELQKENSKRWNPEIQYTSNYYKSTNADFAVNTEGVYSEPRPIGTRYLTRNL

SEQ ID NO: 252 - DNA, 2217 bp, Adeno-associated virus
atggctgccgatggttatcttccagattggctcgaggacaacctctctgagggcattcgcgagtggtgggacctgaaacctggagccccgaaacccaaagccaaccagcaaaagcaggacgacggccggggtctggtgcttcctggctacaagtacctcggacccttcaacggactcgacaagggggagcccgtcaacgcggcggacgcagcggccctcgagcacgacaaggcctacgaccagcagctcaaagcgggtgacaatccgtacctgcggtataatcacgccgacgccgagtttcaggagcgtctgcaagaagatacgtcttttgggggcaacctcgggcgagcagtcttccaggccaagaagcgggttctcgaacctctcggtctggttgaggaaggcgctaagacggctcctggaaagaagagaccggtagagccgtcaccacagcgttcccccgactcctccacgggcatcggcaagaaaggccagcagcccgccagaaagagactcaatttcggtcggactggcgactcagagtcagtccccgaccctcaacctatcggagaacctccagcagcgccctctagtgtgggatctggtacaatggctgcaggcggtggcgcaccaatggcagacaataacgaaggtgccgacggagtgggtagttcctcgggaaattggcattgcgattccacatggctgggcgacagagttatcaccaccagcacccgaacctgggccctgcccacctacaacaaccacctctacaagcaaatctccaacgggacctcgggaggcagcaccaacgacaacacctactttggctacagcaccccctgggggtatcttgactttaacagattccactgccacttctcaccacgtgactggcagcgactcatcaacaacaactggggattccggcccaagagactcagcttcaagctcttcaacatccaggtcaaagaggtcacgcagaatgaaggcaccaagaccatcgccaataacctcgccagcaccatccaggtgtttacggactcggaataccagccgccgtacgtcctcggctctgcccaccagggctgcctgcctccgttcccggcggacgtcttcatgattcctcagtacggctacctgactctcaacaacggtagtcaggccgtgggacgttcctccttctactgcctggagtacttcccctctcagatgctgagaacgggcaacaacttttccttcagctacactttcgaggacgtgcctttccacagcagctacgcgcacagccagagtttggacaggctgatgaatcctctcatcgaccagtacctgtactacctgtcaagaacccagtctacgggaggcacagcgggaacccagcagttgctgttttctcgggccgggcctagcaacatgtcggctcaggccagaaactggctgcctggaccctgctacagacagcagcgcgtctccacgacactgtcgcaaaacaacaacagcaactttgcctggactggtgccaccaagtatcatctgaacggcagagactctctggtgaatccgggcgtcgccatggcaaccaacaaggacgacgaggaccgcttcttcccatccagcggcatcctcatgtttggcaagcagggagctggaaaagacaacgtggactatagcaacgtgatgctaaccagcgaggaagaaatcaagaccaccaaccccgtggccacagaacagtatggcgtggtggctgataacctacagcagcaaaacaccgctcctactgtgggggccgtcaacagccagggagccttacctggcatggtctggcagaaccgggacgtgtacctgcagggtcctatttgggccaagattcctcacacagatggcaactttcacccgtctcctttaatgggcggctttggacttaaacatccgcctcctcagatcctcatcaaaaacactcctgttcctgcggatcctccaacagcgttcaaccaggccaagctgaattctttcatcgcgcagtacagcaccggacaagtcagcgtggagatcgagtgggagctgcagaaggagaacagcaagcgctggaacccagagattcagtatacttccaactactacaaatctacaaatgcggactttgctgttaatactgagggtgtttactctgagcctcgccccattggcactcgttacctcacccgtaatctgtaa

SEQ ID NO: 253 - DNA, 2208 bp, Adeno-associated virus
atggctgccgatggttatcttccagattggctcgaggacactctctctgaaggaataagacagtggtggaagctcaaacctggcccaccaccaccaaagcccgcagagcggcataaggacgacagcaggggtcttgtgcttcctgggtacaagtacctcggacccttcaacggactcgacaagggggagccggtcaacgaggcagacgccgcggccctcgagcacgacaaggcctacgaccggcagctcgacagcggagacaacccgtacctcaagtacaaccacgccgacgcagagtttcaggagcgccttaaagaagatacgtcttttgggggcaacctcggacgagcagtcttccaggcgaaaaagagggttcttgaacctctgggcctggttgaggagcctgttaagacggctccgggaaaaaagaggccggtagagcactctcctgtggagccagactcctcctcgggaaccggaaaagcgggccagcagcctgcaagaaaaagattaaattttggtcagactggagacgcagactccgtacctgacccccagcctctcggacagccaccagcagccccctctggtctgggatctactacaatggctacaggcagtggcgcaccaatggcagacaataacgagggtgccgatggagtgggtaattcctcaggaaattggcattgcgattcccaatggctgggcgacagagtcatcaccaccagcacccgaacctgggccctgcccacatacaacaaccacctctacaagcaaatctccagccaatcaggagccagcaacgacaaccactactttggctacagcaccccctgggggtattttgacttcaacagattccactgccacttttcaccacgtgactggcaaagactcgtcaacaacaaccggggattccggcccaaaagactcaacttcaagctctttaatattcaagtcaaagaggtcacgcagaatgacggtacgacgacgattgccaataaccttaccagcacggttcaggtgtttactgactcggagtaccagctcccgtacgtcctgggctcggcgcatcaaggatgcctcccgccgtttccagcggacgtcttcatggtcccacagtatggatacctcaccctgaacaacgggagtcaggcggtaggacgctcttccttttactgcctggagtactttccttctcagatgctgcgtactggaaacaactttcagttcagctacacttttgaagacgtgcctttccacagcagctacgctcacagccagagtctggatcggctgatgaatcctctgatcgaccagtacctgtattatctgaacaagacacaaacaaatagtggaactcttcagcagtctcggctactgtttagccaagctggaccaaccaacatgtctcttcaagctaaaaactggctgcctggaccttgctacagacagcagcgtctgtcaaaacaggcaaacgacaacaacaacagcaactttccctggactgcagctacaaagtatcatctaaatggccgggactcgttggttaatccaggaccagctatggccagtcacaaggatgacgaagaaaagtttttccccatgcatggaaccctgatatttggtaaacaaggaacaaatgccaacgacgcggatttggaaaatgtcatgattacagatgaagaagaaatcagggccaccaatcccgtggctacggagcagtacgggactgtgtcaaataatttgcaaaactcaaacactggtccaactactggaactgtcaatcaccaaggagcgttacctggtatggtgtggcaggatcgagacgtgtacctgcagggacccatttgggccaagattcctcacaccgatggacactttcatccttctccactgatgggaggttttggactcaaacacccgcctcctcagatcatgatcaaaaacactcccgttccagccaatcctcccacaaacttcagttctgccaagtttgcttctttcatcacacagtattccacgggacaggtcagcgtggagatcgagtgggagctgcagaaggagaacagcaaacgctggaatcccgaaattcagtacacttccaactacaacaagtctgttaatgtggactttactgtggacactaatggtgtgtattcagagcctcgccccattggcaccagatacctgactcgtaatctgtaa

SEQ ID NO: 254 - protein, 735 aa, Adeno-associated virus
MAADGYLPDWLEDTLSEGIRQWWKLKPGPPPPKPAERHKDDSRGLVLPGYKYLGPFNGLDKGEPVNEADAAALEHDKAYDRQLDSGDNPYLKYNHADAEFQERLKEDTSFGGNLGRAVFQAKKRVLEPLGLVEEPVKTAPGKKRPVEHSPVEPDSSSGTGKAGQQPARKRLNFGQTGDADSVPDPQPLGQPPAAPSGLGSTTMATGSGAPMADNNEGADGVGNSSGNWHCDSQWLGDRVITTSTRTWALPTYNNHLYKQISSQSGASNDNHYFGYSTPWGYFDFNRFHCHFSPRDWQRLVNNNRGFRPKRLNFKLFNIQVKEVTQNDGTTTIANNLTSTVQVFTDSEYQLPYVLGSAHQGCLPPFPADVFMVPQYGYLTLNNGSQAVGRSSFYCLEYFPSQMLRTGNNFQFSYTFEDVPFHSSYAHSQSLDRLMNPLIDQYLYYLNKTQTNSGTLQQSRLLFSQAGPTNMSLQAKNWLPGPCYRQQRLSKQANDNNNSNFPWTAATKYHLNGRDSLVNPGPAMASHKDDEEKFFPMHGTLIFGKQGTNANDADLENVMITDEEEIRATNPVATEQYGTVSNNLQNSNTGPTTGTVNHQGALPGMVWQDRDVYLQGPIWAKIPHTDGHFHPSPLMGGFGLKHPPPQIMIKNTPVPANPPTNFSSAKFASFITQYSTGQVSVEIEWELQKENSKRWNPEIQYTSNYNKSVNVDFTVDTNGVYSEPRPIGTRYLTRNL

SEQ ID NO: 255 - protein, 738 aa, Adeno-associated virus
MAADGYLPDWLEDNLSEGIREWWDLKPGAPKPKANQQKQDDGRGLVLPGYKYLGPFNGLDKGEPVNAADAAALEHDKAYDQQLKAGDNPYLRYNHADAEFQERLQEDTSFGGNLGRAVFQAKKRVLEPLGLVEEAAKTAPGKKRPVEPSPQRSPDSSTGIGKKGQQPAKKRLSFGQTGDSESVPDPQPIGEPPAGPSGLGSGTMAAGGGAPMADNNEGADGVGSSSGNWHCDSTWLGDRVITTSTRTWALPTYNNHLYKQISNGTSGGSTNDNTYFGYSTPWGYFDFNRFHCHFSPRDWQRLINNNWGFRPKRLSFKLFNIQVKEVTQNEGTKTIANNLTSTIQVFTDSEYQLPYVLGSAHQGCLPPFPADVFMIPQYGYLTLNNGSQAVGRSSFYCLEYFPSQMLRTGNNSEFSYTFEDVPFHSSYAHSQSLDRLMNPLIDQYLYYLSRTQSTGGTQGTQQLLFSQAGPANMSAQAKNWLPGPCYRQQRVSTTLSQNNNSNFAWTGATKYHLNGRDSLVNPGVAMATHKDDEERFFPSSGVLMFGKQGAGRDNVDYSSVMLTSEEEIKTTNPVATEQYGVVADNLQQTNTGPIVGNVNSQGALPGMVWQNRDVYLQGPIWAKIPHTDGNFHPSPLMGGFGLKHPPPQILIKNTPVPADPPTTFSQAKLASFITQYSTGQVSVEIEWELQKENSKRWNPEIQYTSNYYKSTNVDFAVNTEGTYSEPRPIGTRYLTRNL

SEQ ID NO: 256 - DNA, 2217 bp, Adeno-associated virus
atggctgctgacggttatcttccagattggctcgaggacaacctctctgagggcattcgcgagtggtgggacctgaaacctggagcccccaagcccaaggccaaccagcagaagcaggacgacggccggggtctggtgcttcctggctacaagtacctcggacccttcaacggactcgacaagggggagcccgtcaacgcggcggacgcagcggccctcgagcacgacaaggcctacgaccagcagctcaaagcgggtgacaatccgtacctgcggtataaccacgccgacgccgagtttcaggagcgtctgcaagaagatacgtcttttgggggcaacctcgggcgagcagtcttccaggccaagaagcgggttctcgaacctctcggtctggttgaggaagctgctaagacggctcctggaaagaagagaccggtagaaccgtcacctcagcgttcccccgactcctccacgggcatcggcaagaaaggccagcagcccgctaaaaagagactgagctttggtcagactggcgactcagagtcagtccccgaccctcaaccaatcggagaaccaccagcaggcccctctggtctgggatctggtacaatggctgcaggcggtggcgctccaatggcagacaataacgaaggcgccgacggagtgggtagttcctcaggaaattggcattgcgattccacatggctgggcgacagagtcatcaccaccagcacccgaacctgggccctgcccacctacaacaaccacctctacaagcaaatatccaatgggacatcgggaggaagcaccaacgacaacacctacttcggctacagcaccccctgggggtattttgacttcaacagattccactgccacttctcaccacgtgactggcagcgactcatcaacaacaactggggattccggccaaaaagactcagcttcaagctcttcaacatccaggtcaaggaggtcacgcagaatgaaggcaccaagaccatcgccaataaccttaccagcacgattcaggtatttacggactcggaataccagctgccgtacgtcctcggctccgcgcaccagggctgcctgcctccgttcccggcggacgtcttcatgattccccagtacggctaccttacactgaacaatggaagtcaagccgtaggccgttcctccttctactgcctggaatattttccatctcaaatgctgcgaactggaaacaattctgaattcagctacaccttcgaggacgtgcctttccacagcagctacgcacacagccagagcttggaccgactgatgaatcctctcatcgaccagtacctgtactacttatccagaactcagtccacaggaggaactcaaggtacccagcaattgttattttctcaagctgggcctgcaaacatgtcggctcaggctaagaactggctacctggaccttgctaccggcagcagcgagtctctacgacactgtcgcaaaacaacaacagcaactttgcttggactggtgccaccaaatatcacctgaacggaagagactctttggtaaatcccggtgtcgccatggcaacccacaaggacgacgaggaacgcttcttcccgtcgagtggagtcctgatgtttggaaaacagggtgctggaagagacaatgtggactacagcagcgttatgctaaccagcgaagaagaaattaaaaccactaaccctgtagccacagaacaatacggtgtggtggctgacaacttgcagcaaaccaatacagggcctattgtgggaaatgtcaacagccaaggagccttacctggcatggtctggcagaaccgagacgtgtacctgcagggtcccatctgggccaagattcctcacacggacggcaacttccacccttcaccgctaatgggaggatttggactgaagcacccacctcctcagatcctgatcaagaacacgccggtacctgcggatcctccaacaacgttcagccaggcgaaattggcttccttcattacgcagtacagcaccggacaggtcagcgtggaaatcgagtgggagctgcagaaggagaacagcaaacgctggaacccagagattcagtacacttcaaactactacaaatctacaaatgtggactttgctgtcaatacagagggaacttattctgagcctcgccccattggtactcgttacctcacccgtaatctgtaa

SEQ ID NO: 257 - protein, 738 aa, Adeno-associated virus
MAADGYLPDWLEDNLSEGIREWWDLKPGAPKPKANQQKQDDGRGLVLPGYKYLGPFNGLDKGEPVNAADAAALEHDKAYDQQLKAGDNPYLRYNHADAEFQERLQEDTSFGGNLGRAVFQAKKRVLEPLGPVEEAAKTAPGKKRPVEPPPQRSPDSSTGIGKKGQQPAKKRLNFGQTGDSESVPDPQPIGEPPAGPSGLGSGTMAAGGGAPMADNNEGADGVGSSSGNWHCDSTWLGDRVITTSTRTWALPTYNNHLYKQISNGTSGGSTNDNTYFGYSTPWGYFDFNRFHCHFSPRDWQRLINNNWGFRPKRLSFKLFNIQVKEVTQNEGTKTVANNLTSTIQVFTDSEYQLPYVLGSAHQGCLPPFPADVFMIPQYGYLTLNNGSQAVGRSSFYCLEYFPSQMLRTGNNFEFSYTFEDVPFHSSYAHSQSLDRLMNPLIDQYLYYLSRTQSTGGTQGTQQLLFSQAGPANMSAQAKNWLPGPCYRQQRVSTTLSQNNNSNFAWTGATKYHLNGRDSLVNPGVAMATHKDDEERFFPSSGVLMFGKQGAGRDNVDYSSVMLTSEEEIKTTNPVATEQYGVVADNLQQTNTGPIVGNVNSQGALPGMVWQNRDVYLQGPIWAKIPHTDGNFHPSPLMGGFGLKHPPPQILIKNTPVPADPPTTFSQAKLASFITQYSTGQVSVEIEWELQKENSKRWNPEIQYTSNYYKSTNVDFAVNTEGTYSEPRPIGTRYLTRNL

SEQ ID NO: 258 - DNA, 2217 bp, Adeno-associated virus
atggctgctgacggttatcttccagattggctcgaggacaacctctctgagggcattcgcgagtggtgggacctgaaacctggagcccccaagcccaaggccaaccagcagaagcaggacgacggccggggtctggtgcttcctggctacaagtacctcggacccttcaacggactcgacaagggggagcccgtcaacgcggcggacgcagcggccctcgagcacgacaaggcctacgaccagcagctcaaagcgggtgacaatccgtacctgcggtataaccacgccgacgccgagtttcaggagcgtctacaagaagatacgtcttttgggggcaacctcgggcgagcagtcttccaggccaagaagcgggttctcgaacctctcggtccggttgaggaagctgctaagacggctcctggaaagaagagaccggtagaaccgccacctcagcgttcccccgactcctccacgggcatcggcaagaaaggccagcagcccgctaaaaagagactgaactttggtcagactggcgactcagagtcagtccccgaccctcaaccaatcggagaaccaccagcaggcccctctggtctgggatctggtacaatggctgcaggcggtggcgctccaatggcagacaataacgaaggcgccgacggagtgggtagttcctcaggaaattggcattgcgattccacatggctgggcgacagagtcatcaccaccagcacccgaacctgggccctgcccacctacaacaaccacctctacaagcaaatatccaatgggacatcgggaggaagcaccaacgacaacacctacttcggctacagcaccccctgggggtattttgacttcaacagattccactgccacttctcaccacgtgactggcagcgactcatcaacaacaactggggattccggccaaaaagactcagcttcaagctcttcaacatccaggtcaaggaggtcacgcagaatgaaggcaccaagaccgtcgccaataaccttaccagcacgattcaggtatttacggactcggaataccagctgccgtacgtcctcggctccgcgcaccagggctgcctgcctccgttcccggcggacgtcttcatgattccccagtacggctaccttacactgaacaatggaagtcaagccgtaggccgttcctccttctactgcctggaatattttccatctcaaatgctgcgaactggaaacaattttgaattcagctacaccttcgaggacgtgcctttccacagcagctacgcacacagccagagcttggaccgactgatgaatcctctcatcgaccagtacctgtactacttatccagaactcagtccacaggaggaactcaaggtacccagcaattgttattttctcaagctgggcctgcaaacatgtcggctcaggctaagaactggctacctggaccttgctaccggcagcagcgagtctctacgacactgtcgcaaaacaacaacagcaactttgcttggactggtgccaccaaatatcacctgaacggaagagactctttggtaaatcccggtgtcgccatggcaacccacaaggacgacgaggaacgcttcttcccgtcgagtggagtcctgatgtttggaaaacagggtgctggaagagacaatgtggactacagcagcgttatgctaaccagcgaagaagaaattaaaaccactaaccctgtagccacagaacaatacggtgtggtggctgacaacttgcagcaaaccaatacagggcctattgtgggaaatgtcaacagccaaggagccttacctggcatggtctggcagaaccgagacgtgtacctgcagggtcccatctgggccaagattcctcacacggacggcaacttccacccttcaccgctaatgggaggatttggactgaagcacccacctcctcagatcctgatcaagaacacgccggtacctgcggatcctccaacaacgttcagccaggcgaaattggcttccttcattacgcagtacagcaccggacaggtcagcgtggaaatcgagtgggagctgcagaaggagaacagcaaacgttggaacccagagattcagtacacttcaaactactacaaatctacaaatgtggactttgctgtcaatacagagggaacttattctgagcctcgccccattggtactcgttacctcacccgtaatctgtaa

SEQ ID NO: 259 - protein, 738 aa, Adeno-associated virus
MAADGYLPDWLEDNLSEGIREWWDLKPGAPKPKANQQKQDDGRGLVLPGYKYLGPFNGLDKGEPVNAADAAALEHDKAYDQQLKAGDNPYLRYNHADAEFQERLQEDTSFGGNLGRAVFQAKKRVLEPLGLVEEAAKTAPGKKRPVEPSPQRSPDSSTGIGKKGQQPAKKRLNFGQTGDSESVPDPQPIGEPPAGPSGLGSGTMAAGGGAPMADNNEGADGVGSSSGNWHCDSTWLGDRVITTSTRTWALPTYNNHLYKQISNGTSGGSTNDNTYFGYSTPWGYFDFNRFHCHFSPRDWQRLINNNWGFRPKRLSFKLFNIQVKEVTQNEGTKTIANNLTSTIQVFTDSEYQLPYVLGSAHQGCLPPFPADVFMIPQYGYLTLNNGSQAVGRSSFYCLEYFPSQMLRTGNNFEFSYTFEDVPFHSSYAHSQSLDRLMNPLIDQYLYYLSRTQSTGGTQGTQQLLFSQAGPANMSAQAKNWLPGPCYRQQRVSTTLSQSNNSNFAWTGATKYHLNGRDSLVNPGVAMATHKDDEERFFPSSGVLMFGKQGAGRDNVDYSSVMLTSEEEIKTTNPVATEQYGVVADNLQQTNTGPIVGNVNSQGALPGMVWQNRDVYLQGPIWAKIPHTDGNFHPSPLMGGLGLKHPPPQILIKNTPVPADPPTTFSQAKLASFITQYSTGQVSVEIEWELQKENSKRWNPEIQYTSNYYKSTNVDFAVNTEGTYSEPRPIGTRYLTRNL

SEQ ID NO: 260 - DNA, 2217 bp, Adeno-associated virus
atggctgctgacggttatcttccagattggctcgaggacaacctctctgagggcattcgcgagtggtgggacctgaaacctggagcccccaagcccaaggccaaccagcagaagcaggacgacggccggggtctggtgcttcctggctacaagtacctcggacccttcaacggactcgacaagggggagcccgtcaacgcggcggacgcagcggccctcgagcacgacaaggcctacgaccagcagctcaaagcgggtgacaatccgtacctgcggtataaccacgccgacgccgagtttcaggagcgtctgcaagaagatacgtcttttgggggcaacctcgggcgagcagtcttccaggccaagaagcgggttctcgaacctctcggtctggttgaggaagcggctaagacggctcctggaaagaagagaccggtagaaccgtcacctcagcgttcccccgactcctccacgggcatcggcaagaaaggccagcagcccgctaaaaagagactgaactttggtcagactggcgactcagagtcagtccccgaccctcaaccaatcggagaaccaccagcaggcccctctggtctgggatctggtacaatggctgcaggcggtggcgctccaatggcagacaataacgaaggcgccgacggagtgggtagttcctcaggaaattggcattgcgattccacatggctgggcgacagagtcatcaccaccagcacccgaacctgggccctgcccacctacaacaaccacctctacaagcaaatatccaatgggacatcgggaggaagcaccaacgacaacacctacttcggctacagcaccccctgggggtattttgacttcaacagattccactgccacttctcaccacgtgactggcagcgactcatcaacaacaactggggattccggccaaaaagactcagcttcaagctcttcaacatccaggtcaaggaggtcacgcagaatgaaggcaccaagaccatcgccaataaccttaccagcacgattcaggtatttacggactcggaataccagctgccgtacgtcctcggctccgcgcaccagggctgcctgcctccgttcccggcggacgtcttcatgattccccagtacggctaccttacactgaacaatggaagtcaagccgtaggccgttcctccttctactgcctggaatattttccatctcaaatgctgcgaactggaaacaattttgaattcagctacaccttcgaggacgtgcctttccacagcagctacgcacacagccagagcttggaccgactgatgaatcctctcatcgaccagtacctgtactacttatccagaactcagtccacaggaggaactcaaggtacccagcaattgttattttctcaagctgggcctgcaaacatgtcggctcaggctaagaactggctacctggaccttgctaccggcagcagcgagtctctacgacactgtcgcaaagcaacaacagcaactttgcttggactggtgccaccaaatatcacctgaacggaagagactctttggtaaatcccggtgtcgccatggcaacccacaaggacgacgaggaacgcttcttcccgtcgagtggagtcctgatgtttggaaaacagggtgctggaagagacaatgtggactacagcagcgttatgctaaccagcgaagaagaaattaaaaccactaaccctgtagccacagaacaatacggtgtggtggctgacaacttgcagcaaaccaatacagggcctattgtgggaaatgtcaacagccaaggagccttacctggcatggtctggcagaaccgagacgtgtacctgcagggtcccatctgggccaagattcctcacacggacggcaacttccacccttcaccgctaatgggaggacttggactgaagcacccacctcctcagatcctgatcaagaacacgccggtacctgcggatcctccaacaacgttcagccaggcgaaattggcttccttcattacgcagtacagcaccggacaggtcagcgtggaaatcgagtgggagctgcagaaggagaacagcaaacgctggaacccagagattcagtacacttcaaactactacaaatctacaaatgtggactttgctgtcaatacagagggaacttattctgagcctcgccccattggtactcgttacctcacccgtaatctgtaa

SEQ ID NO: 261 - protein, 737 aa, Adeno-associated virus
MAADGYLPDWLEDNLSEGIREWWDLKPGAPKPKANQQKQDDGRGLVLPGYKYLGPFNGLDKGEPVNAADAAALEHDKAYDQQLKAGDNPYPRYNHADAEFQERLQEDTPFGGNLGRAVFQAKKRVLEPLGLVEEAAKTAPGKKRPVEPSPQRSPDSSTGIGKKGQQPAKKRLNFGQTGDSESVPDPQPIGEPPAGPSGLGSGTMAAGGGAPMADNNEGADGVGNASGNWHCDSTWLGDRVITTSTRTWALPTYNNHLYKQISSASTGASNDNHYFGYSTPWGYFDFNRFHCHFSPRDWQRLINNNWGFRPKRLNFKLFNIQVKEVTTNDGVTTIANNLTSTVQVFSDSEYQLPYVLGSAHQGCLPPFPADVFMIPQYGYLTLNNGSQAVGRSSFYCLEYFPSQMLRTGNNFTFSYTFEEVPLHSSYAHSQSLDRLMNPLIVQYLYYLNRTQNQSGSAQNKDLLFSRGSPAGMSVQPKNWLPGPCYRQQRVSKTKTDNNNSNFTWTGASKYNLNGRESIINPGTAMASHKDDEDKFFPMSGVMIFGKESAGASNTALDNVMITDEEEIKATNPVATERFGTVAVNFQSSSTDPATGDVHAMGALPGMVWQDRDVYLQGPIWAKIPHTDGHFHPSPLMGGFGLKNPPPQILIKNTPVPANPPAEFSATKFASFITQYSTGQVSVEIEWELQKENSKRWNPEVQYTSNYAKSASVDFTVDNNGLYTEPRPIGTRYLTRPL

SEQ ID NO: 262 - protein, 737 aa, Adeno-associated virus
MAADGYLPDWLEDNLSEGIREWWDLKPGAPKPKANQQKQDDGRGLVLPGYKYLGPFNGLDKGEPVNAADAAALEHDKAYDQQLKAGDNPYPRYNHADAEFQERLQEDTSFGGNLGRAVFQAKKRVLEPLGLVEEAAKTAPGKKRPVEPSPQRSPDSSTGIGKKGQQPAKKRLNFGQTGDSESVPDPQPIGEPPAGPSGLGSGTMAAGGGAPMADNNEGADGVGNASGNWHCDSTWLGDRVITTSTRTWALPTYNNHLYKQISSASTGASNDNHYFGYSTPWGYFDFNRFHCHFSPRDWQRLINNNWGFRPKRLNFKLFNIQVKEVTTNDGVTTIANNLTSTVQVFSDSEYQLPYVLGSAHQGCLPPFPADVFMIPQYGYLTLNNGSQAVGRSSFYCLEYFPSQMLRTGNNFTFSYTFEEVPLHSSYAHSQSLDRLMNPLIDQYLYYLNRTQNQSGSAQNKDLLFSRGSPAGMSVQPKNWLPGPCYRQQRVSKTKTDNNNSNFTWTGASKYNLNGRESIINPGTAMASHKDDEDKFFPMSGVMIFGKESAGASNTALDNVMITDEEEIKATNPVATERFGTVAVNFQSSSTDPATGDVHAMGALPGMVWQDRDVYLQGPIWAKIPHTDGHFHPSPLMGGFGLKNPPPQILIKNTPVPANPPAEFSATKFASFITQYSTGQVSVEIEWELQKENSKRWNPEVQYTSNYAKSASVDFTVDNNGLYTEPRPIGTRYLTRPL

SEQ ID NO: 263 - DNA, 2214 bp, Adeno-associated virus
atggctgctgacggttatcttccagattggctcgaggacaacctctctgagggcattcgcgagtggtgggacctgaaacctggagcccccaagcccaaggccaaccagcagaagcaggacgacggccggggtctggtgcttcctggctacaagtacctcggacccttcaacggactcgacaagggggagcccgtcaacgcggcggacgcagcggccctcgagcacgacaaggcctacgaccagcagctcaaagcgggtgacaatccgtacccgcggtataaccacgccgacgccgagtttcaggagcgtctgcaagaagatacgccttttgggggcaacctcgggcgagcagtcttccaggccaagaagcgggttctcgaacctctcggtctggttgaggaagctgctaagacggctcctggaaagaagagaccggtagaaccgtcacctcagcgttcccccgactcctccacgggcatcggcaagaaaggccagcagcccgctaaaaagagactgaactttggtcagactggcgactcagagtcagtccccgaccctcaaccaatcggagaaccaccagcaggcccctctggtctgggatctggtacaatggctgcaggcggtggcgctccaatggcagacaataacgaaggcgccgacggagtgggtaatgcctcaggaaattggcattgcgattccacatggctgggcgacagagtcatcaccaccagcacccgcacctgggccttgcccacctacaataaccacctctacaagcaaatctccagtgcttcaacgggggccagcaacgacaaccactacttcggctacagcaccccctgggggtattttgatttcaacagattccactgccacttttcaccacgtgactggcagcgactcatcaacaacaattggggattccggcccaagagactcaacttcaaactcttcaacatccaagtcaaggaggtcacgacgaatgatggcgtcacaaccatcgctaataaccttaccagcacggttcaagtcttctcggactcggagtaccagcttccgtacgtcctcggctctgcgcaccagggctgcctccctccgttcccggcggacgtgttcatgattccgcaatacggctacctgacgctcaacaatggcagccaagccgtgggacgttcatccttttactgcctggaatatttcccttctcagatgctgagaacgggcaacaactttaccttcagctacacctttgaggaagtgcctctccacagcagctacgcgcacagccagagcctggaccggctgatgaatcctctcatcgtccaatacctgtattacctgaacagaactcaaaatcagtccggaagtgcccaaaacaaggacttgctgttcagccgtgggtctccagctggcatgtctgttcagcccaaaaactggctacctggaccctgttatcggcagcagcgcgtttctaaaacaaaaacagacaacaacaacagcaattttacctggactggtgcttcaaaatataacctcaatgggcgtgaatccatcatcaaccctggcactgctatggcctcacacaaagacgacgaagacaagttctttcccatgagcggtgtcatgatttttggaaaagagagcgccggagcttcaaacactgcattggacaatgtcatgattacagacgaagaggaaattaaagccactaaccctgtggccaccgaaagatttgggaccgtggcagtcaatttccagagcagcagcacagaccctgcgaccggagatgtgcatgctatgggagcattacctggcatggtgtggcaagatagagacgtgtacctgcagggtcccatttgggccaaaattcctcacacagatggacactttcacccgtctcctcttatgggcggctttggactcaagaacccgcctcctcagatcctcatcaaaaacacgcctgttcctgcgaatcctccggcggagttttcagctacaaagtttgcttcattcatcacccaatactccacaggacaagtgagtgtggaaattgaatgggagctgcagaaagaaaacagcaagcgctggaatcccgaagtgcagtacacatccaattatgcaaaatctgccagcgttgattttactgtggacaacaatggactttatactgagcctcgccccattggcacccgttaccttacccgtcccctgtaa

SEQ ID NO: 264 - protein, 736 aa, Adeno-associated virus
MAADGYLPDWLEDTLSEGIRQWWKLRPGPPPPKPAERHKDDSRGLVLPGYKYLGPFNGLDKGEPVNEADAAALEHDKAYDRQLDSGDNPYLKYNHADAEFQERLKEDTSFGGNLGRAVFQAKKRVLEPLGLVEEGAETAPGKKRPVEQSPQGPDSSSGIGKTGQQPAKKRLNFGQTGDSESVPDPQPLGEPPATPAAVGPTTMASGGGAPMADNNEGADGVGNASGNWHCDSTWLGDRVITTSTRTWALPTYNNHLYKQISSASTGASNDNHYFGYSTPWGYFDFNRFHCHFSPRDWQRLINNNWGFRPKRLNFKLFNIQVKEVTTNDGVTTIANNLTSTVQVFSDSEYQLPYVLGSAHQGCLPPFPADVFMIPQYGYLTLNNGSQAVGRSSFYCLEYFPSQMLRTGNNFTFSYTFEEVPFHSSYAHSQSLDRLMNPLIDQYLYYPNRTQNQSGSAQNKDLLFSRGSPAGMSVQPKNWLPGPCYRQQRVSKTKTDNNNSNFTWTGASKYNLNGRESIINPGTAMASHKDDEDKFFPMSGVMIFGKESAGASNTALDNVMITDEEEIKATNPVATERFGTVAVNFQSSSTDPATGDVHAMGALPGMVWQGRDVYLQGPIWAKIPHTDGHFHPSPLMGGFGLKNPPPQILIKNTPVPANPPAEFSATKFASFITQYSTGQVSVEIEWELQKENSKRWNPEVQYTSNYAKSANVDFTVDNNGLYTEPRPIGTRYLTRPL

SEQ ID NO: 265 - DNA, 2211 bp, Adeno-associated virus
atggctgccgatggttatcttccagattggctcgaggacactctctctgaaggaataagacagtggtggaagctcagacctggcccaccaccaccaaagcccgcagagcggcataaggacgacagcaggggtcttgtgcttcctgggtacaagtacctcggacccttcaacggactcgacaagggagagccggtcaacgaggcagacgccgcggccctcgagcacgacaaagcctacgaccggcagctcgacagcggagacaacccgtacctcaagtacaaccacgccgacgcggagtttcaggagcgccttaaagaagatacgtcttttgggggcaacctcgggcgagcagtcttccaggccaagaagcgggttctcgaacctctcggtctggttgaggaaggcgctgagacggctcctggaaagaaacgtccggtagagcagtcgccacaagggccagactcctcctcgggcatcggcaagacaggccagcagcccgctaaaaagagactcaattttggtcagactggcgactcagagtcagtccccgatccacaacctctcggagaacctccagcaacccccgctgctgtgggacctactacaatggcttcaggcggtggcgcaccaatggcagacaataacgaaggcgccgacggagtgggtaatgcctcaggaaattggcattgcgattccacatggctgggcgacagagtcatcaccaccagcacccgcacctgggccttgcccacctacaataaccacctctacaagcaaatctccagtgcttcaacgggggccagcaacgacaaccactacttcggctacagcaccccctgggggtattttgatttcaacagattccactgccacttttcaccacgtgactggcagcgactcatcaacaacaattggggattccggcccaagagactcaacttcaaactcttcaacatccaagtcaaggaggtcacgacgaatgatggcgtcacaaccatcgctaataaccttaccagcacggttcaagtcttctcggactcggagtaccagcttccgtacgtcctcggctctgcgcaccagggctgcctccctccgttcccggcggacgtgttcatgattccgcaatacggctacctgacgctcaacaatggcagccaagccgtgggacgttcatccttttactgcctggaatatttcccttctcagatgctgagaacgggcaacaactttaccttcagctacacctttgaggaagtgcctttccacagcagctacgcgcacagccagagcctggaccggctgatgaatcctctcatcgaccaatacctgtattacccgaacagaactcaaaatcagtccggaagtgcccaaaacaaggacttgctgtttagccgtgggtctccagctggcatgtctgttcagcccaaaaactggctacctggaccctgttatcggcagcagcgcgtttctaaaacaaaaacagacaacaacaacagcaattttacctggactggtgcttcaaaatataacctcaatgggcgtgaatccatcatcaaccctggcactgctatggcctcacacaaagacgacgaagacaagttctttcccatgagcggtgtcatgatttttggaaaagagagcgccggagcttcaaacactgcattggacaatgtcatgattacagacgaagaggaaattaaagccactaaccctgtggccaccgaaagatttgggaccgtggcagtcaatttccagagcagcagcacagaccctgcgaccggagatgtgcatgctatgggagcattacctggcatggtgtggcaaggtagagacgtgtacctgcagggtcccatttgggccaaaattcctcacacagatggacactttcacccgtctcctcttatgggcggctttggactcaagaacccgcctcctcagatcctcatcaaaaacacgcctgttcctgcgaatcctccggcggagttttcagctacaaagtttgcttcattcatcacccaatactccacaggacaagtgagtgtggaaattgaatgggagctgcagaaagaaaacagcaagcgctggaatcccgaagtgcagtacacatccaattatgcaaaatctgccaacgttgattttactgtggacaacaatggactttatactgagcctcgccccattggcacccgttaccttacccgtcccctgtaa

SEQ ID NO: 266 - protein, 736 aa, Adeno-associated virus
MAADGYLPDWLEDTLSEGIRQWWKLRPGPPPPKPAERHKDDSRGLVLPGYKYLGPFNGLDKGEPVNEADAAALEHDKAYDRQLDSGDNPYLKYNHADAEFQERLKEDTSFGGNLGRAVFQAKKRVLEPLGLVEEGAKTAPGKKRPVEQSPQGPDSSSGIGKTGQQPAKKRLNFGQTGDSESVPDPQPLGEPPATPAAVGPTTMASGGGAPMADNNEGADGVGNASGNWHCDSTWLGDRVITTSTRTWALPTYNNHLYKQISSASTGASNDNHYFGYSTPWGYFDFNRFHCHFSPRDWQRLINNNWGFRPKRLNFKLFNIQVKEVTTNDGVTTIANNLTSTVQVFSDSEYQLPYVLGSAHQGCLPPFPADVFMIPQYGYLTLNNGSQAVGRSSFYCLEYFPSQMLRTGNNFTFSYTFEEVPFHSSYAHSQSLDRLMNPLIDQYLYYPNRTQNQSGSAQNKDLLFSRGSPAGMSVQPKNWLPGPCYRQQRVSKTKTDNNNSNFTWTGASKYNLNGRESIINPGTAMASHKDDEDKFFPMSGVMIFGKESAGASNTALDNVMITDEEEIKATNPVATERFGTVAVNFQSSSTDPATGDVHAMGALPGMVWQGRDVYLQGPIWAKIPHTDGHFHPSPLMGGFGLKNPPPQILIKNTPVPANPPAEFSATKFASFITQYSTGQVSVEIEWELQKENSKRWNPEVQYTSNYAKSANVDFTVDNNGLYTEPRPIGTRYLTRPL

SEQ ID NO: 267 - protein, 736 aa, Adeno-associated virus
MAADGYLPDWLEDTLSEGIRQWWKLRPGPPPPKPAERHKDDSRGLVLPGYKYLGPFNGLDKGEPVNEADAAALEHDKAYDRQLDSGDNPYLKYNHADAEFQERLKEDTSFGGNLGRAVFQAKKRVLEPLGLVEEGAKTAPGKKRPVEQSPQGPDSSSGIGKTGQQPAKKRLNFGQTGDSESVPDPQPLGEPPATPAAVGPTTMASGGGAPMADNNEGADGVGNASGNWHCDSTWLGDRVITTSTRTWALPTYNNHLYKQISSASTGASNDNHYFGYSTPWGYFDFNRFHCHFSPRDWQRLINNNWGFRPKRLNFKLFNIQVKEVTTNDGVTTIANNLTSTVQVFSDSEYQLPYVLGSAHQGCLPPFPADVFMIPQYGYLTLNNGSQAVGRSSFYCLEYFPSQMLRTGNNFTFSYTFEEVPFHSSYAHSQSLDRLMNPLIDQYLYYLNRTQNQSGSAQNKDLLFSRGSPAGMSVQPKNWLPGPCYRQQRVSKTKTDNNNSNFTWTGASKYNLNGRESIINPGTAMASHKDDEDKFFPMSGVMIFGKESAGASNTALDNVMITDEEEIKATNPVATERFGTVAVNFQSSSTDPATGDVHAMGALPGMVWQGRDVYLQGPIWAKIPHTDGHFHPSPLMGGFGLKNPPPQILIKNTPVPANPPAEFSATKFASFITQYSTGQVSVEIEWELQKENSKRWNPEVQYTSNYAKSANVDFTVDNNGLYTEPRPIGTRYLTRPL

SEQ ID NO: 268 - protein, 736 aa, Adeno-associated virus
MAADGYLPDWLEDTLSEGIRQWWKLRPGPPPPKPAERHKDDSRGLVLPGYKYLGPFNGLDKGEPVNEADAAALEHDKAYDRQLDSGDNPYLKYNHADAEFQERLKEDTSFGGNLGRAVFQAKKRVLEPLGLVEEGAKTAPGKKRPVEQSPQGPDSSSGIGKTGQQPAKKRLNFGQTGDSESVPDPQPLGEPPATPAAVGPTTMASGGGAPMADNNEGADGVGNASGNWHCDSTWLGDRVITTSTRTWALPTYNNHLYKQISSASTGASNDNHYFGYSTPWGYFDFNRFHCHFSPRDWQRLINNNWGFRPKRLNFKLFNIQVKEVTTNDGVTTIANNLTSTVQVFSDSEYQLPYVLGSAHQGCLPPFPADVFMIPQYGYLTLNNGSQAVGRSSFYCLEYFPSQMLRTGNNFTFSYTFEEVPFHSSYAHSQSLDRLMNPLIDQYLYYLNRTQNQSGSAQNKDLLFSRGSPAGMSVQPKNWLPGPCYRQQRVSKTKTDNNNSNFTWTGASKYNLNGRESIINPGTAMASHKDDEDKFFPMSGVMIFGKESAGASNTALDNVMITDEEEIKATNPVATERFGTVAVNFQSSSTDPATGDVHAMGALPGMVWQDRDVYLQGPIWAKIPHTDGHFHPSPLMGGFGLKNPPPQILIKNTPVPANPPAEFSATKFASFITQYSTGQVSVEIEWELQKENSKRWNPEVQYTSNYAKSANVDFTVDNNGLYTEPRPIGTRYLTRPL

SEQ ID NO: 269 - DNA, 2208 bp, Adeno-associated virus
atggctgccgatggctatcttccagattggctcgaggacactctctctgaaggaataagacagtggtggaagctcaaacctggcccaccaccaccaaagcccgcagagcggcatagggacgacagcaggggtcttgtgcttcctgggtacaagtacctcggacccttcaacggactcgacaagggagagccggtcaacgaggcagacgccgcggccctcgagcacgacaaagcctacgaccggcagctcgacagcggagacaacccgtacctcaagtacaaccacgccgacgcggagtttcaggagcgccttaaagaagatacgtcttttgggggcaacctcggacgagcagtcttccaggcgaaaaagagggttcttgaacctctgggcctggttgaggaacctgttaagacggctccgggaaaaaagaggccggtagagcactctcctgtggagccagactcctcctcgggaaccggaaaggcgggccagcagcctgcaagaaaaagattgaattttggtcagactggagacgcagactcagtacctgacccccagcctctcggacagccaccagcagccccctctggtctgggaactaatacgatggctacaggcagtggcgcaccaatggcagacaataacgagggcgccgacggagtgggtaattcctcgggaaattggcattgcgattccacatggatgggcgacagagtcatcaccaccagcacccgaacctgggccctgcccacctacaacaaccacctctacaaacaaatttccagccaatcaggagcctcgaacgacaatcactactttggctacagcaccccttgggggtattttgacttcaacagattccactgccacttttcaccacgtgactggcaaagactcatcaacaacaactggggattccgacccaagagactcaacttcaagctctttaacattcaagtcaaagaggtcacgcagaatgacggtacgacgacgattgccaataaccttaccagcacggttcaggtgtttactgactcggggtaccagctcccgtacgtcctcggctcggcgcatcaaggatgcctcccgccgttcccagcagacgtcttcatggtgccacagtatggataccccaccctgaacaacgggagtcaggcagtaggacgctcttcattttactgcctggagtactttccttctcagatgctgcgtaccggaaacaactttaccttcagctacacttttgaggacgttcctttccacagcagctacgctcacagccagagtctggaccgtctcatgaatcctctcatcgaccagtacctgtattacttgagcacaacaaacactccaagtggaaccaccacgcagtcaaggcttcagttttctcaggccggagcgagtgacattcgggaccagtctaggaactggcttcctggaccctgttaccgccagcagcgagtatcaaagacatctgcggataacaacaacagtgaatactcgtggactggagctaccaagtaccacctcaatggcagagactctctggtgaatccgggcccggccgtggcaagccacaaggacgatgaagaaaagttttttcctcagagcggggttctcatctttgggaagcaaggctcagagaaaacaaatgtggacattgaaaaggtcatgattacagacgaagaggaaatcaggacaaccaatcccgtggctacggagcagtatggttctgtatctaccaacctccagagaggcaacagacaagcagctaccgcagatgtcaacacacaaggcgttcttccaggcatggtctggcaggacagagatgtgtaccttcaggggcccatctgggcaaagattccacacacggacggacattttcacccctctcccctcatgggtggattcggacttaaacaccctcctccacagattctcatcaagaacaccccggtacctgcgaatccttcgaccaccttcagtgcggcaaagtttgcttccttcatcacacagtactccacgggacaggtcagcgtggagatcgagtgggagctgcagaaggaaaacagcaaacgctggaatcccgaaattcagtacacttccaactacaacaagtctgttaatgtggactttactgtggacactaatggcgtgtattcagagcctcgccccattggcaccagatacctgactcgtaatctgtaa

SEQ ID NO: 270 - protein, 735 aa, Adeno-associated virus
MAADGYLPDWLEDTLSEGIRQWWKLKPGPPPPKPAERHRDDSRGLVLPGYKYLGPFNGLDKGEPVNEADAAALEHDKAYDRQLDSGDNPYLKYNHADAEFQERLKEDTSFGGNLGRAVFQAKKRVLEPLGLVEEPVKTAPGKKRPVEHSPVEPDSSSGTGKAGQQPARKRLNFGQTGDADSVPDPQPLGQPPAAPSGLGTNTMATGSGAPMADNNEGADGVGNSSGNWHCDSTWMGDRVITTSTRTWALPTYNNHLYKQISSQSGASNDNHYFGYSTPWGYFDFNRFHCHFSPRDWQRLINNNWGFRPKRLNFKLFNIQVKEVTQNDGTTTIANNLTSTVQVFTDSGYQLPYVLGSAHQGCLPPFPADVFMVPQYGYPTLNNGSQAVGRSSFYCLEYFPSQMLRTGNNFTFSYTFEDVPFHSSYAHSQSLDRLMNPLIDQYLYYLSTTNTPSGTTTQSRLQFSQAGASDIRDQSRNWLPGPCYRQQRVSKTSADNNNSEYSWTGATKYHLNGRDSLVNPGPAVASHKDDEEKFFPQSGVLIFGKQGSEKTNVDIEKVMITDEEEIRTTNPVATEQYGSVSTNLQRGNRQAATADVNTQGVLPGMVWQDRDVYLQGPIWAKIPHTDGHFHPSPLMGGFGLKHPPPQILIKNTPVPANPSTTFSAAKFASFITQYSTGQVSVEIEWELQKENSKRWNPEIQYTSNYNKSVNVDFTVDTNGVYSEPRPIGTRYLTRNL

SEQ ID NO: 271 - DNA, 2211 bp, Adeno-associated virus
atggctgccgacggttatcttccagattggctcgaggacactctctctgaaggaataagacagtggtggaagctcaaacctggcccaccaccaccaaagcccgcagagcggcataaggacgacagcaggggtcttgtgcttcctgggtacaagtacctcggacccttcaacggactcgacaagggagagccggtcaacgaggcagacgccgcggccctcgagcacgacaaagcctacgaccggcagctcgacagcggagacaacccgtacctcaagtacaaccacgccgacgcggagtttcaggagcgccttaaagaagatacgtcttttgggggcaacctcgggcgggcagtcttccaggccaagaagcgggttctcgaacctctcggtctggttgaggaaggcgctaagacggctcctggaaagaaacgtccggtagagcagtcgccacaagagccagactccccctcgggcatcggcaagacaggccagcagcccgctaaaaagagactcaattttggtcagactggcgactcagagtcagtccccgatccacaacctctcggagaacctccagcaacccccgctgctgtgggacctactacaatggcttcaggcggtggcgcaccaatggcagacaataacgaaggcgccgacggagtgggtaatgcctcaggaaattggcactgcgattccacatggctgggcgacagagtcatcaccaccagcacccgcacctgggccttgcccacctacaataaccacctctacaagcaaatctccagtgcttcaacgggggccagcaacgacaaccactacttcggctacagcaccccctgggggtattttgatttcaacagattccactgccacttttcaccacgtgactggcagcgactcatcaacaacaattggggattccggcccaagagactcaacttcaaactcttcaacatccaagtcaaggaggtcacgacgaatgatggcgtcacaaccatcgctaataaccttaccagcacggttcaagtcttctcggactcggagtaccagcttccgtacgtcctcggctctgcgcaccagggccgcctccctccgttcccggcggacgtgttcatgattccgcaatacggctacctgacgctcaacaatggcagccaagccgtgggacgttcatcctcttactgcctggaatatttcccttctcagatgctgagaacgggcaacaactttaccttcagctacacctttgaggaagtgcctctccacagcagctgcgcgcacagccagagcctggaccggctgatgaatcctctcatcgaccaatacctgtattacctgaacagaactcaaaatcagtccggaagtgcccaaaacagggacttgctgttcagccgtgggtctccagctggcatgtctgttcagcccaaaaactggctacctggaccctgttatcggcagcagcgcgtttctaaaacaaaaacagacaacaacaacagcaattttacctggactggtgcttcaaaatataacctcaatgggcgtgaatccatcatcaaccctggcactgctatggcctcacacaaagacgacgaagacaagttctttcccatgagcggtgtcatgatttttggaaaagagagcgccggagcttcaaacactgcattggacaatgtcatgattacagacgaagaggaaattaaagccactaaccctgtggccaccgaaagatttgggaccgtggcagtcaatttccagagcagcagcacagaccctgcgaccggagatgtgcatgctatgggagcattacctggcatggtgtggcaagatagagacgtgtacctgcagggtcccatttgggccaaaattcctcacacagatggacactttcacccgtctcctcttatgggcggctttggactcaagaacccgcctcctcagatcctcatcaaaaacacgcctgttcctgcgaatcctccggcggagttttcagctacaaagtttgcttcattcatcacccaatactccgcaggacaagtgagtgtggaaattgaatgggagctgcagaaagaaaacagcaagcgctggaatcccgaagtgcagtacacatccaattatgcaaaatctgccaacgttgattttactgtggacaacaatggactttatactgagcctcgccccattggcacccgttaccttacccgtcccctgtaa

SEQ ID NO: 272 - protein, 736 aa, Adeno-associated virus
MAADGYLPDWLEDTLSEGIRQWWKLKPGPPPPKPAERHKDDSRGLVLPGYKYLGPFNGLDKGEPVNEADAAALEHDKAYDRQLDSGDNPYLKYNHADAEFQERLKEDTSFGGNLGRAVFQAKKRVLEPLGLVEEGAKTAPGKKRPVEQSPQEPDSPSGIGKTGQQPAKKRLNFGQTGDSESVPDPQPLGEPPATPAAVGPTTMASGGGAPMADNNEGADGVGNASGNWHCDSTWLGDRVITTSTRTWALPTYNNHLYKQISSASTGASNDNHYFGYSTPWGYFDFNRFHCHFSPRDWQRLINNNWGFRPKRLNFKLFNIQVKEVTTNDGVTTIANNLTSTVQVFSDSEYQLPYVLGSAHQGRLPPFPADVFMIPQYGYLTLNNGSQAVGRSSSYCLEYFPSQMLRTGNNFTFSYTFEEVPLHSSCAHSQSLDRLMNPLIDQYLYYLNRTQNQSGSAQNRDLLFSRGSPAGMSVQPKNWLPGPCYRQQRVSKTKTDNNNSNFTWTGASKYNLNGRESIINPGTAMASHKDDEDKFFPMSGVMIFGKESAGASNTALDNVMITDEEEIKATNPVATERFGTVAVNFQSSSTDPATGDVHAMGALPGMVWQDRDVYLQGPIWAKIPHTDGHFHPSPLMGGFGLKNPPPQILIKNTPVPANPPAEFSATKFASFITQYSAGQVSVEIEWELQKENSKRWNPEVQYTSNYAKSANVDFTVDNNGLYTEPRPIGTRYLTRPL

SEQ ID NO: 273 - protein, 736 aa, Adeno-associated virus
MAADGYLPDWLEDTLSEGIRQWWKLKPGPPPPKPAERHKDDSRGLVLPGYKYLGPFNGLDKGEPVNEADAAALEHDKAYDRQLDSGDNPYLKYNHADAEFQERLKEDTSFGGNLGRAVFQAKKRVLEPLGLVEEGAKTAPGKKRPVEQSPQEPDSSSGIGKTGQQPAKKRLNFGQTGDSESVPDPQPLGEPPATPAAVGPTTMASGGGAPMADNNEGADGVGNASGNWHCDSTWLGDRVITTSTRTWALPTYNNHLYKQISSASTGASNDNHYFGYSTPWGYFDFNRFHCHFSPRDWQRLINNNWGFRPKRLNFKLFNIQVKEVTTNDGVTTIANNLTSTVQVFSDSEYQLPYVLGSAHQGCLPPFPADVFMIPQYGYLTLNNGSQAVGRSSFYCLEYFPSQMLRTGNNFTFSYTFEEVPLHSSCAHSQSLDRLMNPLIDQYLYYLNRTQNQSGSAQNRDLLFSRGSPAGMSVQPKNWLPGPCYRQQRVSKTKTDNNNSNFTWTGASKYNLNGRESIINPGTAMASHKDDEDKFFPMSGVMIFGKESAGASNTALDNVMITDEEEIKATNPVATERFGTVAVNFQSSSTDPATGDVHAMGALPGMVWQDRDVYLQGPIWAKIPHTDGHFHPSPLMGGFGLKNPPPQILIKNTPVPANPPAEFSATKFASFITQYSTGQVSVEIEWELQKENSKRWNPEVQYTSNYAKSANVDFTVDNNGLYTEPRPIGTRYLTRPL

SEQ ID NO: 274 - DNA, 2208 bp, Adeno-associated virus
atggctgccgatggctatcttccagattggctcgaggacactctctctgaaggaataagacagtggtggaagctcaaacctggcccaccaccaccaaagcccgcagagcggcatagggacgacagcaggggtcttgtgcttcctgggtacaagtacctcggacccttcaacggactcgacaagggagagccggtcaacgaggcagacgccgcggccctcgagcacgacaaagcctacgaccggcagctcgacagcggagacaacccgtacctcaagtacaaccacgccgacgcggagtttcaggagcgccttaaagaagatacgtcttttgggggcaacctcggacgagcagtcttccaggcgaaaaagagggttcttgaacctctgggcctggttggggaacctgttaagacggctccgggaaaaaagaggccggtagagcactctcctgtggagccagactcctcctcgggaaccggaaaggcgggccagcagcctgcaagaaaaagattgaattttggtcagactggagacgcagactcagtacctgacccccagcctctcggacagccaccagcagccccctctggtctgggaactaatacgatggctacaggcagtggcgcaccaatggcagacaataacgagggcgccgacggagtgggtaattcctcgggaaattggcattgcgattccacatggatgggcgacagagtcatcaccaccagcacccgaacctgggccctgcccacctacaacaaccacctctacaaacaaatttccagccaatcaggagcctcgaacgacagtcactactttggctacagcaccccttgggggtattttgacttcaacagattccactgccacttttcaccacgtgactggcaaagactcatcaacaacaactggggattccgacccaagagactcaacttcaagctctttaacattcaagtcaaagaggtcacgcagaatgacggtacgacgacgattgccaataaccttaccagcacggttcaggtgtttactgactcggagtaccagctcccgtacgtcctcggctcggcgcatcaaggatgcctcccgccgttcccagcagacgtcttcatggtgccacagtatggatacctcaccctgaacaacgggagtcaggcagtaggacgctcttcattttactgcctggagtactttccttctcagatgctgcgtaccggaaacaactttaccttcagctacacttttgaggacgttcctttccacagcagctacgctcacagccagagtctggaccgtctcatgaatcctctcatcgaccagtacctgtattacttgagcacaacaaacactccaagtggaaccaccacgcagtcaaggctccagttttctcaggccggagcgagtgacattcgggaccagtctaggaactggcttcctggaccctgttaccgccagcagcgagtatcaaagacatctgcggataacaacaacagtgaatactcgtggactggagctaccaagtaccacctcaatggcagagactctctggtgaatccgggcccggccatggcaagccacaaggacaatgaagaaaagttttttcctcagagcggggttctcatctttgggaagcaaggctcagagaaaacaaatgtggacattgaaaaggtcatgattacagacgaagaggaaatcaggacaaccaatcccgtggctacggagcagtatggttctgtatctaccaacctccagagaggcaacagacaagcagctaccgcagatgtcaacacacaaggcgttcttccaggcatggtctggcaggacagagatgtgtaccttcaggggcccatctgggcaaagattccacacacggacggacattttcacccctctcccctcatgggtggattcggacttaaacaccctcctccacagattctcatcaagaacaccccggtacctgcgaatccttcgaccaccttcagtgcggcaaagtttgcttccttcatcacacagtactccacgggacaggtcagcgtggagatcgagtgggagctgcagaaggaaaacagcaaacgctggaatcccgaaattcagtacacttccaactacaacaagtctgttaatgtggactttactgtggacactaatggcgtgtattcagagcctcgccccattggcaccagatacctgactcgtaatctgtaa

SEQ ID NO: 275 - protein, 735 aa, Adeno-associated virus
MAADGYLPDWLEDTLSEGIRQWWKLKPGPPPPKPAERHRDDSRGLVLPGYKYLGPFNGLDKGEPVNEADAAALEHDKAYDRQLDSGDNPYLKYNHADAEFQERLKEDTSFGGNLGRAVFQAKKRVLEPLGLVGEPVKTAPGKKRPVEHSPVEPDSSSGTGKAGQQPARKRLNFGQTGDADSVPDPQPLGQPPAAPSGLGTNTMATGSGAPMADNNEGADGVGNSSGNWHCDSTWMGDRVITTSTRTWALPTYNNHLYKQISSQSGASNDSHYFGYSTPWGYFDFNRFHCHFSPRDWQRLINNNWGFRPKRLNFKLFNIQVKEVTQNDGTTTIANNLTSTVQVFTDSEYQLPYVLGSAHQGCLPPFPADVFMVPQYGYLTLNNGSQAVGRSSFYCLEYFPSQMLRTGNNFTFSYTFEDVPFHSSYAHSQSLDRLMNPLIDQYLYYLSTTNTPSGTTTQSRLQFSQAGASDIRDQSRNWLPGPCYRQQRVSKTSADNNNSEYSWTGATKYHLNGRDSLVNPGPAMASHKDNEEKFFPQSGVLIFGKQGSEKTNVDIEKVMITDEEEIRTTNPVATEQYGSVSTNLQRGNRQAATADVNTQGVLPGMVWQDRDVYLQGPIWAKIPHTDGHFHPSPLMGGFGLKHPPPQILIKNTPVPANPSTTFSAAKFASFITQYSTGQVSVEIEWELQKENSKRWNPEIQYTSNYNKSVNVDFTVDTNGVYSEPRPIGTRYLTRNL

SEQ ID NO: 276 - protein, 737 aa, Adeno-associated virus
RMAADGYLPDWLEDNLSEGIREWWDLKPGAPKPKANQQKQDDGRGLVLPGYKYLGPFNGLDKGEPVNAADAAALEHDKAYDQQLKAGDNPYLRYNHADAEFQERLQEDTSFGGNLGRAVFQAKKRVLEPLGLVEEGAKTAPGKKRPVEQSPQEPDSSSGIGKTGQQPAKKRLNFGQTGDSESVPDPQPLGEPPATPAAVGPTTMASGGGAPMADNNEGADGVGNASGNWHCDSTWLGDRVITTSTRTWALPTYNNHLYKQISSTSTGASNDNHYFGYGTPWGYFDFNRFHCHFSPRDWQRLINNNWGFRPKRLNFKLFNIQVEEVTTNDGVTTIANNLTSTVQVFSDSEYQLPYVLGSAHQGCLPPFPADVFMIPQYGYLTLNNGSQAVGRSSFYCLEYFPSQMLRTGNNFTFSYTFEEVPFHSSYAHSQSLDRLMNPLIDQYLYYLNRTQNQSGSAQNKDLLFSRGSPAGMSVQPKNWLPGPCYRQQRVSKTKTDNNNSNFTWTGASKYNLNGRESIINPGTAVASHKDDEDKFFPMSGVMIFGKESAGASSTALDNVMITDEEEIKATNPVATERFGTVAVNFQSSSTDPATGDVHAMGALPGMVWQDRDVYLQGPIWAKIPHTDGHFHPSPLMGGFGLKNPPPQILIKNTPVPANPPAEFSATKFASFITQYSTGQVSVEIEWELQKENSKRWNPEVQYTSNYAKSANVDFTVDNNGLYTEPRPIGTRYLTRPL

SEQ ID NO: 277 - protein, 736 aa, Adeno-associated virus
MAADGYLPDWLEDNLSEGIREWWDLKPGAPKPKANQQKQDDGRGLVLPGYKYLGPFNGLDKGEPVNAADAAALEHDKAYDQQLKAGDNPYLRYNHADAEFQERLQEDTSFGGNLGRAVFQAKKRVLEPLGLVEEGAKTAPGKKRPVEQSPQEPDSSSGIGKTGQQPAKKRLNFGQTGDSESVPDPQPLGEPPATPAAVGPTTMASGGGAPMADNNEGADGVGNASGNWHCDSTWLGDRVITTSTRTWALPTYNNHLYKQISSTSTGASNDNHYFGYGTPWGYFDFNRFHCHFSPRDWQRLINNNWGFRPKRLNFKLFNIQVEEVTTNDGVTTIANNLTSTVQVFSDSEYQLPYVLGSAHQGCLPPFPADVFMIPQYGYLTLNNGSQAVGRSSFYCLEYFPSQMLRTGNNFTFSYTFEEVPFHSSYAHSQSLDRLMNPLIDQYLYYLNRTQNQSGSAQNKDLLFSRGSPAGMSVQPKNWLPGPCYRQQRVSKTKTDNNNSNFTWTGASKYNLNGRESIINPGTAVASHKDDEDKFFPMSGVMIFGKESAGASSTALDNVMITDEEEIKATNPVATERFGTVAVNFQSSSTDPATGDVHAMGALPGMVWQDRDVYLQGPIWAKIPHTDGHFHPSPLMGGFGLKNPPPQILIKNTPVPANPPAEFSATKFASFITQYSTGQVSVEIEWELQKENSKRWNPEVQYTSNYAKSANVDFTVDNNGLYTEPRPIGTRYLTRPL

SEQ ID NO: 278 - DNA, 2211 bp, Adeno-associated virus
atggctgccgatggttatcttccagattggctcgaggacaacctctctgagggcattcgcgagtggtgggacttgaaacctggagccccgaagcccaaagccaaccagcaaaagcaggacgacggccggggtctggtgcttcctggctacaagtacctcggacccttcaacggactcgacaagggggagcccgtcaacgcggcggacgcagcggccctcgagcacgacaaggcctacgaccagcagctcaaagcgggtgacaatccgtacctgcggtataaccacgccgacgccgagtttcaggagcgtctgcaagaagatacgtcttttgggggcaacctcgggcgagcagtcttccaggccaagaagcgggttctcgaacctctcggtctggttgaggaaggcgctaagacggctcctggaaagaaacgtccggtagagcagtcgccacaagagccagactcctcctcgggcatcggcaagacaggccagcagcccgctaaaaagagactcaattttggccagactggcgactcagagtcagtccccgatccacaacctctcggagaacctccagcaacccccgctgctgtgggacctactacaatggcttcaggcggtggcgcaccaatggcagacaataacgaaggcgccgacggagtgggtaatgcctcaggaaattggcattgcgattccacatggctgggcgacagagtcatcaccaccagcacccgcacctgggccttgcccacctacaataaccacctctacaagcaaatctccagtacttcaacgggggccagcaacgacaaccactacttcggctacggcaccccctgggggtattttgatttcaacagattccactgccacttttcaccacgtgactggcagcgactcatcaacaacaattggggattccggcccaagagactcaacttcaaactcttcaacatccaagtcgaggaggtcacgacgaatgatggcgtcacaaccatcgctaataaccttaccagcacggttcaagtcttctcggactcggagtaccagcttccgtacgtcctcggctctgcgcaccagggctgcctccctccgttcccggcggacgtgttcatgattccgcaatacggctacctgacgctcaacaatggcagccaagccgtgggacgttcatccttttactgcctggaatatttcccttctcagatgctgagaacgggcaacaactttaccttcagctacacctttgaggaagtgcctttccacagcagctacgcgcacagccagagcctggaccggctgatgaatcctctcatcgaccaatacctgtattacctgaacagaacacaaaatcagtccggaagtgcccaaaacaaggacttgctgtttagccgtgggtctccagctggcatgtctgttcagcccaaaaactggctacctggaccctgttatcggcagcagcgcgtttctaaaacaaaaacagacaacaacaacagcaattttacctggactggtgcttcaaaatataacctcaatgggcgtgaatccatcatcaaccctggcaccgctgtggcctcacacaaagacgacgaagacaagttctttcccatgagcggtgtcatgatttttggaaaagagagcgccggagcttcaagcactgcattggacaatgtcatgattacagacgaagaggaaattaaagccactaaccctgtggccaccgaaagatttgggaccgtggcagtcaatttccagagcagcagcacagaccctgcgaccggagatgtgcatgctatgggagcattacctggcatggtgtggcaagatagagacgtgtacctgcagggtcccatttgggccaaaattcctcacacagatggacactttcacccgtctcctcttatgggcggctttggactcaagaacccgcctcctcagatcctcatcaaaaacacgcctgttcctgcgaatcctccggcggagttttcagctacaaagtttgcttcattcatcacccaatactccacaggacaagtgagtgtggaaattgaatgggagctgcagaaagaaaacagcaagcgctggaatcccgaagtgcagtacacatccaattatgcaaaatctgccaacgttgattttactgtggacaacaatggactttatactgagcctcgccccattggcacccgttaccttacccgtcccctgtaa

SEQ ID NO: 279 - protein, 737 aa, Adeno-associated virus
RMAADGYLPDWLEDNLSEGIREWWDLKPGAPKPKANQQKQDDGRGLVLPGYKYLGPFNGLDKGEPVNAADAAALEHDKAYDQQLKAGDNPYLRYNHADAEFQERLQEDTSFGGNLGRAVFQAKKRVLEPLGLVEEGAKTAPGKKRPVEQSPQEPDSSSGIGKTGQQPAKKRLNFGQTGDSESVPDPQPLGEPPATPAAVGPTTMASGGGAPMADNNEGADGVGNASGNWHCDSTWLGDRVITTSTRTWALPTYNNHLYKQISSTSTGASNDNHYFGYSTPWGYFDFNRFHCHFSPRDWQRLINNNWGFRPKRLNFKLFNIQVEEVTTNDGVTTIANNLTSTVQVFSDSEYQLPYVLGSAHQGCLPPFPADVFMIPQYGYLTLNNGSQAVGRSSFYCLEYFPSQMLRTGNNFTFSYTFEEVPFHSSYAHSQSLDRLMNPLIDQYLYYLNRTQNQSGSAQNKDLLFSRGSPAGMSVQPKNWLPGPCYRQQRVSKTKTDNNNSNFTWTGASKYNLNGRESIINPGTAVASHKDDEDKFFPMSGVMIFGKESAGASSTALDNVMITDEEEIKATNPVATERFGTVAVNFQSSSTDPATGDVHAMGALPGMVWQDRDVYLQGPIWAKIPHTDGHFHPSPLMGGFGLKNPPPQILIKNTPVPANPPAEFSATKFASFITQYSTGQVSVEIEWELQKENSKRWNPEVQYTSNYAKSANVDFTVDNNGLYTEPRPIGTRYLTRPL

SEQ ID NO: 280 - protein, 737 aa, Adeno-associated virus
RMAADGYLPDWLEDNLSEGIREWWDLKPGAPKPKANQQKQDDGRGLVLPGYKYLGPFNGLDKGEPVNAADAAALEHDKAYDQQLKAGDNPYLRYNHADAEFQERLQEDTSFGGNLGRAVFQAKKRVLEPLGLVEEGAKTAPGKKRPVEQSPQEPDSSSGIGKTGQQPAKKRLNFGQTGDSESVPDPQPLGEPPATPAAVGPTTMASGGGAPMADNNEGADGVGNASGNWHCDSTWLGDRVITTSTRTWALPTYNNHLYKQISSTSTGASNDNHYFGYSTPWGYFDFNRFHCHFSPRDWQRLINNNWGFRPKRLNFKLFNIQVKEVTTNDGVTTIANNLTSTVQVFSDSEYQLPYVLGSAHQGCLPPFPADVFMIPQYGYLTLNNGSQAVGRSSFYCLEYFPSQMLRTGNNFTFSYTFEEVPFHSSYAHSQSLDRLMNPLIDQYLYYLNRTQNQSGSAQNKDLLFSRGSPAGMSVQPKNWLPGPCYRQQRVSKTKTDNNNSNFTWTGASKYNLNGRESIINPGTAVASHKDDEDKFFPMSGVMIFGKESAGASSTALDNVMITDEEEIKATNPVATERFGTVAVNFQSSSTDPATGDVHAMGALPGMVWQDRDVYLQGPIWAKIPHTDGHFHPSPLMGGFGLKNPPPQILIKNTPVPANPPAEFSATKFASFITQYSTGQVSVEIEWELQKENSKRWNPEVQYTSNYAKSANVDFTVDNNGLYTEPRPIGTRYLTRPL

SEQ ID NO: 281 - protein, 737 aa, Adeno-associated virus
RMAADGYLPDWLEDNLSEGIREWWDLKPGAPKPKANQQKQDDGRGLVLPGYKYLGPFNGLDKGEPVNAADAAALEHDKAYDQQLKAGDNPYLRYNHADAEFQERLQEDTSFGGNLGRAVFQAKKRVLEPLGLVEEGAKTAPGKKRPVEQSPQEPDSSSGIGKTGQQPAKKRLNFGQTGDSESVPDPQPLGEPPATPAAVGPTTMASGGGAPMADNNEGADGVGNASGNWHCDSTWLGDRVITTSTRTWALPTYNNHLYKQISSTSTGASNDNHYFGYSTPWGYFDFNRFHCHFSPRDWQRLINNNWGFRPKRLNFKLFNIQVKEVTTNDGVTTIANNLTSTVQVFSDSEYQLPYVLGSAHQGCLPPFPADVFMIPQYGYLTLNNGSQAVGRSSFYCLEYFPSQMLRTGNNFTFSYTFEEVPFHSSYAHSQSLDRLMNPLIDQYLYYLNRTQNQSGSAQNKDLLFSRGSPAGMSVQPKNWLPGPCYRQQRVSKTKTDNNNSNFTWTGASKYNLNGRESIINPGTAVASHKDDEDKFFPMSGVMIFGKESAGANSTALDNVMITDEEEIKATNPVATERFGTVAVNFQSSSTDPATGDVHAMGALPGMVWQDRDVYLQGPIWAKIPHTDGHFHPSPLMGGFGLKNPPPQILIKNTPVPANPPAEFSATKFASFITQYSTGQVSVEIEWELQKENSKRWNPEVQYTSNYAKSANVDFTVDNNGLYTEPRPIGTRYLTRPL

SEQ ID NO: 282 - DNA, 2208 bp, Adeno-associated virus
atggctgccgatggttatcttccagattggctcaaggacactctctctgaaggaataagacagtggtggaagctcaaacctggcccaccaccaccaaagcccgcagagcggcataaggacgacagcgggggtcttgtgcttcctgggtacaagtacctcggacccttcaacggactcgacaagggagagccggtcaacgaggcagacgccgcggccctcgagtacgacaaggcctacgaccggcagctcgacagcggagacaacccgtacctcaagtacaaccacgccgacgcggagtttcaggagcgccttaaagaagatacgtcttttgggggcaacctcggacgagcagtcttccaggcgaaaaagagggttcttgaacctctgggcctggttgaggaacctgttaagacggctccgggaaaaaagaggccggtagagcactctcctgtggagccagactcctcctcgggaacaggaaaagcgggccagcagcctgcgagaaagagattgaattttggtcagactggagacgcagactccgtacctgacccccagcctctcggacagccaccagcagccccctctggtctgggaactaatacgatggctacaggcagtggcgcaccaatggcagacaataacgagggcgccgacggagtgggtaattcctcgggaagttggcattgcgattccacatggatgggcgacagagtcatcaccaccagcacccgaacctgggctctgcccacctacaacaaccatctgtacaagcagatctccagccaatcaggagccagcaacgacaaccactactttggctacagcaccccttgggggtattttgacttcaacagattccactgccacttttcaccacgtgactggcaaagactcatcaacaacaactggggattccggcccaagagactcaacttcaagctctttaacattcaagtcaaggaggtcacgcagaatgacggtacgacgacgattgccaataaccttaccagcacggttcaggtgtttactgactcggagtaccagctcccgtacgtccccggctcggcgcatcaaggatgcctcccgccgttcccagcagacgtcttcatggtgccacagtatggatacctcaccctgaacaacgggagtcaggcagtaggacgctcttcattttactgcctggagtactttccttctcagatgcttcgtaccggaaacaactttaccttcagctacacctttgaggatgttcctttccacagcagctacgctcacagccagagtttggaccgtctcatgaatcctctcatcgaccagtacctgtattacttgagcagaacaaacactccaagcggaaccaccacgcagtccaggcttcagttttctcaggccggagcaagtgacattcgggaccagtctaggaactggcttcctggaccctgttaccgccagcagcgagtatcaaagacagctgcggacaacaacaacagtgaatactcgtggactggagctaccaagtaccacctcaatggcagagactctctggtgaatccgggcccggccatggccagccacaaggacgatgaagaaaagttttttcctcaaagcggggttctcatctttgggaagcaaggctcagagaaaacaaatgtggacattgaaaaggtcatgattacagacgaagaggaaatcagaaccaccaatcccgtggccacggagcagtatggttctgtatctaccaacctccagagcggcaacacacaagcagctactgcagatgtcaacacacaaggcgttcttccaggcatggtctggcaggacagagacgtgcacctgcaggggcctatctgggcaaagattccacacacggacggacattttcacccctctcccctcatgggcggatttggacttaaacaccctcctccacagattctcatcaagaacaccccggtacctgcaaatccttcgaccaccttcagtgcggcaaagtttgcttccttcatcacacagtattccacagggcaggtcagcgtggagatcgagtgggagctgcagaaggagaacagcaaacgctggaaccccgagatccagtacacttccaactacaacaaatctgttaatgtggactttactgtggacactaatggtgtgtattcagagcctcgccccattggcaccagatacctgactcgtaatctgtaa

SEQ ID NO: 283 - protein, 735 aa, Adeno-associated virus
MAADGYLPDWLKDTLSEGIRQWWKLKPGPPPPKPAERHKDDSGGLVLPGYKYLGPFNGLDKGEPVNEADAAALEYDKAYDRQLDSGDNPYLKYNHADAEFQERLKEDTSFGGNLGRAVFQAKKRVLEPLGLVEEPVKTAPGKKRPVEHSPVEPDSSSGTGKAGQQPARKRLNFGQTGDADSVPDPQPLGQPPAAPSGLGTNTMATGSGAPMADNNEGADGVGNSSGSWHCDSTWMGDRVITTSTRTWALPTYNNHLYKQISSQSGASNDNHYFGYSTPWGYFDFNRFHCHFSPRDWQRLINNNWGFRPKRLNFKLFNIQVKEVTQNDGTTTIANNLTSTVQVFTDSEYQLPYVPGSAHQGCLPPFPADVFMVPQYGYLTLNNGSQAVGRSSFYCLEYFPSQMLRTGNNFTFSYTFEDVPFHSSYAHSQSLDRLMNPLIDQYLYYLSRTNTPSGTTTQSRLQFSQAGASDIRDQSRNWLPGPCYRQQRVSKTAADNNNSEYSWTGATKYHLNGRDSLVNPGPAMASHKDDEEKFFPQSGVLIFGKQGSEKTNVDIEKVMITDEEEIRTTNPVATEQYGSVSTNLQSGNTQAATADVNTQGVLPGMVWQDRDVHLQGPIWAKIPHTDGHFHPSPLMGGFGLKHPPPQILIKNTPVPANPSTTFSAAKFASFITQYSTGQVSVEIEWELQKENSKRWNPEIQYTSNYNKSVNVDFTVDTNGVYSEPRPIGTRYLTRNL

SEQ ID NO: 284 - DNA, 2208 bp, Adeno-associated virus
atggctgccgatggttatcttccagattggctcgaggacactctctctgaaggaataagacagtggtggaagctcaaacctggcccaccaccaccaaagcccgcagagcggcataaggacgacagcaggggtcttgtgcttcctgggtacaagtacctcggacccttcaacggactcgacaagggggagccggtcaacgaggcagacgccgcggccctcgagcacgacaaggcctacgaccggcagctcgacagcggagacaacccgtacctcaagtacaaccacgccgacgcagagtttcaggagcgccttaaagaagatacgtcttttgggggcaacctcggacgagcagtcttccaggcgaaaaagagggttcttgaacctctgggcctggttgaggaacctgttaagacggctccgggaaaaaagaggccggtagagcactctcctgtggagccagactcctcctcgggaaccggaaaagcgggccagcagcctgcaagaaaaagattaaattttggtcagactggagacgcagactccgtacctgacccccagcctctcggacagccaccagcagccccctctggtctgggatctactacaatggctacaggcagtggcgcaccaatggcagacaataacgagggtgccgatggagtgggtaattcctcaggaaattggcattgcgattcccaatggctgggcgacagagtcatcaccaccagcacccgaacctgggccctgcccacatacaacaaccacctctacaagcaaatctccagccaatcaggagccagcaacgacaaccactactttggctacagcaccccctgggggtattttgacttcaacagattccactgccacttttcaccacgtgactggcaaagactcatcaacaacaactggggattccggcccaaaagactcaacttcaagctctttaatattcaagtcaaagaggtcacgcagaatgacggtacgacgacgattgccaataaccttaccagcacggttcaggtgtttactgactcggagtaccagctcccgtacgtcctgggctcggcgcatcaaggatgcctcccgccgtttccagcggacgtcttcatggtcccacagtatggatacctcaccctgaacaacgggagtcaggcggtaggacgctcttccttttactgcctggagtactttccttctcagatgctgcgtactggaaacaactttcagttcagctacacttttgaagacgtgcctttccacagcagctacgctcacagccagagtctggatcggctgatgaatcctctgatcgaccagtacctgtattatctgaacaagacacaaacaaatagtggaactcttcagcagtctcggctactgtttagccaagctggaccaaccaacatgtctcttcaagctaaaaactggctgcctggaccttgctacagacagcagcgtctgtcaaaacaggcaaacgacaacaacaacagcaactttccctggactgcagctacaaagtatcatctaaatggccgggactcgttggttaatccaggaccagctatggccagtcgcaaggatgacgaagaaaagtttttccccatgcatggaaccctgatatttggtaaacaaggaacaaatgccaacgacgcggatttggaaaatgtcatgattacagatgaagaagaaatcagggccaccaatcccgtggctacggagcagtacgggactgtgtcaaataatttgcaaaactcaaacactggtccaactactggaactgtcaatcaccaaggagcgttacctggtatggtgtggcaggatcgagacgtgtacctgcagggacccatttgggccaagattcctcacaccgatggacactttcatccttctccactgatgggaggttttggactcaaacacccgcctcctcagatcatgatcaaaaacactcccgttccagccaatcctcccacaaacttcagttctgccaagtttgcttctttcatcacacagtattccacgggacaggtcagcgtggagatcgagtgggagctgcagaaggagaacagcaaacgctggaatcccgaaattcagtacacttccaactacaacaagtctgttaatgtggactttactgtggacactaatggtgtgtattcagagcctcgccccattggcaccagatacctgactcgtaatctgtaa

SEQ ID NO: 285 - protein, 735 aa, Adeno-associated virus
MAADGYLPDWLEDTLSEGIRQWWKLKPGPPPPKPAERHKDDSRGLVLPGYKYLGPFNGLDKGEPVNEADAAALEHDKAYDRQLDSGDNPYLKYNHADAEFQERLKEDTSFGGNLGRAVFQAKKRVLEPLGLVEEPVKTAPGKKRPVEHSPVEPDSSSGTGKAGQQPARKRLNFGQTGDADSVPDPQPLGQPPAAPSGLGSTTMATGSGAPMADNNEGADGVGNSSGNWHCDSQWLGDRVITTSTRTWALPTYNNHLYKQISSQSGASNDNHYFGYSTPWGYFDFNRFHCHFSPRDWQRLINNNWGFRPKRLNFKLFNIQVKEVTQNDGTTTIANNLTSTVQVFTDSEYQLPYVLGSAHQGCLPPFPADVFMVPQYGYLTLNNGSQAVGRSSFYCLEYFPSQMLRTGNNFQFSYTFEDVPFHSSYAHSQSLDRLMNPLIDQYLYYLNKTQTNSGTLQQSRLLFSQAGPTNMSLQAKNWLPGPCYRQQRLSKQANDNNNSNFPWTAATKYHLNGRDSLVNPGPAMASRKDDEEKFFPMHGTLIFGKQGTNANDADLENVMITDEEEIRATNPVATEQYGTVSNNLQNSNTGPTTGTVNHQGALPGMVWQDRDVYLQGPIWAKIPHTDGHFHPSPLMGGFGLKHPPPQIMIKNTPVPANPPTNFSSAKFASFITQYSTGQVSVEIEWELQKENSKRWNPEIQYTSNYNKSVNVDFTVDTNGVYSEPRPIGTRYLTRNL

SEQ ID NO: 286 - DNA, 2208 bp, Adeno-associated virus
atggctgccgatggttatcttccagattggctcgaggacactctctctgaaggaataagacagtggtggaagctcaaacctggcccaccaccaccaaagcccgcagagcggcataaggacgacagcaggggtcttgtgcttcctgggtacaagtacctcggacccttcaacggactcgacaagggagagccggtcaacgaggcagacgccgcggccctcgagcacgacaaagcctacgaccggcagctcgacagcggagacaacccgtacctcaagtacaaccacgccgacgcggagtttcaggagcgccttaaagaagatacgtcttttgggggcaacctcggacgagcagtcttccaggcgaaaaagagggttcttgaacctctgggcctggttggggaacctgtcaagacggctccaggaaaaaagaggccggtagagcactctcctgtggagccagactcctcctcgggaaccggaaaggcgggccagcagcctgcaagaaaaagattgaattttggtcagactggagacgcagactcagtacctgacccccagcctctcggacagccaccagcagccccctctggtctgggaactaatacgatggctacaggcagtggcgcaccaatggcagacaataacgagggcgccgacggagtgggtaattcctcgggaaattggcattgcgattccacatggatgggcgacagagtcatcaccaccagcacccgaacctgggccctgcccacctacaacaaccacctctacaaacaaatttccagccaatcaggagcctcgaacgacaatcactactttggctacagcaccccttgggggtattttgacttcaacagattccactgccacttttcaccacgtgactggcaaagactcatcaacaacaactggggattccgacccaagagactcaacttcaagctctttaacattcaagtcaaagaggtcacgcagaatgacggtacgacgacgattgccaataaccttaccagcacggttcaggtgtttactgactcggagtaccagctcccgtacgtcctcggctcggcgcatcaaggatgcctcccgccgttcccagcagacgtcttcatggtgccacagtatggatacctcaccctgaacaacgggagtcaggcagtaggacgctcttcattttactgcctggagtactttccttctcagatgctgcgtaccggaaacaactttaccttcagctacacttttgaggacgttcctttccacagcggctacgctcacagccagagtctggaccgtctcatgaatcctctcatcgaccagtacctgtattacttgagcacaacaaacactccaagtggaaccaccacgcagtcaaggcttcagttttctcaggccggagcgagtgacattcgggaccagtctaggaactggcttcctggaccctgttaccgccagcagcgagtatcaaagacatctgcggataacaacaacagtgaatactcgtggactggagctaccaagtaccacctcaatggcagagactctctggtgaatccgggcccggccatggcaagccacaaggacaatgaagaaaagttttttcctcagagcggggttctcatctttgggaagcaaggctcagagaaaacaaatgtggacattgaaaaggtcatgattacagacgaagaggaaatcaggacaaccaatcccgtggctacggagcagtacggttctgtatctaccaacctccagagaggcaacagacaagcagctaccgcagatgtcaacacacaaggcgttcttccaggcatggtctggcaggacagagatgtgtaccttcaggggcccatctgggcaaagattccacacacggacggacattttcacccctctcccctcatgggtggattcggacttaaacaccctcctccacagattctcatcaagaacaccccggtacctgcgaatccttcgaccaccttcagtgcggcaaagtttgcttccttcatcacacagtactccacgggacaggtcagcgtggagatcgagtgggagctgcagaaggaaaacagcaaacgctggaatcccgaaattcagtacacttccaactacaacaagtctgttaatgtggactttactgtggacactaatggcgtgtattcagagcctcgccccattggcaccagatacctgactcgtaatctgtaa

SEQ ID NO: 287 - protein, 735 aa, Adeno-associated virus
MAADGYLPDWLEDTLSEGIRQWWKLKPGPPPPKPAERHKDDSRGLVLPGYKYLGPFNGLDKGEPVNEADAAALEHDKAYDRQLDSGDNPYLKYNHADAEFQERLKEDTSFGGNLGRAVFQAKKRVLEPLGLVGEPVKTAPGKKRPVEHSPVEPDSSSGTGKAGQQPARKRLNFGQTGDADSVPDPQPLGQPPAAPSGLGTNTMATGSGAPMADNNEGADGVGNSSGNWHCDSTWMGDRVITTSTRTWALPTYNNHLYKQISSQSGASNDNHYFGYSTPWGYFDFNRFHCHFSPRDWQRLINNNWGFRPKRLNFKLFNIQVKEVTQNDGTTTIANNLTSTVQVFTDSEYQLPYVLGSAHQGCLPPFPADVFMVPQYGYLTLNNGSQAVGRSSFYCLEYFPSQMLRTGNNFTFSYTFEDVPFHSGYAHSQSLDRLMNPLIDQYLYYLSTTNTPSGTTTQSRLQFSQAGASDIRDQSRNWLPGPCYRQQRVSKTSADNNNSEYSWTGATKYHLNGRDSLVNPGPAMASHKDNEEKFFPQSGVLIFGKQGSEKTNVDIEKVMITDEEEIRTTNPVATEQYGSVSTNLQRGNRQAATADVNTQGVLPGMVWQDRDVYLQGPIWAKIPHTDGHFHPSPLMGGFGLKHPPPQILIKNTPVPANPSTTFSAAKFASFITQYSTGQVSVEIEWELQKENSKRWNPEIQYTSNYNKSVNVDFTVDTNGVYSEPRPIGTRYLTRNL

SEQ ID NO: 288 - DNA, 2208 bp, Adeno-associated virus
atggctgccgatggttatcttccagattggctcgaggacactctctctgaaggaataagacagtggtggaagctcaaacctggcccaccaccaccaaagcccgcagagcggcataaggacgacagcaggggtcttgtgcttcctgggtacaagtacctcggacccttcaacggactcgacaagggagagccggtcaacgaggcagacgccgcggccctcgagcacgacaaagcctacgaccggcagctcgacagcggagacaacccgtacctcaagtacaaccacgccgacgcggagtttcaggagcgccttaaagaagatacgtcttttgggggcaacctcggacgagcagtcttccaggcgaaaaagagggttcttgaacctctgggcctggttggggaacctgttaagacggctccgggaaaaaagaggccggtagagcactctcctgtggagccagactcctcctcgggaaccggaaaggcgggccagcagcctgcaagaaaaagattgaattttggtcagactggagacgcagactcagtacctgacccccagcctctcggacagccaccagcagccccctctggtctgggaactaatacgatggctacaggcagtggcgcaccaatggcagacaataacgagggcgccgacggagtgggtaattcctcgggaaatcggcattgcgattccacatggatgggcgacagagtcatcaccaccagcacccgaacctgggccctgcccacctacaacaaccacctctacagacaaatttccagccaatcaggagcctcgaacgacaatcactactttggctacagcaccccttgggggtattttgacttcaacagattccactgccacttttcaccacgtgactggcaaagactcatcaacaacaactggggattccgacccaagagactcaacttcaagctctttaacattcaagtcaaagaggtcacgcagaatgacggtacgacgacgattgccaataaccttaccagcacggttcaggtgtttactgactcggagtaccagctcccgtacgtcctcggctcggcgcatcaaggatgcctcccgccgttcccagcagacgtcttcatggtgccacagtatggatacctcaccctgagcaacgggagtcaggcagtaggacgctcttcattttactgcccggagtactttccttctcagatgctgcgtaccggaaacaactttaccttcagctacacttttgaggacgttcctttccacagcagctacgctcacagccagagtctggaccgtctcatgaatcctctcatcgaccagtacctgtattacttgagcacaacaaacactccaagtggaaccaccacgcagtcaaggcttcagttttctcaggccggagcgagtgacattcgggaccagtctaggaactggcttcctggaccctgttaccgccagcagcgagtatcaaagacatctgcggataacaacaacagtgaatactcgtggactggagctaccaagtaccacctcaatggcagagactctctggtgaatccgggcccggccatggcaagccacaaggacaatgaagaaaagttttttcctcagagcggggttctcatctttgggaagcaaggctcagagaaaacaaatgtggacattgaaaaggtcatgattacagacgaagaggaaatcaggacaaccaatcccgtggctacggagcagtatggttctgtatctaccaacctccagagaggcaacagacaagcagctaccgcagatgtcaacacacaaggcgttcttccaggcatggtctggcaggacagagatgtgtaccttcaggggcccatctgggcaaagattccacacacggacggacattttcacccctctcccctcatgggtggattcggacctaaacaccctcctccacagattctcatcaagaacaccccggtacctgcgaatccttcgaccaccttcagtgcggcaaagtttgcttccttcatcacacagtactccacgggacaggtcagcgtggagatcgagtgggagctgcagaaggaaaacagcaaacgctggaatcccgaaattcagtacacttccaactacaacaagtctgttaatgtggactttactgtggacactaatggcgtgtattcagagcctcgccccattggcaccagatacctgactcgtaatttgtaa

SEQ ID NO: 289 - protein, 735 aa, Adeno-associated virus
MAADGYLPDWLEDTLSEGIRQWWKLKPGPPPPKPAERHKDDSRGLVLPGYKYLGPFNGLDKGEPVNEADAAALEHDKAYDRQLDSGDNPYLKYNHADAEFQERLKEDTSFGGNLGRAVFQAKKRVLEPLGLVGEPVKTAPGKKRPVEHSPVEPDSSSGTGKAGQQPARKRLNFGQTGDADSVPDPQPLGQPPAAPSGLGTNTMATGSGAPMADNNEGADGVGNSSGNRHCDSTWMGDRVITTSTRTWALPTYNNHLYRQISSQSGASNDNHYFGYSTPWGYFDFNRFHCHFSPRDWQRLINNNWGFRPKRLNFKLFNIQVKEVTQNDGTTTIANNLTSTVQVFTDSEYQLPYVLGSAHQGCLPPFPADVFMVPQYGYLTLSNGSQAVGRSSFYCPEYFPSQMLRTGNNFTFSYTFEDVPFHSSYAHSQSLDRLMNPLIDQYLYYLSTTNTPSGTTTQSRLQFSQAGASDIRDQSRNWLPGPCYRQQRVSKTSADNNNSEYSWTGATKYHLNGRDSLVNPGPAMASHKDNEEKFFPQSGVLIFGKQGSEKTNVDIEKVMITDEEEIRTTNPVATEQYGSVSTNLQRGNRQAATADVNTQGVLPGMVWQDRDVYLQGPIWAKIPHTDGHFHPSPLMGGFGPKHPPPQILIKNTPVPANPSTTFSAAKFASFITQYSTGQVSVEIEWELQKENSKRWNPEIQYTSNYNKSVNVDFTVDTNGVYSEPRPIGTRYLTRNL

SEQ ID NO: 290 - DNA, 2205 bp, Adeno-associated virus
atggctgccgatggttatcttccagattggctcgaggacactctctctgaaggaataagacagtggtggaagctcaaacctggcccaccaccaccaaagcccgcagagcggcataaggacgacagcaggggtcttgtgcttcctgggtacaagtacctcggacccttcaacggactcgacaagggagagccggtcaacgaggcagacgccgcggccctcgagcacgacaaggcctacgaccggcagctcgacagcggagacaacccgtacctcaagtacaaccacgccgacgcggagtttcaggagcgtcttaaagaagatacgtcttttgggggcaacctcggacgagcagtcttccaggcgaaaaagagggttcttgaacctctgggcctggttgaggaacctgttaagacggctccgggaaaaaagaggccggtagagcactctcctgcggagccagactcctcctcgggaaccggaaaagcgggccagcagcctgcaagaaaaagactgaatttcggtcagactggagacgcagactccgtacctgacccccagcctctcagacagccaccagcagcccccacaagtttgggatctactacaatggctacaggcagtggcgcaccaatggcagacaataacgagggtgccgatggagtgggtaattcctcaggaaattggcattgcgattcccaatggctgggcgacagagtcatcaccaccagcacccgaacctgggccctgcccacctacaacaaccacctttacaagcaaatctccagccaatcaggagcctcaaacgacaaccactactttggctacagcaccccctgggggtattttgacttcaacagattccactgccacttttcaccacgtgactggcaaagactcatcaacaacaactggggattccgacccaagagactcaacttcaagctctttaacattcaagtcaaagaggtcacgcagaatgacggtacgacgacgattgccaataaccttaccagcacggttcaggtgtttactgactcggagtaccagctcccgtacgtcctcggctcggcgcatcaaggatgcctcccgccgtttccagcggacgtcttcatggtcccacagtatggatacctcaccctgaacaacgggagtcaggcggtaggacgctcttccttttactgcctggagtactttccttctcagatgctgcgtactggaaacaactttcagttcagctacacttttgaagacgtgcctttccacagcagctacgctcacagccagagtttggatcggctgatgaatcctctgatcgaccagtacctgtattatctaaacagaacacaaacagctagtggaactcagcagtctcggctactgtttagccaagctggacccacaagcatgtctcttcaagctaaaaactggctgcctggaccgtgttatcgccagcagcgtttgtcaaagcaggcaaacgacaacaacaacagcaactttccctggactggagctaccaagtactacctcaatggcagagactctttggtgaacccgggcccggccatggccagccacaaggacgatgaagaaaagtttttccccatgcatggaaccctaatatttggtaaagaaggaacaaatgctaccaacgcggaattggaaaatgtcatgattacagatgaagaggaaatcaggaccaccaatcccgtggctacagagcagtacggatatgtgtcaaataatttgcaaaactcaaatactgctgcaagtactgaaactgtgaatcaccaaggagcattacctggtatggtgtggcaggatcgagacgtgtacctgcagggacccatttgggccaagattcctcacaccgatggacactttcatccttctccactgatgggaggttttggactcaaacacccgcctcctcagattatgatcaaaaacactcccgttccagccaatcctcccacaaacttcagttctgccaagtttgcttccttcatcacacagtattccacgggacaggtcagcgtggagatcgagtgggagctgcagaaggagaacagcaaacgctggaatcccgaaattcagtacacttccaactacaacaaatctgttaatgtggactttactgtggacactaatggtgtgtattcagagcctcgccccattggcaccagatacctgactcgtaatctgtaa

SEQ ID NO: 291 - protein, 734 aa, Adeno-associated virus
MAADGYLPDWLEDTLSEGIRQWWKLKPGPPPPKPAERHKDDSRGLVLPGYKYLGPFNGLDKGEPVNEADAAALEHDKAYDRQLDSGDNPYLKYNHADAEFQERLKEDTSFGGNLGRAVFQAKKRVLEPLGLVEEPVKTAPGKKRPVEHSPAEPDSSSGTGKAGQQPARKRLNFGQTGDADSVPDPQPLRQPPAAPTSLGSTTMATGSGAPMADNNEGADGVGNSSGNWHCDSQWLGDRVITTSTRTWALPTYNNHLYKQISSQSGASNDNHYFGYSTPWGYFDFNRFHCHFSPRDWQRLINNNWGFRPKRLNFKLFNIQVKEVTQNDGTTTIANNLTSTVQVFTDSEYQLPYVLGSAHQGCLPPFPADVFMVPQYGYLTLNNGSQAVGRSSFYCLEYFPSQMLRTGNNFQFSYTFEDVPFHSSYAHSQSLDRLMNPLIDQYLYYLNRTQTASGTQQSRLLFSQAGPTSMSLQAKNWLPGPCYRQQRLSKQANDNNNSNFPWTGATKYYLNGRDSLVNPGPAMASHKDDEEKFFPMHGTLIFGKEGTNATNAELENVMITDEEEIRTTNPVATEQYGYVSNNLQNSNTAASTETVNHQGALPGMVWQDRDVYLQGPIWAKIPHTDGHFHPSPLMGGFGLKHPPPQIMIKNTPVPANPPTNFSSAKFASFITQYSTGQVSVEIEWELQKENSKRWNPEIQYTSNYNKSVNVDFTVDTNGVYSEPRPIGTRYLTRNL

SEQ ID NO: 292 - DNA, 3160 bp, Adeno-associated virus
acccttcactaaagggactagtcctgcaggtttaaacgaattcgcccttgctgcgtcaactggaccaatgagaactttcccttcaacgactgtgtcgacaagatggtgatttggtgggaggaggggaagatgaccgccaaggtcgtggagtcggccaaagccattctcggaggaagcaaggtgcgcgtggaccagaaatgcaagtcctcggcccagatagatccgactcccgtgatcgtcacctccaacaccaacatgtgcgccgtgattgacgggaactcaacgaccttcgaacaccagcagccgttgcaagaccggatgttcaaatttgaactcacccgccgtctggatcatgactttgggaaggtcaccaagcgggaagtcaaagactttttccggtgggcaaaggatcacgtggttgaggtggagcatgaattctacgtcaaaaagggtggagccaagaaaagacccgcccctagtgacgcagatataagtgagcccaaacgggtgcgcgagtcagttgcgcagccatcgacgtcagacgcggaagcttcgatcaactacgcggacaggtaccaaaacaaatgttctcgtcacgtgggcatgaatctgatgctgtttccctgcagacaatgcgagagaatgaatcaaaattcaaatatctgcttcactcacggacagaaagactgtttagagtgctttcccgtgtcagaatctcaacctgtttctgtcgtcaaaaaggcgtatcagaaactgtgctacattcatcatatcatgggaaaggtgccagacgcttgcactgcctgcgatctggtcaatgtggatttggatgactgcatctctgaacaataaatgatttaaatcaggtatggctgccgatggttatcttccagattggctcgaggacactctctctgaaggaataagacagtggtggaagctcaaacctggcccaccaccaccaaagcccgcagagcggcataaggacgacagcaggggtcttgtgcttcctgggtacaagtacctcggacccttcaacggactcgacaagggagagccggtcaacgaggcagacgccgcggccctcgagcacgacaaggcctacgaccggcagctcgacagcggagacaacccgtacctcaagtacaaccacgccgacgcggagtttcaggagcgtcttaaagaagatacgtcttttgggggcaacctcggacgagcagtcttccaggcgaaaaagagggttcttgaacctctgggcctggttgaggaacctgttaagacggctccgggaaaaaagaggccggtagagcactctcctgcggagccagactcctcctcgggaaccggaaaagcgggccagcagcctgcaagaaaaagactgaatttcggtcagactggagacgcagactccgtacctgacccccagcctctcagacagccaccagcagcccccacaagtttgggatctactacaatggctacaggcagtggcgcaccaatggcagacaataacgagggtgccgatggagtgggtaattcctcaggaaattggcattgcgattcccaatggctgggcgacagagtcatcaccaccagcacccgaacctgggccctgcccacctacaacaaccacctttacaagcaaatctccagccaatcaggagcctcaaacgacaaccactactttggctacagcaccccctgggggtattttgacttcaacagattccactgccacttttcaccacgtgactggcaaagactcatcaacaacaactggggattccgacccaagagactcaacttcaagctctttaacattcaagtcaaagaggtcacgcagaatgacggtacgacgacgattgccaataaccttaccagcacggttcaggtgtttactgactcggagtaccagctcccgtacgtcctcggctcggcgcatcaaggatgcctcccgccgtttccagcggacgtcttcatggtcccacagtatggatacctcaccctgaacaacgggagtcaggcggtaggacgctcttccttttactgcctggagtactttccttctcagatgctgcgtactggaaacaactttcagttcagctacacttttgaagacgtgcctttccacagcagctacgctcacagccagagtttggatcggctgatgaatcctctgatcgaccagtacctgtattatctaaacagaacacaaacagctagtggaactcagcagtctcggctactgtttagccaagctggacccacaagcatgtctcttcaagctaaaaactggctgcctggaccgtgttatcgccagcagcgtttgtcaaagcaggcaaacgacaacaacaacagcaactttccctggactggagctaccaagtactacctcaatggcagagactctttggtgaacccgggcccggccatggccagccacaaggacgatgaagaaaagtttttccccatgcatggaaccctaatatttggtaaagaaggaacaaatgctaccaacgcggaattggaaaatgtcatgattacagatgaagaggaaatcaggaccaccaatcccgtggctacagagcagtacggatatgtgtcaaataatttgcaaaactcaaatactgctgcaagtactgaaactgtgaatcaccaaggagcattacctggtatggtgtggcaggatcgagacgtgtacctgcagggacccatttgggccaagattcctcacaccgatggacactttcatccttctccactgatgggaggttttggactcaaacacccgcctcctcagattatgatcaaaaacactcccgttccagccaatcctcccacaaacttcagttctgccaagtttgcttccttcatcacacagtattccacgggacaggtcagcgtggagatcgagtgggagctgcagaaggagaacagcaaacgctggaatcccgaaattcagtacacttccaactacaacaaatctgttaatgtggactttactgtggacactaatggtgtgtattcagagcctcgccccattggcaccagatacctgactcgtaatctgtaattgcttgttaatcaataaaccgtttaattcgtttcagttgaactttggtctctgcgaagggcgaattcgcggccgctaaatcaatcg

SEQ ID NO: 293 - protein, 734 aa, Adeno-associated virus
MAADGYLPDWLEDTLSEGIRQWWKLKPGPPPPKPAERHKDDSRGLVLPGYKYLGPFNGLDKGEPVNEADAAALEHDKAYDRQLDSGDNPYLKYNHADAEFQERLKEDTSFGGNLGRAVFQAKKRVLEPLGLVEEPVKTAPGKKRPVEHSPAEPDSSSGTGKAGQQPARKRLNFGQTGDADSVPDPQPLGQPPAAPTSLGSTTMATGSGAPMADNNEGADGVGNSSGNWHCDSQWLGDRVITTSTRTWALPTYNNHLYKQISSQSGASNDNHYFGYSTPWGYFDFNRFHCRFSPRDWQRLINNNWGFRPKRLNFKLFNIQVKEVTQNDGTTTIANNLTSTVQVFTDSEYQLPYVLGSAHQGCLPPFPADVFMVPQYGYLTLNNGSQAVGRSSFYCLEYFPSQMLRTGNNFQFSYTFEDVPFHSSYAHSQGLDRLMNPLIDQYLYYLNRTQTASGTQQSRLLFSQAGPTSMSLQAKNWLPGPCYRQQRLSKQANDNNNSNFPWTGATKYHLNGGDSLVNPGPAMASHKDDEEKFFPMHGTLIFGKEGTNATNAELENVMITDEEEIRTTNPVATEQYGYVSNNLQNSNTAASTETVNHQGALPGMVWQDRDVYLRGPIWAKIPHADGHFHPSPLMGGFGLKHPPPQIMIKNTPVPANPPTNFSSAKFASFITQYSTGQVSVEIEWELQKENSKRWNPEIQYTSNYNKSVNVDFTVDTNGVYSEPRPIGTRYLTRNL

SEQ ID NO: 294 - DNA, 3157 bp, Adeno-associated virus
ctcactaagggactagtcctgcaggtttaaacgaattcgcccttgctgcgtcaactggaccaatgagaactttcccttcaacgactgtgtcgacaagatggtgatttggtgggaggaggggaagatgaccgccaaggtcgtggagtcggccaaagccactctcggaggaagcaaggtgcgcgtggaccagaaacgcaagtcctcggcccagatagatccgactcccgtgatcgtcacctccaacaccaacatgtgcgccgtgattgacgggaactcaacgaccttcgaacaccagcagccgttgcaagaccgaatgttcaaatttgaactcacccgccgtctggatcatgacttcgggaaggtcaccaagcaggaagtcaaagactttttccggtgggcaaaggatcacgtggttgaggtggagcatgaattctacgtcaaaaagggtggagccaagaaaagacccgcccctagtgacgcagatataagtgagcccaaacgggtgcgcgagtcagttgcgcagccatcgacgtcagacgcggaagcttcgatcaactacgcggacaggtaccaaaacaaatgttctcgtcacgtgggcatgaatctgatgctgtttccctgcagacaatgcgagagaatgaatcaaaattcaaatatctgcttcactcacggacagaaagactgtttagagtgctttcccgtgtcagaatctcaacctgtttctgtcgtcaaaaaggcgtatcagaaactgtgctacattcatcatatcatgggaaaggtgccagacgcttgcactgcctgcgatctggtcaatgtggatttggatgactgcatctctgaacaataaatgatttaaatcaggtatggctgccgatggttatcttccagattggctcgaggacactctctctgaaggaataagacagtggtggaagctcaaacctggcccaccaccaccaaagcccgcagagcggcataaggacgacagcaggggtcttgtgcttcctgggtacaagtacctcggacccttcaacggactcgacaagggagagccggtcaacgaggcagacgccgcggctctcgagcacgacaaggcctacgaccggcagctcgacagcggagacaacccgtacctcaagtacaaccacgccgacgcggagtttcaggagcgtcttaaagaagatacgtcttttgggggcaacctcggacgagcagtcttccaggcgaaaaagagggttcttgaacctctgggcctggttgaggaacctgttaagacggctccgggaaaaaagaggccggtagagcactctcctgcggagccagactcctcctcgggaaccggaaaagcgggccagcagcctgcaagaaaaagactgaatttcggtcagactggagacgcagactccgtacctgacccccagcctctcggacagccaccagcagcccccacaagtttgggatctactacaatggctacaggcagtggcgcaccaatggcagacaataacgagggtgccgatggagtgggtaattcctcaggaaattggcattgcgattcccaatggctgggcgacagagtcatcaccaccagcacccgaacctgggccctgcccacctacaacaaccacctttacaagcaaatctccagccaatcaggagcctcaaacgacaaccactactttggctacagcaccccctgggggtattttgacttcaacagattccactgccgcttttcaccacgtgactggcaaagactcatcaacaacaactggggattccgacccaagagactcaacttcaagctctttaacattcaagtcaaagaggtcacgcagaatgacggtacgacgacgattgccaataaccttaccagcacggttcaggtgtttactgactcggagtaccagctcccgtacgtcctcggctcggcgcatcaaggatgcctcccgccgtttccagcggacgtcttcatggtcccacagtatggatacctcaccctgaacaacgggagtcaggcggtaggacgctcttccttttactgcctggagtactttccttctcagatgctgcgtactggaaacaactttcagttcagctacacttttgaagacgtgcctttccacagcagctacgctcacagccagggtttggatcggctgatgaatcctctgatcgaccagtacctgtattatctaaacagaacacaaacagctagtggaactcagcagtctcggctactgtttagccaagctggacccacaagcatgtctcttcaagctaaaaactggctgcctggaccgtgttatcgccagcagcgtttgtcaaagcaggcaaacgacaacaacaacagcaactttccctggactggagctaccaagtaccacctcaatggcggagactctttggtgaacccgggcccggccatggccagccacaaggacgatgaagaaaagtttttccccatgcatggaaccctaatatttggtaaagaaggaacaaatgctaccaacgcggaattggaaaatgtcatgattacagatgaagaggaaatcaggaccaccaatcccgtggctacagagcagtacggatatgtgtcaaataatttgcaaaactcaaatactgctgcaagtactgaaactgtgaatcaccaaggagcattacctggtatggtgtggcaggatcgagacgtgtacctgcggggacccatttgggccaagattcctcacgccgatggacactttcatccttctccactgatgggaggttttggactcaaacacccgcctcctcagattatgatcaaaaacactcccgttccagccaatcctcccacaaacttcagttctgccaagtttgcttccttcatcacacagtattccacgggacaggtcagcgtggagatcgagtgggagctgcagaaggagaacagcaaacgctggaatcccgaaattcagtacacttccaactacaacaaatctgttaatgtggactttactgtggacactaatggtgtgtattcagagcctcgccccattggcaccagatacctgactcgtaatctgtaattgcttgttaatcaataaaccgtttaattcgtttcagttgaactttggtctctgcgaagggcgaattcgcggccgctaaattcaattcg

SEQ ID NO: 295 - protein, 734 aa, Adeno-associated virus
MAADGYLPDWLEDTLSEGIRQWWKLKPGPPPPKPAERHKDDSRGLVLPGYKYLGPFNGLDKGEPVNEADAAALEHDKAYDRQLDSGDNPYLKYNHADAEFQERLKEDTSFGGNLGRAVFQAKKRVLEPLGLVEEPVKTAPGKKRPVEHSPAEPDSSSGTGKAGQQPARKRLNFGQTGDADSVPDPQPLGQPPAAPTSLGSTTMATGSGAPMADNNEGADGVGNSSGNWHCDSQWLGDRVITTSTRTWALPTYNNHLYKQISSQSGASNDNHYFGYSTPWGYFDFNRFHCHFSPRDWQRLINNNWGFRPKRLNFKLFNIQVKEVTQNDGTTTIANNLTSTVQVFTDSEYQLPYVLGSAHQGCLPPFPADVFMVPQYGYLTLNNGSQAVGRSSFYCLECFPSQMLRTGNNFQFSYTFEDVPFHSSYAHSQSLDRLMNPLIDQYLYYLNRTQTASGTQQSRLLFSQAGPTSMSLQAKNWLPGPCYRQQRLSKQANDNNNSNFPWTGATKYHLNGRDSLVNPGPAMASHKDDEEKFFPMHGTLIFGKEGTNATNAELENVMITDEEEIRTTNPVATEQYGYVSNNLQNSNTAASTETVNHQGALPGMVWQDRDVYLQGPIWAKIPHTDGHFHPSPLMGGFGLKHPPPQIMIKNTPVPANPPTNFSSAKFASFITQYSTGQVSVEIEWELQKENSKRWNPEIQYTSNYNKSVNVDFTVDTNGVYSEPRPIGTRYLTRNL

SEQ ID NO: 296 - DNA, 2208 bp, Adeno-associated virus
atggctgccgatggttatcttccagattggctcgaggacactctctctgaaggaataagacagtggtggaagctcaaacctggcccaccaccaccaaagcccgcagagcggcataaggacgacagcaggggtcttgtgcttcctggatacaagtacctcggacccttcaacggactcgacaagggagagccggtcaacgaggcagacgccgcggccctcgagcacgacaaggcctacgaccggcagctcgacagcggagacaacccgtacctcaagtacaaccacgccgacgcggagtttcaggagcgccttaaagaagatacgtcttttgggggcaacctcggacgagcagtcttccaggcgaaaaagagggttcttgaacctctgggcctggttgaggaacctgttaagacggctccgggaaaaaagaggccggtagagcactctcctgtggagccagactcctcctcgggaaccggaaaagcgggcaaccagcctgcaagaaaaagattgaatttcggtcagactggagacgcagactccgtacctgacccccagcctctcggacagccaccagcatccccctctggtctgggaactaatacgatggctacaggcagtggcgcaccaatggcagacaataacgagggcgccgacggagtgggtaattcctcgggaaattggcattgcgattccacatggatgggcgacagagtcgtcaccaccagcacccgcacctgggccctgcccacctacaacaaccacctctacaagcagatttccagccaatcaggagccagcaacgacaaccactactttggctacagcaccccttgggggtattttgacttcaacagattccactgccacttttcgccacgcgactggcagagactcatcaacaacaactggggattccggcccaaaagactcaacttcaagctgtttaacattcaagtcaaggaggtcacgcagaatgacggtacgacgacgattgccaataaccttaccagcacggttcaggtgtttactgacttggagtaccagctcccgtacgtcctcggctcggcgcatcaaggatgcctcccgccgttcccagcagacgtcttcatggtgccacagtatggatacctcaccctgaacaacgggagtcaggcggtaggacgctcttccttttactgcctggagtactttccttctcagatgcttcgcaccggaaacaactttaccttcagctacacttttgaagacgttcctttccacagcagctacgctcacagtcaaagtctggaccgtctcatgaatcctctcatcgaccagtacctgtattacttgagcagaacaaacactccaagcggaaccactacgcagtccaggcttcagttttctcaggccggagcgagtgacattcgggaccagtctaggaactggcttcctggaccctgttaccgccagcagcgagtatcaaagacagctgcggataacaacaacagtgaatactcgtggactggagctaccaagtaccacctcaatggcagagactctctggtgaatccgggcccggccatggccagccacaaggacgatgaagaaaagttttttcctcaaagcggggttctcatctttgggaagcaaggctcagagaaaacaaatgtggacattgaaaaggtcatgattacagacgaagaggaaatcaggaccaccaatcccgtggctacggagcagtatggttctgtatctaccaacctccagagcggcaacacacaagcagctacctcagatgtcaacacacaaggcgttcttccaggcatggtctggcaggacagagacgtgtacctgcaggggcccatctgggcaaaaattccacacacggacggacattttcacccctctcccctcatgggcggatttggacttaaacaccctcctccacagattctcattaagaataccccggtacctgcgaatccttcgaccaccttcagcgcggcaaagtttgcttccttcatcacacagtattccacggggcaggtcagcgtggagatcgagtgggagctgcagaaggagaacagcaaacgctggaatcccgaaattcagtacacttccaactacaacaaatctgttaatgtggactttactgtggacactaatggggtgtattcagagcctcgccctattggcaccagatacctgactcgtaatctgtaa

SEQ ID NO: 297 - DNA, 3159 bp, Adeno-associated virus
gattgatttagcggccgcgaattcgcccttgctgcgtcaactggaccaatgagaactttcccttcaacgattgcgtcgacaagatggtgatctggtgggaggagggaaagatgaccgccaaggtcgtggagtcggccaaagccattctcggaggaagcaaggtgcgtgtggaccaaaagtgcaagtcttcggcccagatcgacccgactcccgtgatcgtcacctccaacaccaacatgtgcgccgtgattgatggaaactcaacgaccttcgagcaccagcagccgttgcaagaccggatgttcaaatttgaacttacccgccgtctggatcatgactttggaaaggtcaccaagcaggaagtgaaagactttttccggtgggcaaaggatcacgtggttgaggtggagcatgagttctacgtcaaaaagggtggagccaaaaaaagacccgcccccagtgacgcagatataagtgagcccaaacgggcgcgcgagtcagttgcgcagccatcgacgtcagacgcggaagcttcgatcaactacgcggacaggtaccaaaacaaatgttctcgtcacgtgggcatgaatctgatgctgtttccctgcagacaatgcgagagaatgaatcagaattcaaatatctgcttcactcacggacagaaagactgtccatagtgctttcccgtgtcagaatctcaacccgtttctgtcgtcaaaaaggcgtatcagaaactgtgctacattcatcacatcatgggaaaggtgccagacgcttgcactgcttgcgacctggtcaatgtggatttggatgactgcatctctgaacaataaatgatttaaatcaggtatggctgccgatggttatcttccagattggctcgaggacactctctctgaaggaataagacagtggtggaagctcaaacctggcccaccaccaccaaagcccgcagagcggcataaggacgacagcaggggtcttgtgcttcctggatacaagtacctcggacccttcaacggactcgacaagggagagccggtcaacgaggcagacgccgcggccctcgagcacgacaaggcctacgaccggcagctcgacagcggagacaacccgtacctcaagtacaaccacgccgacgcggagtttcaggagcgccttaaagaagatacgtcttttgggggcaacctcggacgagcagtcttccaggcgaaaaagagggttcttgaacctctgggcctggttgaggaacctgttaagacggctccgggaaaaaagaggccggtagagcactctcctgtggagccagactcctcctcgggaaccggaaaagcgggcaaccagcctgcaagaaaaagattgaatttcggtcagactggagacgcagactccgtacctgacccccagcctctcggacagccaccagcatccccctctggtctgggaactaatacgatggctacaggcagtggcgcaccaatggcagacaataacgagggcgccgacggagtgggtaattcctcgggaaattggcattgcgattccacatggatgggcgacagagtcgtcaccaccagcacccgcacctgggccctgcccacctacaacaaccacctctacaagcagatttccagccaatcaggagccagcaacgacaaccactactttggctacagcaccccttgggggtattttgacttcaacagattccactgccacttttcgccacgcgactggcagagactcatcaacaacaactggggattccggcccaaaagactcaacttcaagctgtttaacattcaagtcaaggaggtcacgcagaatgacggtacgacgacgattgccaataaccttaccagcacggttcaggtgtttactgacttggagtaccagctcccgtacgtcctcggctcggcgcatcaaggatgcctcccgccgttcccagcagacgtcttcatggtgccacagtatggatacctcaccctgaacaacgggagtcaggcggtaggacgctcttccttttactgcctggagtactttccttctcagatgcttcgcaccggaaacaactttaccttcagctacacttttgaagacgttcctttccacagcagctacgctcacagtcaaagtctggaccgtctcatgaatcctctcatcgaccagtacctgtattacttgagcagaacaaacactccaagcggaaccactacgcagtccaggcttcagttttctcaggccggagcgagtgacattcgggaccagtctaggaactggcttcctggaccctgttaccgccagcagcgagtatcaaagacagctgcggataacaacaacagtgaatactcgtggactggagctaccaagtaccacctcaatggcagagactctctggtgaatccgggcccggccatggccagccacaaggacgatgaagaaaagttttttcctcaaagcggggttctcatctttgggaagcaaggctcagagaaaacaaatgtggacattgaaaaggtcatgattacagacgaagaggaaatcaggaccaccaatcccgtggctacggagcagtatggttctgtatctaccaacctccagagcggcaacacacaagcagctacctcagatgtcaacacacaaggcgttcttccaggcatggtctggcaggacagagacgtgtacctgcaggggcccatctgggcaaaaattccacacacggacggacattttcacccctctcccctcatgggcggatttggacttaaacaccctcctccacagattctcattaagaataccccggtacctgcgaatccttcgaccaccttcagcgcggcaaagtttgcttccttcatcacacagtattccacggggcaggtcagcgtggagatcgagtgggagctgcagaaggagaacagcaaacgctggaatcccgaaattcagtacacttccaactacaacaaatctgttaatgtggactttactgtggacactaatggggtgtattcagagcctcgccctattggcaccagatacctgactcgtaatctgtaattgcttgttaatcaataaaccgtttaattcgtttcagttgaactttggtctctgcgaagggcgaattcgtttaaacctgcaggactagtccctttagtgagg

SEQ ID NO: 298 - protein, 735 aa, Adeno-associated virus
MAADGYLPDWLEDTLSEGIRQWWKLKPGPPPPKPAERHKDDSRGLVLPGYKYLGPFNGLDKGEPVNEADAAALEHDKAYDRQLDSGDNPYLKYNHADAEFQERLKEDTSFGGNLGRAVFQAKKRVLEPLGLVEEPVKTAPGKKRPVEHSPVEPDSSSGTGKAGNQPARKRLNFGQTGDADSVPDPQPLGQPPASPSGLGTNTMATGSGAPMADNNEGADGVGNSSGNWHCDSTWMGDRVVTTSTRTWALPTYNNHLYKQISSQSGASNDNHYFGYSTPWGYFDFNRFHCHFSPRDWQRLINNNWGFRPKRLNFKLFNIQVKEVTQNDGTTTIANNLTSTVQVFTDLEYQLPYVLGSAHQGCLPPFPADVFMVPQYGYLTLNNGSQAVGRSSFYCLEYFPSQMLRTGNNFTFSYTFEDVPFHSSYAHSQSLDRLMNPLIDQYLYYLSRTNTPSGTTTQSRLQFSQAGASDIRDQSRNWLPGPCYRQQRVSKTAADNNNSEYSWTGATKYHLNGRDSLVNPGPAMASHKDDEEKFFPQSGVLIFGKQGSEKTNVDIEKVMITDEEEIRTTNPVATEQYGSVSTNLQSGNTQAATSDVNTQGVLPGMVWQDRDVYLQGPIWAKIPHTDGHFHPSPLMGGFGLKHPPPQILIKNTPVPANPSTTFSAAKFASFITQYSTGQVSVEIEWELQKENSKRWNPEIQYTSNYNKSVNVDFTVDTNGVYSEPRPIGTRYLTRNL

SEQ ID NO: 299 - DNA, 2205 bp, Adeno-associated virus
atggctgccgatggttatcttccagattggctcgaggacactctctctgaaggaataagacagtggtggaagctcaaacctggcccaccaccaaagcccgcagagcggcataaggacgacagcaggggtcttgtgcttcctggatacaagtacctcggacccttcaacggactcgacaagggagagccggtcaacgaggcagacgccgcggccctcgagcacgacaaggcctacgaccggcagctcgacagcggagacaacccgtacctcaagtacaaccacgccgacgcggagtttcaggagcgccttaaagaagatacgtcttttgggggcaacctcggacgagcagtcttccaggcgaaaaagagggttcttgaacctctgggcctggttgaggaacctgttaagacggctccgggaaaaaagaggcccgtagagcactctcctgtggagccagactcctcctcgggaaccggaaaagcgggcaaccagcctgcaagaaaaagattgaatttcggtcagactggagacgcagactccgtacctgacccccagcctctcggacagccaccagcagccccctctggtctgggaactaatacgatggctacaggcagtggcgcaccaatggcagacaataacgagggcgccgacggagtgggtaattcctcgggagattggcattgcgattccacatggatgggcgacagagtcatcaccaccagcacccgcacctgggccctgcccacctacaacaaccacctctacaagcagatttccagccaatcaggagccagcaatgacaaccactactttggctacagcaccccttgggggtattttgacttcaacagattccactgccacttttcgccacgcgactggcagagactcatcaacaacaactggggattccggcccaaaagactcaacctcaagctgtttaacattcaagtcaaggaggtcacgcagaatgacggtacgacgacgattgccaataaccttaccagcacggttcaggtgtttactgacttggagtaccagctcccgtacgtcctcggctcggcgcatcaaggatgcctcccgccgttcccagcagacgtcttcatggtgccacagtatggatacctcaccctgaacaacgggagtcaggcggtaggacgctcttccttttactgcctggagtactttccttctcagatgcttcgtaccggaaacaactttaccttcagctacacttttgaagacgttcctttccacagcagctacgctcacagtcaaagtctggaccgtctcatgaatcctctcatcgaccagtacctgtattacttgagcagaacaaacactccaagcggaaccactacgcagtccaggcttcagttttctcaggccggagcgagtgacattcgggaccagtctaggaactggcttcctggaccctgttaccgccagcagcgagtatcaaagacagctgcggataacaacaacggtgaatactcgtggactggagctaccaagtaccacctcaatggcagagactctctggtgaatccgggcccggccatggccagccacaaggacgatgaagaaaagttttttcctcaaagcggggttctcatctttgggaagcaaggctcagagaaaacaaatgtggacattgaaaaggtcatgattacagacgaagaggaaatcaggaccaccaatcccgtggctacggagcagtatggttctgtatctaccaacctccagagcggcaacacacgagcagctacctcagatgtcaacacacaaggcgttcttccaggcatggtctggcaggacagagacgtgtacctgcaggggcccatctgggcaaaaattccacacacggacggacattttcacccctctcccctcatgggcggatttggacttaaacaccctcctccacagattctcattaagaataccccggtacctgcgaatccttcgaccaccttcagcgcggcaaagtttgcttccttcatcacacagtattccacggggcaggtcagcgtggagatcgagtgggagctgcagaaggagaacagcaaacgctggaatcccgaaattcagtacacttccaactacaacaaatctgttaatgtggactttactgtggacactaatggggtgtattcagagcctcgccctattggcaccagatacctgactcgtaatctgtaa

SEQ ID NO: 300 - DNA, 3156 bp, Adeno-associated virus
cgattgaatttagcggccgcgaattcgcccttgctgcgtcaacggaccaatgagaactttcccttcaacgattgcgtcgacaagatggtgatctggtgggaggagggaaagatgaccgccaaggtcgtggagtcggccaaagccattctcggaggaagcaaggtgcgtgtggaccaaaagtgcaagtcttcggcccagatcgacccgactcccgtgatcgtcacctccaacaccaacatgtgcgccgtgattgatggaaactcaacgaccttcgagcaccagcagccgttgcaagaccggatgttcaaatttgaacttacccgccgtctggatcatgactttggaaaggtcaccaagcaggaagtgaaagactttttccggtgggcaaaggatcacgtggttgaggtggagcatgagttctacgtcaaaaagggtggagccaaaaaaagacccgcccccagtgacgcagatataagtgagcccaaacgggcgcgcgagtcagttgcgcagccatcgacgtcagacgcggaagcttcgatcaactacgcggacaggtaccaaaacaaatgttctcgtcacgtgggcatgaatctgatgctgtttccctgcagacaatgcgagcgaatgaatcagaattcaaatatctgcttcactcacggacagaaagactgtttagagtgctttcccgtgtcagaatctcaacccgtttctgtcgtcaaaaaggcgtatcagaaactgtgctacattcatcacatcatgggaaaggtgccagacgcttgcactgcttgcgacctggtcaatgtggatttggatgactgcatctctgaacaataaatgatttaaatcaggtatggctgccgatggttatcttccagattggctcgaggacactctctctgaaggaataagacagtggtggaagctcaaacctggcccaccaccaaagcccgcagagcggcataaggacgacagcaggggtcttgtgcttcctggatacaagtacctcggacccttcaacggactcgacaagggagagccggtcaacgaggcagacgccgcggccctcgagcacgacaaggcctacgaccggcagctcgacagcggagacaacccgtacctcaagtacaaccacgccgacgcggagtttcaggagcgccttaaagaagatacgtcttttgggggcaacctcggacgagcagtcttccaggcgaaaaagagggttcttgaacctctgggcctggttgaggaacctgttaagacggctccgggaaaaaagaggcccgtagagcactctcctgtggagccagactcctcctcgggaaccggaaaagcgggcaaccagcctgcaagaaaaagattgaatttcggtcagactggagacgcagactccgtacctgacccccagcctctcggacagccaccagcagccccctctggtctgggaactaatacgatggctacaggcagtggcgcaccaatggcagacaataacgagggcgccgacggagtgggtaattcctcgggagattggcattgcgattccacatggatgggcgacagagtcatcaccaccagcacccgcacctgggccctgcccacctacaacaaccacctctacaagcagatttccagccaatcaggagccagcaatgacaaccactactttggctacagcaccccttgggggtattttgacttcaacagattccactgccacttttcgccacgcgactggcagagactcatcaacaacaactggggattccggcccaaaagactcaacctcaagctgtttaacattcaagtcaaggaggtcacgcagaatgacggtacgacgacgattgccaataaccttaccagcacggttcaggtgtttactgacttggagtaccagctcccgtacgtcctcggctcggcgcatcaaggatgcctcccgccgttcccagcagacgtcttcatggtgccacagtatggatacctcaccctgaacaacgggagtcaggcggtaggacgctcttccttttactgcctggagtactttccttctcagatgcttcgtaccggaaacaactttaccttcagctacacttttgaagacgttcctttccacagcagctacgctcacagtcaaagtctggaccgtctcatgaatcctctcatcgaccagtacctgtattacttgagcagaacaaacactccaagcggaaccactacgcagtccaggcttcagttttctcaggccggagcgagtgacattcgggaccagtctaggaactggcttcctggaccctgttaccgccagcagcgagtatcaaagacagctgcggataacaacaacggtgaatactcgtggactggagctaccaagtaccacctcaatggcagagactctctggtgaatccgggcccggccatggccagccacaaggacgatgaagaaaagttttttcctcaaagcggggttctcatctttgggaagcaaggctcagagaaaacaaatgtggacattgaaaaggtcatgattacagacgaagaggaaatcaggaccaccaatcccgtggctacggagcagtatggttctgtatctaccaacctccagagcggcaacacacgagcagctacctcagatgtcaacacacaaggcgttcttccaggcatggtctggcaggacagagacgtgtacctgcaggggcccatctgggcaaaaattccacacacggacggacattttcacccctctcccctcatgggcggatttggacttaaacaccctcctccacagattctcattaagaataccccggtacctgcgaatccttcgaccaccttcagcgcggcaaagtttgcttccttcatcacacagtattccacggggcaggtcagcgtggagatcgagtgggagctgcagaaggagaacagcaaacgctggaatcccgaaattcagtacacttccaactacaacaaatctgttaatgtggactttactgtggacactaatggggtgtattcagagcctcgccctattggcaccagatacctgactcgtaatctgtaattgcttgttaatcaataaaccgtttaattcgtttcagttgaactttggtctctgcgaagggcgaattcgtttaaacctgcaggactagtccctttagtgag

SEQ ID NO: 301 - protein, 734 aa, Adeno-associated virus
MAADGYLPDWLEDTLSEGIRQWWKLKPGPPPKPAERHKDDSRGLVLPGYKYLGPFNGLDKGEPVNEADAAALEHDKAYDRQLDSGDNPYLKYNHADAEFQERLKEDTSFGGNLGRAVFQAKKRVLEPLGLVEEPVKTAPGKKRPVEHSPVEPDSSSGTGKAGNQPARKRLNFGQTGDADSVPDPQPLGQPPAAPSGLGTNTMATGSGAPMADNNEGADGVGNSSGDWHCDSTWMGDRVITTSTRTWALPTYNNHLYKQISSQSGASNDNHYFGYSTPWGYFDFNRFHCHFSPRDWQRLINNNWGFRPKRLNLKLFNIQVKEVTQNDGTTTIANNLTSTVQVFTDLEYQLPYVLGSAHQGCLPPFPADVFMVPQYGYLTLNNGSQAVGRSSFYCLEYFPSQMLRTGNNFTFSYTFEDVPFHSSYAHSQSLDRLMNPLIDQYLYYLSRTNTPSGTTTQSRLQFSQAGASDIRDQSRNWLPGPCYRQQRVSKTAADNNNGEYSWTGATKYHLNGRDSLVNPGPAMASHKDDEEKFFPQSGVLIFGKQGSEKTNVDIEKVMITDEEEIRTTNPVATEQYGSVSTNLQSGNTRAATSDVNTQGVLPGMVWQDRDVYLQGPIWAKIPHTDGHFHPSPLMGGFGLKHPPPQILIKNTPVPANPSTTFSAAKFASFITQYSTGQVSVEIEWELQKENSKRWNPEIQYTSNYNKSVNVDFTVDTNGVYSEPRPIGTRYLTRNL

SEQ ID NO: 302 - DNA, 2208 bp, Adeno-associated virus
atggctgccgatggttatcttccagattggctcgaggacactctctctgaaggaataagacagtggtggaagctcaaacctggcccaccaccaccaaagcccgcagagcggcataaggacgacagcaggggtcttgtgcttcctgggtacaagtacctcggacccttcaacggactcgacaagggagagccggtcaacgaggcagacgccgcggccctcgagcacgacaaggcctacgaccggcagctcgacagcggagacaacccgtacctcaagtacgaccacgccgacgcggagtttcaggagcgccttaaagaagatacgtcttttgggggcaacctcggacgagcagtcttccaggcaaaaaagagggttcttgaacctctgggcctggttgaggagcctgttaagacggctccgggaaaaaagaggccggtagagcactctcctgtggagccagactcctcctcgggaaccggaaaagcgggcaaccagcctgcaagaaagagattgaatttcggtcagactggagacgcagactccgtacctgacccccagcctctcggacagccaccagcagccccctctggtctgggaactaatacgatggctacaggcagtggcgcaccaatggcagacaataacgatggcgccgacggagtgggtaattcctcgggaaattggcattgcgattccacatggatgggcgacagagtcatcaccaccagcacccgaacctgggctctgcccacctacaacaaccatctgtacaagcagatttccagccaatcaggagccagcaacgacaaccactactttggctacagcaccccttgggggtattttgacttcaacagattccactgccacttttcaccacgtgactggcaaagactcatcaacaacaactggggattccggcccaagagactcaacttcaagctctttaacattcaagtcagagaggtcacgcagaatgatggtacgacgacgattgccaataaccttaccagcacggttcaggtgtttactgactcggagtaccagctcccgtacgtcctcggctcggcgcatcaaggatgcctcccgccgttcccagcagacgtcttcatggtgccacagtatggatacctcaccctgaacaacgggagtcaggcagtaggacgctcttcattttactgcctggagtacttcccttctcagatgctgcgtaccggaaacaactttaccttcagctacacctttgaggatgttcctttccacagcagctacgctcacagccagagtttggaccgtctcatgaatcctctcatcgaccagtacctgtattacttgagcagaacaaacactccaagcggaaccaccacgcagtccaggcttcagttttctcaggccggagcgagtgacattcgggatcagtctaggaactggcttcctggaccctgttaccgccagcagcgagtatcaaagacatctgcggacaacaacaacagtgaatactcgtggattggagctaccaagtaccacctcaatggcagagactctctggtgaatccgggcccggcaatggccagccacaaggacgatgaagaaaagttttttcctcagagcggggttctcatctttggaaaacaaggatcagagaaaacaaatgtggacattgaaaaggtcatgattacagacgaagaggaaatcagaaccaccaatcccgtggccacggagcagtatggttctgtatctaccaacctccagagcggcaacacacaagcatctactgcagatgtcaacacacaaggcgttcttccaggcatggtctggcaggacagagacgtgtacctgcaggggcctatctgggcaaagattccgcacacggacggacattttcacccctctcccctcatgggcggattcggacttaaacaccctcctccacagattctcatcaaaaacaccccggtacctgcgaatccttcgaccaccttcagtgcggcaaagtttgcttccttcatcacacagtattccacggggcgggtcagcgtggagatcgagtgggagctacagaaggagaacagcaaacgctggaatcccgagatccagtacacttccaactacaacaaatctgttaatgtggactttactgtggacactaatggtgtgtattcagagcctcgccccattggcaccagatacctgactcgtaatctgtaa

SEQ ID NO: 303 - protein, 735 aa, Adeno-associated virus
MAADGYLPDWLEDTLSEGIRQWWKLKPGPPPPKPAERHKDDSRGLVLPGYKYLGPFNGLDKGEPVNEADAAALEHDKAYDRQLDSGDNPYLKYDHADAEFQERLKEDTSFGGNLGRAVFQAKKRVLEPLGLVEEPVKTAPGKKRPVEHSPVEPDSSSGTGKAGNQPARKRLNFGQTGDADSVPDPQPLGQPPAAPSGLGTNTMATGSGAPMADNNDGADGVGNSSGNWHCDSTWMGDRVITTSTRTWALPTYNNHLYKQISSQSGASNDNHYFGYSTPWGYFDFNRFHCHFSPRDWQRLINNNWGFRPKRLNFKLFNIQVREVTQNDGTTTIANNLTSTVQVFTDSEYQLPYVLGSAHQGCLPPFPADVFMVPQYGYLTLNNGSQAVGRSSFYCLEYFPSQMLRTGNNFTFSYTFEDVPFHSSYAHSQSLDRLMNPLIDQYLYYLSRTNTPSGTTTQSRLQFSQAGASDIRDQSRNWLPGPCYRQQRVSKTSADNNNSEYSWIGATKYHLNGRDSLVNPGPAMASHKDDEEKFFPQSGVLIFGKQGSEKTNVDIEKVMITDEEEIRTTNPVATEQYGSVSTNLQSGNTQASTADVNTQGVLPGMVWQDRDVYLQGPIWAKIPHTDGHFHPSPLMGGFGLKHPPPQILIKNTPVPANPSTTFSAAKFASFITQYSTGRVSVEIEWELQKENSKRWNPEIQYTSNYNKSVNVDFTVDTNGVYSEPRPIGTRYLTRNL

SEQ ID NO: 304 - DNA, 2217 bp, Adeno-associated virus
atggctgccgatggttatcttccagattggctcgaggacaacctctctgagggcattcgcgagtggtgggacttgaaacctggagccccgaaacccaaagccaaccagcaaaagcaggacgacggccggggtctggtgcttcctggctacaagtacctcggacccttcaacggactcgacaagggggagcccgtcaacgcggcggacgcagcggccctcgagcacgacaaggcctacgaccagcagctcaaagcgggtgacaatccgtacctgcggtataaccacgccgacgccgagtttcaggagcgtctgcaagaagatacgtcttttgggggcaacctcgggcgagcagtcttccaggccaagaagcgggttctcgaacctctcggtctggttgaggaaggcgctaagacggctcctggaaagaagagaccggtagagccatcaccccagcgttctccagactcctctacgggcatcggcaagacaggccagcagcccgcgaaaaagagactcaactttgggcagactggcgactcagagtcagtgcccgaccctcaaccaatcggagaaccccccgcaggcccctctggtctgggatctggtacaatggctgcaggcggtggcgctccaatggcagacaataacgaaggcgccgacggagtgggtagttcctcaggaaattggcattgcgattccgcatggctgggcgacagagtcatcaccaccagcacccgaccctgggccctccccacctacaacaaccacctctacaagcaaatctccaacgggacatcgggaggaagcaccaacgacaacacctacttcggctacagcaccccctgggggtattttgactttaacagattccactgccacttctcaccacgtgactggcagcgactcatcaacaacaactggggattccggcccaagagactcaacttcaagctcttcaacatccaggtcaaggaggtcacgcagaatgaaggcaccaagaccatcgccaataaccttaccagcacgattcaggtctttacggactcggaataccagctcccgtacgtcctcggctctgcgcaccagggctgcccgcctccgttcccggcggacgtcttcatgattcctcagtacgggtacctgactctgaacaacggcagtcaggccgtgggccgttcctccttctactgcctggagtactttccttctcaaatgcggagaacgggcaacaactttgagttcagctaccagtttgaggacgtgccttttcacagcagctacgcgcatagccaaagcctggaccggctgatgaaccccctcatcgaccagtacctgtactacctgtctcggactcagtccacgggaggtaccgcaggaactcagcagttgctattttctcaggccgggcctaataacatgtcggctcaggccaaaaactggctacccgggccctgctaccggcagcaacgcgtctccacgacactgtcgcaaaataacaacagcaactttgcttggaccggtgccaccaagtatcatctgaatggcagagactctctggtaaatcccggtgtcgctatggcaacgcacaaggacgacgaagagcgattttttccatccagcggagtcttgatgtttgggaaacagggagctggaaaagacaacgtggactatagcagcgttatgctaaccagtgaggaagaaatcaaaaccaccaacccagtggccacagaacagtacggcgtggtggccgataacctgcaacagcaaaacgccgctcctattgtaggggccgtcaacagtcaaggagccttacctggcatggtctggcagaaccgggacgtgtacctgcagggtcctatctgggccaagattcctcacacggacggcaactttcatccttcgccgctgatgggaggctttggactgaaacacccgcctcctcagatcctgattaagaatacacctgttcccgcggatcctccaactaccttcagtcaagccaagctggcgtcgttcatcacgcagtacagcaccggacaggtcagcgtggaaattgaatgggagctgcagaaagagaacagcaagcgctggaacccagagattcagtatacttccaactactacaaatctacaaatgtggactttgctgtcaatactgagggtacttattcagagcctcgccccattggcacccgttacctcacccgtaacctgtaa

SEQ ID NO: 305 - protein, 738 aa, Adeno-associated virus
MAADGYLPDWLEDNLSEGIREWWDLKPGAPKPKANQQKQDDGRGLVLPGYKYLGPFNGLDKGEPVNAADAAALEHDKAYDQQLKAGDNPYLRYNHADAEFQERLQEDTSFGGNLGRAVFQAKKRVLEPLGLVEEGAKTAPGKKRPVEPSPQRSPDSSTGIGKTGQQPAKKRLNFGQTGDSESVPDPQPIGEPPAGPSGLGSGTMAAGGGAPMADNNEGADGVGSSSGNWHCDSAWLGDRVITTSTRPWALPTYNNHLYKQISNGTSGGSTNDNTYFGYSTPWGYFDFNRFHCHFSPRDWQRLINNNWGFRPKRLNFKLFNIQVKEVTQNEGTKTIANNLTSTIQVFTDSEYQLPYVLGSAHQGCPPPFPADVFMIPQYGYLTLNNGSQAVGRSSFYCLEYFPSQMRRTGNNFEFSYQFEDVPFHSSYAHSQSLDRLMNPLIDQYLYYLSRTQSTGGTAGTQQLLFSQAGPNNMSAQAKNWLPGPCYRQQRVSTTLSQNNNSNFAWTGATKYHLNGRDSLVNPGVAMATHKDDEERFFPSSGVLMFGKQGAGKDNVDYSSVMLTSEEEIKTTNPVATEQYGVVADNLQQQNAAPIVGAVNSQGALPGMVWQNRDVYLQGPIWAKIPHTDGNFHPSPLMGGFGLKHPPPQILIKNTPVPADPPTTFSQAKLASFITQYSTGQVSVEIEWELQKENSKRWNPEIQYTSNYYKSTNVDFAVNTEGTYSEPRPIGTRYLTRNL

SEQ ID NO: 306 - protein, 735 aa, Adeno-associated virus
MAADGYLPDWLEDTLSEGIRQWWKLKPGPPPPKPAERHKDDSRGLVLPGYKYLGPFNGLDKGEPVNEADAAALEHDKAYDRQLDSGDNPYLKYNHADAEFQERLKEDTSFGGNLGRAVFQAKKRVLEPLGLVEEPVKTAPGKKRPVEHSPVEPDSSSGTGKAGQQPARKRLNFGQTGDADSVPDPQPLGQPPAAPSGLGSTTMATGSGAPMADNNEGADGVGNSSGNWHCDSQWLGDRVITTSTRTWALPTYNNHLYKQISSQSGASNDNHYFGYSTPWGYFDFNRFHCHFSPRDWQRLINNNWGFRPKRLNFKLFNIQVKEVTQNDGTTTIANNLTSTVQVFTDSEYQLPYVLGSAHQGCLPPFPADVFMVPQYGYLTLNNGSQAVGRSSFYCLEYFPSQMLRTGNNFQFSYTFEDVPFHSSYAHSQSLDRLMNPLVDQYLYYLNKTQTNSGTLQQSRLLFSQAGPTNMSLQAKNWLPGPCYRQQRLSKQANDNNNSNFPWTAATKYHLNGRDSLVNPGPAMASHKDDEEKFFPMHGTLIFGKQGTNANDADLENVMITDEEEIRTTNPVATEQYGTVSNNLQNSNTGPTTGTVNHQGALPGMVWQDRDVYLQGPIWAKIPHTDGHFHPSPLMGGFGLKHPPPQIMIKNTPVPANPPTNFSSAKFASFITQYSTGQVSVEIEWELQKENSKRWNPEIQYTSNYNKSVNVDFTVDTNGVYSEPRPIGTRYLTRNL

SEQ ID NO: 307 - DNA, 3158 bp, Adeno-associated virus
gattgaatttagcggccgcgaattcgcccttgctgcgtcaactggaccaatgagaactttcctttcaatgattgcgtcgacaagatggtgatctggtgggaggagggaaagatgaccgccaaggtcgtggagtcggccaaagccattctcggaggaagcaaggtgcgcgcggaccagaaatgcaagtcctcggcccagatagacccgactcccgtgattgtcacctccaacaccaacatgtgcgccgtgattgacgggaactcaacgaccttcgaacaccagcagccgttgcaagaccggatgttcaaatttgaactcacccgccgtctggatcatgactttgggaaggtcaccaagcaggaagtcaaagactttttccggtgggcaaaggatcacgtggttgaggtggagcatgaattctacgtcaaaaagggtggagctaagaaaagacccgcccccagtgacgcagatataagtgagcccaaacgggcgcgcgagtcagttgcgcagccatcgacgtcagacgcggaagcttcgatcaactacgcgggcaggtaccaaaacaaatgttctcgtcacgtgggcatgaatctgatgctgtttccctgcagacaatgcgagagaatgaatcagaattcaaatatctgcttcactcacggacagaaagactgtttagagtgctttcccgtgtcagaatctcaacccgtttctgtcgtcaaaaaggcgtatcagaaactttgctacattcatcatatcatgggaaaggtgccagacgcttgcactgcctgcgatctggtcaatgtggatttggatgactgcatctctgaacaataaatgatttaaatcaggtatggctgccgatggttatcttccagattggctcgaggacactctctctgaaggaataagacagtggtggaagctcaaacctggcccaccaccaccaaagcccgcagagcggcataaggacgacagcaggggtcttgtgcttcctgggtacaagtacctcggacccttcaacggactcgacaagggggagccggtcaacgaggcagacgccgcggccctcgagcacgacaaggcctacgaccggcagctcgacagcggagacaacccgtacctcaagtacaaccacgccgacgcggagtttcaggagcgccttaaagaagatacgtcttttgggggcaacctcggacgagcagtcttccaggcaaaaaagagggttcttgaacctctgggcctggttgaggaacctgttaaaacggctccgggaaaaaagaggccggtagagcactctcctgtggagccagactcctcctcgggaaccggaaaagcgggccagcagcctgcaagaaaaagattgaatttcggtcagactggagacgcagactccgtacctgacccccagcctctcggacagccaccagcagccccctctggtctgggatctactacaatggctacaggcagtggcgcaccaatggcagacaataacgagggtgccgatggagtgggtaattcctcgggaaattggcattgcgattcccaatggctgggcgacagagtcatcaccaccagcacccgcacctgggccctgcccacctacaacaaccacctctacaagcaaatctccagccaatcaggagcctcaaacgacaaccactactttggctacagcaccccctgggggtattttgacttcaacagattccactgccacttttcaccacgtgactggcaaagactcatcaacaacaactggggattccgacccaagagactcaacttcaagctctttaacattcaagtcaaagaggtcacgcagaatgacggtacgacgacgattgccaataaccttaccagcacggttcaggtgtttactgactcggagtaccagctcccgtacgtcctcggctcggcgcatcaaggatgcctcccgccgtttccagcggacgtcttcatggtcccacagtatggatacctcaccctgaacaacgggagtcaggcagtaggacgctcttcattttactgcctggagtactttccttctcagatgctgcgtaccggaaacaactttcaattcagctacacttttgaagacgtgcctttccacagcagctacgctcacagccagagtctggatcggctgatgaatcctctggtcgaccagtacctgtattatctgaacaagacacaaacaaatagtggaactcttcagcagtctcggctactgtttagccaagctggacccaccaacatgtctcttcaagctaaaaactggctgcctggaccttgctacagacagcagcgtctgtcaaagcaggcaaacgacaacaacaacagcaactttccctggactgcagctacaaagtatcatctaaatggccgggactcgttggttaatccaggaccagctatggccagtcacaaggatgacgaagaaaagtttttccccatgcatggaacccttatatttggtaaacaaggaacaaatgccaacgacgcggatttggaaaatgtcatgattacagatgaagaagaaatcaggaccaccaatcccgtggctacggagcagtacggaactgtatcaaataatttgcaaaactcaaacactggtccaactactggaactgtcaatcaccaaggagcgttacctggtatggtgtggcaggatcgagacgtgtacctgcagggacccatttgggccaagattcctcacaccgatggacactttcatccttctccactgatgggaggttttggactcaaacacccacctcctcaaatcatgatcaaaaacactcccgttccagccaatcctcccacaaacttcagttctgccaagtttgcttctttcatcacacagtattccacggggcaggtcagcgtggagatcgagtgggagctgcagaaggagaacagcaaacgctggaatcccgaaattcagtacacttccaactacaacaaatctgttaatgtggactttactgtggacactaatggtgtgtattcagagcctcgccccattggcaccagatacctgactcgtaatctgtaattgcttgttaatcaataaaccgtttaattcgtttcagttgaactttggtctctgcgaagggcgaattcgtttaaacctgcaggactagtccctttagtga

SEQ ID NO: 308 - protein, 735 aa, Adeno-associated virus
MAADGYLPDWLEDTLSEGIRQWWKLKPGPPPPKPAERHKDDSRGLVLPGYKYLGPFNGLDKGEPVNEADAAALEHDKAYDRQLDSGDNPYLKYNHADAEFQERLKEDTSFGGNLGRAVFQAKKRVLEPLGLVEEPVKTAPGKKRPVEHPPVEPDSSSGTGKAGQQPARKRLNFGQTGDADSVPDPQPLGQPPAAPSGLGSTTMATGSGAPMADNNEGADGVGNSSGNWHCDSQWLGDRVITTSTRTWALPTYNNHLYKQISSQSGASNDNHYFGYSTPWGYFDFNRFHCHFSPRDWQRLINNNWGFRPKRLNFKLFNIQVKEVTQNDGTTTIANNLTSTVQVFTDSEYQLPYVLGSAHQGCLPPFPADVFMVPQYGYLTLNNGSQAVGRSSFYCLEYFPSQMLRTGNNFQFSYTFEDVPFHSSYAHSQSLDRLMNPLIDQYLYYLNKTQTNSGTLQQSRLLFSQAGPTNMSLQAKNRLPGPCYRQQRLSKQANDNNNSNFPWTAATKYHLNGRDSLVNPGPAMASHKDDEEKFFPMHGTLIFGKQGTNANDADLENVMITDEEEIRTTNPVATEQYGTVSNNLQNSNTGPTTGTVNHQGALPGMVWQDRDVYLQGPIWAKIPHTDGHFHPSPLVGGFGLKHPPPQIMIKNTPVPANPPTNFSSAKFASFITQYSTGQVSVEIEWELQKENSKRWNPEIQYTSNYNKSVNVDFTVDTNGVYSEPRPIGTRYLTRNL

SEQ ID NO: 309 - DNA, 3159 bp, Adeno-associated virus
gattgaatttagcggccgcgaattcgcccttgctgcgtcaactggaccaatgagaactttcctttcaatgattgcgtcgacaagatggtgatctggtgggaggagggaaagatgaccgccaaggtcgtggagtcggccaaagccattctcggaggaagcaaggtgcgcgtggaccagaaatgcaagtcctcggcccagatagacccgactcccgtgattgtcacctccaacaccgacatgtgcgccgtgattgacgggaactcaacgaccttcgaacaccagcagccgttgcaagaccggatgttcaaatttgaactcacccgccgtctggatcatgactttgggaaggtcaccaagcaggaagtcaaagactttttccggtgggcaaaggatcacgtggttgaggtggagcatgaattctacgtcaaaaagggtggagctaagaaaagacccgcccccagtgacgcagatataagtgagcccaaacgggcgcgcgagtcagttgcgcagccatcgacgtcagacgcggaagcttcgatcaactacgcggacaggtaccaaaacaaatgttctcgtcacgtgggcatgaatctgatgctgtttccctgcagacaatgcgagagaatgaatcagaattcaaatatctgcttcactcacggacagaaagactgtttagagtgctttcccgtgtcagaatctcaacccgtttctgtcgtcaaaaaggcgtatcagaaactttgctacattcatcatatcatgggaaaggtgccagacgcttgcactgcctgcgatctggtcaatgtggatttggatgactgcatctctgaacaataaatgatttaaatcaggtatggctgccgatggttatcttccagattggctcgaggacactctctctgaaggaataagacagtggtggaagctcaaacctggcccaccaccaccaaagcccgcagagcggcataaggacgacagcaggggtcttgtgcttcctgggtacaagtacctcggacccttcaacggactcgacaagggggagccggtcaacgaggcagacgccgcggccctcgagcacgacaaggcctacgaccggcagctcgacagcggagacaacccgtacctcaagtacaaccacgccgacgcggagtttcaggagcgccttaaagaagatacgtcttttgggggcaacctcggacgagcagtcttccaggcaaaaaagagggttcttgaacctctgggcctggttgaggaacctgttaaaacggctccgggaaaaaagaggccggtagagcaccctcctgtggagccagactcctcctcgggaaccggaaaagcgggccagcagcctgcaagaaaaagattgaatttcggtcagactggagacgcagactccgtacctgacccccagcctctcggacagccaccagcagccccctctggtctgggatctactacaatggctacaggcagtggcgcaccaatggcagacaataacgagggtgccgatggagtgggtaattcctcgggaaattggcattgcgattcccaatggctgggcgacagagtcatcaccaccagcacccgcacctgggccctgcccacctacaacaaccacctctacaagcaaatctccagccaatcaggagcctcaaacgacaaccactactttggctacagcaccccctgggggtattttgacttcaacagattccactgccacttttcaccacgtgactggcaaagactcatcaacaacaactggggattccgacccaagagactcaacttcaagctctttaacattcaagtcaaagaggtcacgcagaatgacggtacgacgacgattgccaataaccttaccagcacggttcaggtgtttactgactcggagtaccagctcccgtacgtcctcggctcggcgcatcaaggatgcctcccgccgtttccagcggacgtcttcatggtcccacagtatggatacctcaccctgaacaacgggagtcaggcagtaggacgctcttcattttactgcctggagtactttccttctcagatgctgcgtaccggaaacaactttcagttcagctacacttttgaagacgtgcctttccacagcagctacgctcacagccagagtctggatcggctgatgaatcctctgatcgaccagtacctgtattatctgaacaagacacaaacaaatagtggaactcttcagcagtctcggctactgtttagccaagctggacccaccaacatgtctcttcaagctaaaaaccggctgcctggaccttgctacagacagcagcgtctgtcaaagcaggcaaacgacaacaacaacagcaactttccctggaccgcagctacaaagtatcatctaaatggccgggactcgttggttaatccaggaccagctatggccagtcacaaggatgacgaagaaaagtttttccccatgcatggaacccttatatttggtaaacaaggaacaaatgccaacgacgcggatttggaaaatgtcatgattacagatgaagaagaaatcaggaccaccaatcccgtggctacggagcagtacggaactgtatcaaataatttgcaaaactcaaacactggtccaactactggaactgtcaatcaccaaggagcgttacctggtatggtgtggcaggatcgagacgtgtacctgcagggacccatttgggccaagattcctcacaccgatggacactttcatccttctccactggtgggaggttttggactcaaacacccacctcctcaaatcatgatcaaaaacactcccgttccagccaatcctcccacaaacttcagttctgccaagtttgcttctttcatcacacagtattccacggggcaggtcagcgtggagatcgagtgggagctgcagaaggagaacagcaaacgctggaatcccgaaattcagtacacttccaactacaacaaatctgttaatgtggactttactgtggacactaatggtgtgtattcagagcctcgccccattggcaccagatacctgactcgtaatctgtaattgcttgttaatcaataaaccgtttaattcgtttcagttgaactttggtctctgcgaagggcgaattcgtttaaacctgcaggactagtccctttagtgag

SEQ ID NO: 310 - DNA, 2208 bp, Adeno-associated virus
atggctgccgatggttatcttccagattggctcgaggacactctctctgaaggaataagacagtggtggaagctcaaacctggcccaccaccaccaaagcccgcagagcggcataaggacgacagcaggggtcttgtgcttcctgggtacaagtaccttggacccttcaacggactcgacaagggagagccggtcaacgaggcagacgccgcggccctcgagcacgacaaggcctacgaccggcagctcgacagcggagacaacccgtaccccaagtacaaccacgccgacgcggagttccaggagcgtcttaaagaagatacgtcttttgggggcaacctcggacgagcagtcttccaggcgaaaaagagggttcttgaacctctgggcctggttgaggaacctgttaagacggctccgggaaaaaagaggccggtagagcactctcctgcggagccagactcctcctcgggaaccggaaaagcgggccagcagcctgcaagaaagagattgaatttcggtcagactggagacgcagactccgtacctgacccccagcctctcggacagccaccagcagccccctctggtctgggaactaatacgatggctacaggcagtggcgcaccaatggcagacaataacgagggcgccgacggagtgggtaattcctcgggaaattggcattgcgattccacatggatgggcgacagagtcatcaccaccagcacccgcacctgggctctgcccacctacaacaaccacctctacaagcagatttccagccaatcaggagcctcaaacgacaaccactactttggctacagcaccccttgggggtattttgacttcaacagattccactgccacttttcgccacgtgactggcaaagactcatcaacaacaattggggattccggcccaaaagactcaacttcaagctctttaacattcaagtcaaggaggtcacgcagaatgacggtacgacgacgattgccaataaccttaccagcacggttcaggtgtttactgactcggagtaccagctcccgtacgtcctcggctcggcgcatcaaggatgcctcccgccgttcccagcagacgtcttcatggtgccacagtatggatacctcaccctgaacaacgggagtcaggcagtaggacgctcttcattttactgcctggagtactttccttctcagatgctgcgtaccggaaacaactttaccttcagctacacctttgaggacgttcctttccacagcagctacgcccacagccagagtttggaccgtctcatgaatcctctcatcgaccagtacctgtattacttgagcagaacaaacactccaagcggaaccaccacgcagtcaaggcttcagttttctcaggccggagcaagtgacattcgggaccagtctaggaactggcttcctggaccctgttaccgccagcagcgagtatcaaagacatctgcggataacaacaacagtgaatactcgtggactggagctaccaagtaccaccttaatggaagagactctctggtgaatccgggcccggccatggccagccacaaggacgatgaagaaaagttttttcctcagagcggggttctcatctttggaaaacaagactcgggaaaaactaatgtggacattgaaaaggtcatgattacagacgaagaggaaatcaggaccaccaatcccgtggctacggagcagtatggttctgtatctaccaacctccagagcggcaacacacaagcagctacctcagatgtcaacacacaaggcgttcttccaggcatggtgtggcaggacagagacgtgtacctgcaggggcccatctgggcaaagattccacacacggacggacattttcacccctctcccctcatgggcggattcggacttaaacaccctcccccgcagattctcatcaagaacaccccggtacctgcgaatccttcgactaccttcagtgcggcaaagtttgcttccttcattacacagtactccacggggcaggtcagcgtggagatcgagtgggagctgcagaaggagaacagcaaacgctggaatcccgagattcagtacacttccaactacaacaaatctgttaatgtggactttactgtggacactaatggtgtgtattcagagcctcgccccattggcaccaggtacctgactcgtaatctgtaa

SEQ ID NO: 311 - protein, 735 aa, Adeno-associated virus
MAADGYLPDWLEDTLSEGIRQWWKLKPGPPPPKPAERHKDDSRGLVLPGYKYLGPFNGLDKGEPVNEADAAALEHDKAYDRQLDSGDNPYPKYNHADAEFQERLKEDTSFGGNLGRAVFQAKKRVLEPLGLVEEPVKTAPGKKRPVEHSPAEPDSSSGTGKAGQQPARKRLNFGQTGDADSVPDPQPLGQPPAAPSGLGTNTMATGSGAPMADNNEGADGVGNSSGNWHCDSTWMGDRVITTSTRTWALPTYNNHLYKQISSQSGASNDNHYFGYSTPWGYFDFNRFHCHFSPRDWQRLINNNWGFRPKRLNFKLFNIQVKEVTQNDGTTTIANNLTSTVQVFTDSEYQLPYVLGSAHQGCLPPFPADVFMVPQYGYLTLNNGSQAVGRSSFYCLEYFPSQMLRTGNNFTFSYTFEDVPFHSSYAHSQSLDRLMNPLIDQYLYYLSRTNTPSGTTTQSRLQFSQAGASDIRDQSRNWLPGPCYRQQRVSKTSADNNNSEYSWTGATKYHLNGRDSLVNPGPAMASHKDDEEKFFPQSGVLIFGKQDSGKTNVDIEKVMITDEEEIRTTNPVATEQYGSVSTNLQSGNTQAATSDVNTQGVLPGMVWQDRDVYLQGPIWAKIPHTDGHFHPSPLMGGFGLKHPPPQILIKNTPVPANPSTTFSAAKFASFITQYSTGQVSVEIEWELQKENSKRWNPEIQYTSNYNKSVNVDFTVDTNGVYSEPRPIGTRYLTRNL

SEQ ID NO: 312 - DNA, 2208 bp, Adeno-associated virus
atggctgccgatggttatcttccagattggctcgaggacactctctctgaaggaataagacagtggtggaagctcaaacctggcccaccaccaccaaagcccgcagagcggcataaggacgacagcaggggtcttgtgcttcctgggtacaagtaccttggacccttcaacggactcgacaagggagagccggtcaacgaggcagacgccgcggccctcgagcacgacaaggcctacgaccggcagctcgacggcggagacaacccgtacctcaagtacaaccacgccgacgcggagttccaggagcgtcttaaagaagatacgtcttttgggggcaacctcggacgagcagtcttccaggcgaaaaagagggttcttgaacctctgggcctggttgaggaacctgttaagacggctccgggaaaaaagaggccggtagagcactctcttgcggagccagactcctcctcgggaaccggaaaagcgggccagcagcctgcaagaaggagattgaatttcggtcagactggagacgcagactccgtacctgacccccagcctctcggacagccaccagcagccccctctggtctgggaactaatacgatggctacaggcagtggcgcaccaatggcagacaataacgagggcgccgacggagtgggtaattcctcgggaaattggcattgcgattccacatggatgggcgacagagtcatcaccaccagcacccgcacctgggctctgcccacctacaacaaccacctctacaggcagatttccagccaatcaggagcctcaaacgacaaccactactttggctacagcaccccttgggggtattttgacttcaacagattccactgccacttttcgccacgtgactggcaaagactcatcaacaacaattggggatcccggcccaaaagactcaacttcaagctctttaacattcaagtcaaggaggtcacgcagaatgacggtacgacgacgattgccaataaccttaccagcacggttcaggtgtttactgactcggagtaccagctcccgtacgtcctcggctcggcgcatcaaggatgcctcccgccgttcccagcagacgtcttcatggtgccacagtatggatacctcaccctgaacaacgggagtcaggcagtaggacgctcttcattttactgcctggagtactttccttctcagatgctgcgtaccggaaacaactttaccttcagctacacctttgaggacgttcctttccacagcagctacgcccacagccagagtttggaccgtctcatgaatcctctcgtcgaccagtacctgtattacttgagcagaacaaacactccaagcggaaccaccacgcagtcaaggcttcagttttctcaggccggagcaagtgacattcgggaccagtctaggaactggcttcctggaccctgttaccgccagcagcgagtatcaaagacatctgcggataacaacaacagtgaatactcgtggactggagctaccaagtaccaccttaatggaagagactctctggtgaatccgggcccggccatggccagccacaaggacgatgaagaaaagttttttcctcagagcggggttctcatctttggaaaacaagactcgggaaaaactaatgtggacattgaaaaggtcatgattacagacgaagaggaaatcaggaccaccaatcccgtggctacggagcagtatggttctgtatctaccaacctccagagcggcaacacacaagcagctacctcagatgtcaacacacaaggcgttcttccaggcatggtgtggcaggacagagacgtgtacctgcaggggcccatctgggcaaagattccacacacggacggacattttcacccctctcccctcatgggcggattcggacttaaacaccctcccccgcagattctcatcaagaacaccccggtacctgcgaatccttcgactaccttcagtgcggcaaagtttgcttccttcattacacagtactccacggggcaggtcagcgtggagatcgagtgggagctgcagaaggagaacagcaaacgctggaatcccgagattcagtacacttccaactacaacaaatctgttaatgtggactttactgtggacactaatggtgtgtattcagagcctcgccccattggcaccagatacctgactcgtaatctgtaa

SEQ ID NO: 313 - protein, 735 aa, Adeno-associated virus
MAADGYLPDWLEDTLSEGIRQWWKLKPGPPPPKPAERHKDDSRGLVLPGYKYLGPFNGLDKGEPVNEADAAALEHDKAYDRQLDGGDNPYLKYNHADAEFQERLKEDTSFGGNLGRAVFQAKKRVLEPLGLVEEPVKTAPGKKRPVEHSLAEPDSSSGTGKAGQQPARRRLNFGQTGDADSVPDPQPLGQPPAAPSGLGTNTMATGSGAPMADNNEGADGVGNSSGNWHCDSTWMGDRVITTSTRTWALPTYNNHLYRQISSQSGASNDNHYFGYSTPWGYFDFNRFHCHFSPRDWQRLINNNWGSRPKRLNFKLFNIQVKEVTQNDGTTTIANNLTSTVQVFTDSEYQLPYVLGSAHQGCLPPFPADVFMVPQYGYLTLNNGSQAVGRSSFYCLEYFPSQMLRTGNNFTFSYTFEDVPFHSSYAHSQSLDRLMNPLVDQYLYYLSRTNTPSGTTTQSRLQFSQAGASDIRDQSRNWLPGPCYRQQRVSKTSADNNNSEYSWTGATKYHLNGRDSLVNPGPAMASHKDDEEKFFPQSGVLIFGKQDSGKTNVDIEKVMITDEEEIRTTNPVATEQYGSVSTNLQSGNTQAATSDVNTQGVLPGMVWQDRDVYLQGPIWAKIPHTDGHFHPSPLMGGFGLKHPPPQILIKNTPVPANPSTTFSAAKFASFITQYSTGQVSVEIEWELQKENSKRWNPEIQYTSNYNKSVNVDFTVDTNGVYSEPRPIGTRYLTRNL

SEQ ID NO: 314 - protein, 738 aa, Adeno-associated virus
MAADGYLPDWLEDNLSEGIREWWDLKPGAPKPKANQQKQDDGRGLVLPGYKYLGPFNGLDKGEPVNAADAAALEHDKAYDQQLKAGDNPYLRYNHADAEFQERLQEDTSFGGNLGRAVFQAKKRVLEPLGLVEEAAKTAPGKKRPVEPSPQRSPDSSAGIGKKGQQPAKKRLNFGQTGDSESVPDPQPIGEPPAGPSGLGSGTMAAGGGAPMADNNEGADGVGSSSGNWHCDSTWLGDRVITTSTRTWALPTYNNHLYKQISNGTSGGSTNDNTYFGYSTPWGYFDFNRFHCHFSPRDWQRLINNNWGFRPKRLSFKLFNIQVKEVTQNEGTETIANNLTSTIQVFTDSEYQLPYVLGSAHQGCLPPFPADVFMIPQYGYLTLNNGSQAVGRSSFYCLEYFPSQMLRTGNNFEFSYTFEDVPFHSSCAHSQSSDRLMNPLIDQYLYYLSRTRSTGGTQGTQQLLFSQAGPANMSAQAKNWLPGPCYRQQRVSTTLSQNNNSNFAWTGATKYHLNGRDSLVNPGVAMATHKDDEERFFPSSGVLMFGKQGAGRDNVDYSSVMLTSEEEIKTTNPVATEQYGVVADNLQQTNTGPIVGNVNSQGALPGMVWQNRDVYLQGPIWAKIPHTDGNFHPSPLMGGFGLKHPPPQILIKNTPVPADPPTTFSQAKLASFITQYSTGQVSVEIEWELQKENSKRWNPEIQYTSNYYKSTNVDFAVNTEGTYSEPRPIGTRYLTRNL

SEQ ID NO: 315 - DNA, 2217 bp, Adeno-associated virus
atggctgctgacggttatcttccagattggctcgaggacaacctctctgagggcattcgcgagtggtgggacctgaaacctggagcccccaagcccaaggccaaccagcagaagcaggacgacggccggggtctggtgcttcttggctacaagtacctcggacccttcaacggactcgacaagggggagcccgtcaatgcggcggacgcagcggccctcgagcacgacaaggcctacgaccagcagctcaaagcgggtgacaatccgtacctgcggtataaccacgccgacgccgagtttcaggagcgtctgcaagaagatacgtcttttgggggcaacctcgggcgagcagtcttccaggccaagaagcgggttctcgaacctctcggtctggttgaggaagctgctaagacggctcctggaaagaagagaccggtagaaccgtcacctcagcgttcccccgactcctccacgggcatcggcaagaaaggccagcagcccgctaaaaagagactgaactttggtcagactggcgactcagagtcagtccccgaccctcaaccaatcggagaaccaccagcaggcccctctggtctgggatctggtacaatggctgcaggcggtggcgctccaatggcagacaataacgaaggcgccgacggagtgggtagttcctcaggaaattggcattgcgattccacatggctgggcgacagagtcatcaccaccagcacccgaacctgggccctgcccacctacaacaaccacctctacaagcaaatatccaatgggacatcgggaggaagcaccaacgacaacacctacttcggctacagcaccccctgggggtattttgacttcaacagattccactgccacttctcaccacgtgactggcagcgactcatcaacaacaactggggattccggccaaaaagactcagcttcaagctcttcaacatccaggtcaaggaggtcacgcagaatgaaggcaccaagaccatcgccaataaccttaccagcacgattcaggtatttacggactcggaataccagctgccgtacgtcctcggctccgcgcaccagggctgcctgcctccgttcccggcggacgtcttcatgattccccagtacggctaccttacactgaacaatggaagtcaagccgtaggccgttcctccttctactgcctggaatattttccatctcaaatgctgcgaactggaaacaattttgaattcagctacaccttcgaggacgtgcctttccacagcggctacgcacacagccagagcttggaccgactgatgaatcctctcatcgaccagtacctgtactacttatccagaactcagtccacaggaggaactcaaggtacccagcaattgttattttctcaagctgggcctgcaaacatgtcggctcaggctaagaactggctacctggaccttgctaccggcagcagcgagtctctacgacactgtcgcaaaacaacaacagcaactttgcttggactggtgccaccaaatatcacctgaacggaagagactctttggtaaatcccggtgtcgccatggcaacccacaaggacgacgaggaacgcttcttcccgtcgagtggagtcctgatgtttggaaaacagggtgctggaagagacaatgtggactacagcagcgttatgctaaccagcgaagaagaaattaaaaccactaaccctgtagccacagaacaatacggtgtggtggctgacaacttgcagcaaaccaatacagggcctattgtgggaaatgtcaacagccaaggagccttacctggcatggtctggcagaaccgagacgtgtacctgcagggtcccatctgggccaagattcctcacacggacggcaacttccacccttcaccgctaatgggaggatttggactgaagcacccacctcctcagatcctgatcaagaacacgccggtacctgcggatcctccaacgacgttcagccaggcgaaattggcttccttcattacgcagtacagcaccggacaggtcagcgtggaaatcgagtgggagctgcagaaggagaacagcaaacgctggaacccagagattcagtacacttcaaactactacaaatctacaaatgtggactttgctgtcaatacagagggaacttattctgagcctcgccccattggtactcgttacctcacccgtaatctgtaa

SEQ ID NO: 316 - protein, 738 aa, Adeno-associated virus
MAADGYLPDWLEDNLSEGIREWWDLKPGAPKPKANQQKQDDGRGLVLLGYKYLGPFNGLDKGEPVNAADAAALEHDKAYDQQLKAGDNPYLRYNHADAEFQERLQEDTSFGGNLGRAVFQAKKRVLEPLGLVEEAAKTAPGKKRPVEPSPQRSPDSSTGIGKKGQQPAKKRLNFGQTGDSESVPDPQPIGEPPAGPSGLGSGTMAAGGGAPMADNNEGADGVGSSSGNWHCDSTWLGDRVITTSTRTWALPTYNNHLYKQISNGTSGGSTNDNTYFGYSTPWGYFDFNRFHCHFSPRDWQRLINNNWGFRPKRLSFKLFNIQVKEVTQNEGTKTIANNLTSTIQVFTDSEYQLPYVLGSAHQGCLPPFPADVFMIPQYGYLTLNNGSQAVGRSSFYCLEYFPSQMLRTGNNFEFSYTFEDVPFHSGYAHSQSLDRLMNPLIDQYLYYLSRTQSTGGTQGTQQLLFSQAGPANMSAQAKNWLPGPCYRQQRVSTTLSQNNNSNFAWTGATKYHLNGRDSLVNPGVAMATHKDDEERFFPSSGVLMFGKQGAGRDNVDYSSVMLTSEEEIKTTNPVATEQYGVVADNLQQTNTGPIVGNVNSQGALPGMVWQNRDVYLQGPIWAKIPHTDGNFHPSPLMGGFGLKHPPPQILIKNTPVPADPPTTFSQAKLASFITQYSTGQVSVEIEWELQKENSKRWNPEIQYTSNYYKSTNVDFAVNTEGTYSEPRPIGTRYLTRNL

SEQ ID NO: 317 - protein, 735 aa, Adeno-associated virus
MAADGYLPDWLEDTLSEGIRQWWKLKPGPPPPKPAERHKDDSRGLVLPGYKYLGPFNGLDKGEPVNEADAAALEHDKAYDRQLDSGDNPYLKYNHADAEFQERLKEDTSFGGNLGRAVFQAKKRVLEPLGLVEPPVKTAPGKKRPVEHSPAEPDSSSGTGKAGQQPARKRLNFGQTGDADSVPDPQPLGQPPAAPSGLGSTTMATGSGAPMADNNEGADGVGNSSGNWHCDSQWLGDRVITTSTRTWALPTYNNHLYKQISSQSGASNDNHYFGYSTPWGYFDFNRFHCHFSPRDWQRLINNNWGFRPKRLNFKLFNIQVKEVTQNDGTTTIANNLTSTVQVFTDSEYQLPYVLGSAHQGCLPPFPADVFMVPQYGYLTLNNGSQAVGRSSFYCLEYFPSQMLRTGNNFQFSYTFEDVPFHSSYAHSQSLDRLMNPLIDQYLYYLNKTQSNSGTLQQSRLLFSQAGPTSMSLQAKNWLPGPCYRQQRLSKQANDNNNSNFPWTAATKYHLNGRDSLVNPGPAMASHKDDEEKFFPMHGTLIFGKQGTNANDADLDNVMITDEEEIRTTNPVATEQYGYVSNNLQNSNTGPTTGTVNHQGALPGMVWQDRDVYLQGPIWAKIPHTDGHFHPSPLMGGFGLKHPPPQIMIKNTPVPANPPTNFSSAKFASFITQYSTGQVSVEIEWELQKENSKRWNPEIQYTSNYNKSVNVDFTVDTNGVYSEPRPIGTRYLTRNL

SEQ ID NO: 318 - protein, 735 aa, Adeno-associated virus
MAADGYLPDWLEDTLSEGIRQWWKLKPGPPPPKPAERHKDDSRGLVLPGYKYLGPFNGLDKGEPVNEADAAALEHDKAYDRQLDSGDNPYLKYNHADAEFQERLKEDTSFGGNLGRAVFQAKKRVLEPLGLVEGPVKTAPGKKRPVEHSPAEPDSSSGTGKAGQQPARKRLNFGQTGDADSVPDPQPLGQPPAAPSGLGSTTMATGSGAPMADNNEGADGVGNSSGNWHCDSQWLGDRVITTSTRTWALPTYNNHLYKQISSQSGASNDNHYFGYSTPWGYFDFNRFHCHFSPRDWQRLINNNWGFRPKRLNFKLFNIQVKEVTQNDGTTTIANNLTSTVQVFTDSEYQLPYVLGSAHQGCLPPFPADVFMVPQYGYLTLNNGSQAVGRSSFYCLEYFPSQMLRTGNNFQFSYTFEDVPFHSSYAHSQSLDRLMNPLIDQYLYYLNKTQSNSGTLQQSRLLFSQAGPTSMSLQAKNWLPGPCYRQQRLSKQANDNNNSNFPWTAATKYHLNGRDSLVNPGPAMASHKDDEEKFFPMHGTLIFGKQGTNANDADLDNVMITDEEEIRTTNPVATEQYGYVSNNLQNSNTGPTTGTVNHQGALPGMVWQDRDVYLQGPIWAKIPHTDGHFHPSPLMGGFGLKHPPPQIMIKNTPVPANPPTNFSSAKFASFITQYSTGQVSVEIEWELQKENSKRWNPEIQYTSNYNKSVNVDFTVDTNGVYSEPRPIGTRYLTRNL

SEQ ID NO: 319 - DNA, 2208 bp, Adeno-associated virus
atggctgccgatggttatcttccagattggctcgaggacactctctctgaaggaataagacagtggtggaagctcaaacctggcccaccaccaccaaagcccgcagagcggcataaggacgacagcaggggtcttgtgcttcctgggtacaagtacctcggacccttcaacggactcgacaagggggagccggtcaacgaggcagacgccgcggccctcgagcacgacaaggcctacgaccggcagctcgacagcggagacaacccgtacctcaagtacaaccacgccgacgcggagtttcaggagcgtcttaaagaagatacgtcttttgggggcaacctcggacgagcagtcttccaggcgaaaaagagggttcttgaacctctgggcctggttgagggacctgttaagacggctccgggaaaaaagaggccggtagagcactctcctgcggagccagactcctcctcgggaaccggaaaagcgggccagcagcctgcaagaaaaagattgaattttggtcagactggagacgcagactccgtacctgacccccagcctctcggacagccaccagcagccccctctggtttgggatctactacaatggctacaggcagtggcgcaccaatggcagacaataacgagggtgccgatggagtgggtaattcctcaggaaattggcattgcgattcccaatggctgggcgacagagtcatcaccaccagcacccgaacctgggccctgcccacctacaacaaccacctctacaagcaaatctcaagccaatcaggagcctcaaacgacaaccactactttggctacagcaccccttgggggtattttgacttcaacagattccactgccacttttcaccacgtgactggcaaagactcatcaacaacaactggggattccgacccaagagactcaacttcaagctctttaacattcaagtcaaagaggtcacgcagaatgacggtacgacgacgattgccaataaccttaccagcacggttcaggtgtttactgactcggagtaccagctcccgtacgtcctcgggtcggcgcatcaaggatgcctcccgccgtttccagcggacgtcttcatggtcccacagtatggatacctcaccctgaacaacgggagtcaggcggtaggacgctcttccttttactgcctggagtactttccttctcagatgcttcgtactggaaacaactttcagttcagctacacctttgaagacgttcctttccacagcagctacgctcacagccagagtctggatcggctgatgaatcctctgatcgaccagtacctgtattatctgaacaaaacacaatcaaatagtggaactcttcagcagtctcggctactgtttagtcaagctggacccaccagcatgtctcttcaagctaaaaactggctacctggaccttgctacagacagcagcgtctgtcaaagcaggcaaacgacaacaacaacagcaactttccctggactgcggctacaaagtatcacctaaatggccgggactcgttggttaatccaggaccagctatggccagtcacaaagacgatgaagaaaagtttttccccatgcatggaaccctgatatttggtaaacaaggaacaaatgctaacgacgcggatttggacaatgtcatgattacagatgaagaagaaatccgcaccaccaatcccgtggctacggagcagtacggatatgtgtcaaataatttgcaaaactcaaatactggtccaactactggaactgtcaatcaccaaggagcgttacctggcatggtgtggcaggatcgagacgtgtacctgcagggacccatttgggccaagattcctcacaccgatggacactttcatccttctccactgatgggaggttttgggctcaaacacccgcctcctcagatcatgatcaaaaacactcccgttccagccaatcctcccacaaacttcagttctgccaagtttgcttctttcatcacacagtattccacggggcaggtcagcgtggagatcgagtgggagctgcagaaagagaacagcaaacgctggaatcccgaaattcagtacacttccaactacaacaaatctgttaatgtggactttactgtggacactaatggcgtgtattcagagcctcgccccattggcaccagatacctgactcgtaatctgtaa

SEQ ID NO: 320 - DNA, 2211 bp, Adeno-associated virus; identical to SEQ ID NO: 1

SEQ ID NO: 321 - DNA, 2208 bp, Adeno-associated virus
atggctgccgatggttatcttccagattggctcgaggacactctctctgaaggaacaagacagtggtggaagctcaaacctggcccaccaccaccaaagcccgcagagcggcataaggacgacagcaggggtcttgtgcttcctgggtacaagtacctcggacccttcaacggactcgacaagggggagccggtcaacgaggcagacgccgcggccctcgagcacgacaaggcctacgaccggcagctcgacagcggagacaacccgtacctcaagtacaaccacgccgacgcggagtttcaggagcgtcttaaagaagatacgtcttttgggggcaacctcggacgagcagtcttccaggcgaaaaagagggttcttgaacctctgggcctggttgaggaacctgttaagacggctccgggaaaaaagaggccggtagagcactctcctgcggagccagactcctcctcgggaaccggaaaagcgggccagcagcctgcaagaaaaagattgaattttggtcagactggagacgcagactccgtacctgacccccagcctctcggacagccaccagcagccccctctggtttgggatctactacaatggctacaggcagtggcgcaccaatggcagacaataacgagggtgccgatggagtgggtaattcctcaggaaattggcattgcgattcccaatggctgggcgacagagtcatcaccaccagcacccgaacctgggccctgcccacctacaacaaccacctctacaagcaaatctcaagccaatcaggagcctcaaacgacaaccactactttggctacagcaccccttgggggtattttgacttcaacagattccactgccacttttcaccacgtgactggcaaagactcatcaacaacaactggggattccgacccaagagactcaacttcaagctctttaacattcaagtcaaagaggtcacgcagaatgacggtacgacgacgattgccaataaccttaccagcacggttcaggtgtttactgactcggagtaccagctcccgtacgtcctcgggtcggcgcatcaaggatgcctcccgccgtttccagcggacgtcttcatggtcccacagtatggatacctcaccctgaacaacgggagtcaggcggtaggacgctcttccttttactgcctggagtactttccttctcagatgcttcgtactggaaacaactttcagttcagctacacctttgaagacgttcctttccacagcagctacgctcacagccagagtctggatcggctgatgaatcctctgatcgaccagtacctgtattatctgaacaaaacacaatcaaatagtggaactcttcagcagtctcggctactgtttagtcaagctggacccaccagcatgtctcttcaagctaaaaactggctacctggaccttgctacagacagcagcgtctgtcaaagcaggcaaacgacaacaacaacagcaactttccctggactgcggctacaaagtaccacctaaatggccgggactcgttggttaatccaggaccagctatggccagtcacaaagacgatgaagaaaagtttttccccatgcatggaaccctgatatttggtaaacaaggaacaaatgctaacgacgcggatttggacaatgtcatgattacagatgaagaagaaatccgcaccaccaatcccgtggctacggagcagtacggatatgtgtcaaataatttgcaaaactcaaatactggtccaactactggaactgtcaatcaccaaggagcgttacctggcatggtgtggcaggatcgagacgtgtacctgcagggacccatttgggccaagattcctcacaccgatggacactttcatccttctccactgatgggaggttttgggctcaaacacccgcctcctcagatcatgatcaaaaacactcccgttccagccaatcctcccacaaacttcagttctgccaagtttgcttctttcatcacacagtattccacggggcaggtcagcgtggagatcgagtgggagctgcagaaagagaacagcaaacgctggaatcccgaaattcagtacacttccaactacaacaaatctgttaatgtggactttactgtggacactaatggcgtgtattcagagcctcgccccattggcaccagatacctgactcgtaatctgtaa

SEQ ID NO: 322 - DNA, 2217 bp, Adeno-associated virus
atggctgctgacggttatcttccagattggctcgaggacaacctctctgagggcattcgcgagtggtgggacctgaaacctggagcccccaagcccaaggccaaccagcagaagcaggacgacggccggggtctggtgcttcctggctacaagtacctcggacccttcaacggactcgacaagggggagcccgtcaacgcggcggacgcagcggccctcgagcacgacaaggcctacgaccagcagctcaaagcgggtgacaatccgtacctgcggtataaccacgccgacgccgagtttcaggagcgtctgcaagaagatacgtcttttgggggcaacctcgggcgagcagtcttccaggccaagaagcgggttctcgaacctctcggtctggttgaggaagctgctaagacggctcctggaaagaagagaccggtagaaccgtcacctcagcgttcccccgactcctccacgggcatcggcaagaaaggccagcagcccgctaaaaagagactgaactttggtcagactggcgactcagagtcagtccccgaccctcaaccaatcggagaaccacctgcaggcccctctggtctgggatctggtacaatggctgcaggcggtggcgctccaatggcagacaataacgaaggcgccgacggagtgggtagttcctcaggaaattggcattgcgattccacatggctgggcgacagagtcatcaccaccagcacccgaacctgggccctgcccacctacaacaaccacctctacaagcaaatatccaatgggacatcgggagggagcaccaacgacaacacctacttcggctacagcaccccctgggggtattttgacttcaacagattccactgccacttctcaccacgtgactggcagcgactcatcaacaacaactggggattccggccaaaaagactcagcttcaagctcttcaacatccaggtcaaggaggtcacgcagaatgaaggcaccaagaccatcgccaataaccttaccagcacgattcaggtatttacggactcggaataccagctgccgtacgtcctcggctccgcgcaccagggctgcctgcctccgttcccggcggacgtcttcatgattccccagtacggctaccttacactgaacaatggaagtcaagccgtaggccgttcctccttctactgcctggaatattttccatctcaaatgctgcgaactggaaacaattttgaattcagctacaccttcgaggacgtgcctttccacagcagctacgcacacagccagagcttggaccgactgatgaatcctctcatcgaccagtacctgtactacttatccagaactcagtccacaggaggaactcaaggtacccagcaattgttattttctcaagctgggcctgcaaacatgtcggctcaggctaagaactggctacctggaccttgctaccggcagcagcgagtctctacgacactgtcgcaaaacaacaacagcaactttgcttggactggtgccaccaaatatcacctgaacggaagagactctttggtaaatcccggtgtcgccatggcaacccacaaggacgacgaggaacgcttcttcccgtcgagtggagtcctgatgtttggaaaacagggtgctggaagagacaatgtggactacagcagcgttatgctaaccagcgaagaagaaattaaaaccactaaccctgtagccacagaacaatacggtgtggtggctgacaacttgcagcaaaccaatacagggcctattgtgggaaatgtcaacagccaaggagccttacctggcatggtctggcagaaccgagacgtgtacctgcagggtcccatctgggccaagattcctcacacggacggcaactgccacccttcaccgctaatgggaggatttggactgaagcacccacctcctcagatcctgatcaagaacacgccggtacctgcggatcctccaacaacgttcagccaggcgaaattggcttccttcattacgcagtacagcaccggacaggtcagcgtggaaatcgagtgggagctgcagaaggagaacagcaaacgctggaacccagagattcagtacacttcaaactactacaaatctacaaatgtggactttgctgtcaatacagagggaacttattctgagcctcgccccattggtactcgttacctcacccgtaatctgtaa

SEQ ID NO: 323 - protein, 735 aa, Adeno-associated virus
MAADGYLPDWLEDTLSEGTRQWWKLKPGPPPPKPAERHKDDSRGLVLPGYKYLGPFNGLDKGEPVNEADAAALEHDKAYDRQLDSGDNPYLKYNHADAEFQERLKEDTSFGGNLGRAVFQAKKRVLEPLGLVEEPVKTAPGKKRPVEHSPAEPDSSSGTGKAGQQPARKRLNFGQTGDADSVPDPQPLGQPPAAPSGLGSTTMATGSGAPMADNNEGADGVGNSSGNWHCDSQWLGDRVITTSTRTWALPTYNNHLYKQISSQSGASNDNHYFGYSTPWGYFDFNRFHCHFSPRDWQRLINNNWGFRPKRLNFKLFNIQVKEVTQNDGTTTIANNLTSTVQVFTDSEYQLPYVLGSAHQGCLPPFPADVFMVPQYGYLTLNNGSQAVGRSSFYCLEYFPSQMLRTGNNFQFSYTFEDVPFHSSYAHSQSLDRLMNPLIDQYLYYLNKTQSNSGTLQQSRLLFSQAGPTSMSLQAKNWLPGPCYRQQRLSKQANDNNNSNFPWTAATKYHLNGRDSLVNPGPAMASHKDDEEKFFPMHGTLIFGKQGTNANDADLDNVMITDEEEIRTTNPVATEQYGYVSNNLQNSNTGPTTGTVNHQGALPGMVWQDRDVYLQGPIWAKIPHTDGHFHPSPLMGGFGLKHPPPQIMIKNTPVPANPPTNFSSAKFASFITQYSTGQVSVEIEWELQKENSKRWNPEIQYTSNYNKSVNVDFTVDTNGVYSEPRPIGTRYLTRNL

SEQ ID NO: 324 - DNA, 2208 bp, Adeno-associated virus
atggctgccgatggttatcttccagattggctcgaggacactctctctgaaggaataagacagtggtggaagctcaaacctggcccaccaccaccaaagcccgcagagcggcatcaggacaacagcaggggtcttgtgcttcctgggtacaagtacctcggaccctccaacggactcgacaaaggagagccggtcaacgaggcagacgccgcggccctcgagcacgacaaggcctacgaccggcagctcgacagcggagacaacccgtacctcaagtacaaccacgccgacgcggagtttcaggagcgtcttaaagaagatacgtcttttgggggcaacctcggacgagcagtcttccaggcgaaaaagagggttcttgaacctctgggcctggttgaggaacctgttaagacggctccgggaaaaaagaggccggtagagcactctcctgtggagccagactcctcctcgggaaccggaaaagcgggccatcagcctgcgagaaagagattgaattttggtcagactggagacgcagactccgtacctgacccccagcctctcggacagccaccagcagcccccacaagtttgggatctactacaatggctacaggcagtggcgcaccaatggcagacaataacgagggtgccgatggagtgggtaattcctcaggaaattggcattgcgattcccaatggctgggcgacagagtcatcaccaccagcacccgaacctgggccctgcccacctacaacaaccacctctacaagcaaatctccagccaatcaggagcctcgaacgacaaccactactttggctgcagcaccccctgggggtattttgacttcaacagattccactgtcacttctccccacgtgattggcaaagactcatcaacaacaactggggattccgacccaagagactcaacttcaagctctttaacattcaagtcaaagaggtcacgcagaatgacggtacgacgacgattgccaataaccttaccagcacggttcaggtgtttactgactcggagtacccgctcccgtacgtcctcggctcggcgcatcaaggatgcctcccgccgtttccagcggacgtcttcatggtcccacagtatggatacctcaccctgaacaacgggagtcaggcggtaggacgctcttccttttactgcctggagtactttccttctcagatgctgcgtaccggaaacaactttaccttcagctacacctttgaggacgttcctttccacagcagctacgctcacagccagagtttggaccggctgatgaatcctctgatcgaccagtatctatattatctgaacaggacacaatcaaatagtggaactcttcagcagtctaggctactgtttagccaagctggacccaccagcatgtctcttcaagctaaaaactggctgcctggaccttgctacagacagcagcgtctttcaaagcaggcaaacgacaacaacaacagcaactttccctggactgcggctacaaagtatcatctaaatggccgggactcgttggttaatccaggaccagctatggccagccacaaagacgatgaagaaaagtttttccccatgcatggaaccctgatatttggtaaacaaggaacaaatgctaacgacgcggatttggagcatgttatgattacagatgaagaagaaatcaggaccaccaatcctgtggctacagagcagtacggaaacgtgtcaaataatttgcaaaactcaaatactggtccaactacagaaaatgtcaatcaccagggagcgttacctggtatggtgtggcaggatcgagacgtgtacctgcagggacccatttgggccaagattcctcacaccgacggacactttcacccttctccactgatgggaggttttggactcaaacacccgcctcctcaaatcatgatcaaaaacactcccgttccagccaatcctcccacaaacttcagttctgccaagtttgcttctttcatcacacagtattccacgggccaggtcagcgtggagattgagtgggagctgcagaaggagaacagcaaacgctggaaccccgagatccagtatacttccaactacaacaaatctgttaatgtggactttactgtggacactaatggtgtgtattcagagccttgccccattggcaccagatacctgactcgtaatctgtaa

SEQ ID NO: 325 - protein, 735 aa, Adeno-associated virus
MAADGYLPDWLEDTLSEGIRQWWKLKPGPPPPKPAERHQDNSRGLVLPGYKYLGPSNGLDKGEPVNEADAAALEHDKAYDRQLDSGDNPYLKYNHADAEFQERLKEDTSFGGNLGRAVFQAKKRVLEPLGLVEEPVKTAPGKKRPVEHSPVEPDSSSGTGKAGHQPARKRLNFGQTGDADSVPDPQPLGQPPAAPTSLGSTTMATGSGAPMADNNEGADGVGNSSGNWHCDSQWLGDRVITTSTRTWALPTYNNHLYKQISSQSGASNDNHYFGCSTPWGYFDFNRFHCHFSPRDWQRLINNNWGFRPKRLNFKLFNIQVKEVTQNDGTTTIANNLTSTVQVFTDSEYPLPYVLGSAHQGCLPPFPADVFMVPQYGYLTLNNGSQAVGRSSFYCLEYFPSQMLRTGNNFTFSYTFEDVPFHSSYAHSQSLDRLMNPLIDQYLYYLNRTQSNSGTLQQSRLLFSQAGPTSMSLQAKNWLPGPCYRQQRLSKQANDNNNSNFPWTAATKYHLNGRDSLVNPGPAMASHKDDEEKFFPMHGTLIFGKQGTNANDADLEHVMITDEEEIRTTNPVATEQYGNVSNNLQNSNTGPTTENVNHQGALPGMVWQDRDVYLQGPIWAKIPHTDGHFHPSPLMGGFGLKHPPPQIMIKNTPVPANPPTNFSSAKFASFITQYSTGQVSVEIEWELQKENSKRWNPEIQYTSNYNKSVNVDFTVDTNGVYSEPCPIGTRYLTRNL

SEQ ID NO: 326 - DNA, 2214 bp, Artificial Sequence
  Description of Artificial Sequence: Synthetic polynucleotide
atggctgccgatggttatcttccagattggctcgaggacaaccttagtgaaggaattcgcgagtggtgggctttgaaacctggagcccctcaacccaaggcaaatcaacaacatcaagacaacgctcgaggtcttgtgcttccgggttacaaataccttggacccggcaacggactcgacaagggggagccggtcaacgcagcagacgcggcggccctcgagcacgacaaggcctacgaccagcagctgcaggcgggtgacaatccgtacctgcggtataaccacgccgacgccgagtttcaggagcgtctgcaagaagatacgtcttttgggggcaaccttggcagagcagtcttccaggccaaaaagaggatccttgagcctcttggtctggttgaggaagcagctaaaacggctcctggaaagaagaggcctgtagatcagtctcctcaggaaccggactcatcatctggtgttggcaaatcgggcaaacagcctgccagaaaaagactaaatttcggtcagactggcgactcagagtcagtcccagaccctcaacctctcggagaaccaccagcagcccccacaagtttgggatctaatacaatggcttcaggcggtggcgcaccaatggcagacaataacgagggtgccgatggggtgggtagttcctcgggaaattggcattgcgattcccaatggctgggggacagagtcatcaccaccagcacccgaacctgggccctgcccacctacaacaatcacctctacaagcaaatctccaacgggacatcgggaggagccaccaacgacaacacctacttcggctacagcaccccctgggggtattttgactttaacagattccactgccacttttcaccacgtgactggcagcgactcatcaacaacaactggggattccggcccaagagactcagcttcaagctcttcaacatccaggtcaaggaggtcacgcagaatgaaggcaccaagaccatcgccaataacctcaccagcaccatccaggtgtttacggactcggagtaccagctgccgtacgttctcggctctgcgcaccagggctgcctccctccgttcccggcggacgtgttcatgattccgcaatacggctacctgacgctcaacaatggcagccaagccgtgggacgttcatccttttactgcctggaatatttcccttctcagatgctgagaacgggcaacaactttaccttcagctacacctttgaggaagtgcctttccacagcagctacgcgcacagccagagcttggaccggctgatgaatcctctgattgaccagtacctgtactacttgtctcggactcaaacaacaggaggcacggcaaatacgcagactctgggcttcagccaaggtgggcctaatacaatggccaatcaggcaaagaactggctgccaggaccctgttaccgccaacaacgcgtctcaacgacaaccgggcaaaacaacaatagcaactttgcctggactgctgggaccaaataccatctgaatggaagaaattcattggctaatcctggcatcgctatggcaacacacaaagacgacgaggagcgtttttttcccagtaacgggatcctgatttttggcaaacaaaatgctgccagagacaatgcggattacagcgatgtcatgctcaccagcgaggaagaaatcaaaaccactaaccctgtggctacagaggaatacggtatcgtggcagataacttgcagcagcaaaacacggctcctcaaattggaactgtcaacagccagggggccttacccggtatggtctggcagaaccgggacgtgtacctgcagggtcccatctgggccaagattcctcacacggacggcaacttccacccgtctccgctgatgggcggctttggcctgaaacatcctccgcctcagatcctgatcaagaacacgcctgtacctgcggatcctccgaccaccttcaaccagtcaaagctgaactctttcatcacgcaatacagcaccggacaggtcagcgtggagatcgagtgggagctgcagaaggaaaacagcaagcgctggaacccggagatccagtacacttccaactattacaagtctaataatgttgaatttgctgttaatactgaaggtgtatatagtgaaccccgccccattggcaccagatacctgactcgtaatctgtaa

SEQ ID NO: 327 - protein, 737 aa, Artificial Sequence
  Description of Artificial Sequence: Synthetic polypeptide
MAADGYLPDWLEDNLSEGIREWWALKPGAPQPKANQQHQDNARGLVLPGYKYLGPGNGLDKGEPVNAADAAALEHDKAYDQQLQAGDNPYLRYNHADAEFQERLQEDTSFGGNLGRAVFQAKKRILEPLGLVEEAAKTAPGKKRPVDQSPQEPDSSSGVGKSGKQPARKRLNFGQTGDSESVPDPQPLGEPPAAPTSLGSNTMASGGGAPMADNNEGADGVGSSSGNWHCDSQWLGDRVITTSTRTWALPTYNNHLYKQISNGTSGGATNDNTYFGYSTPWGYFDFNRFHCHFSPRDWQRLINNNWGFRPKRLSFKLFNIQVKEVTQNEGTKTIANNLTSTIQVFTDSEYQLPYVLGSAHQGCLPPFPADVFMIPQYGYLTLNNGSQAVGRSSFYCLEYFPSQMLRTGNNFTFSYTFEEVPFHSSYAHSQSLDRLMNPLIDQYLYYLSRTQTTGGTANTQTLGFSQGGPNTMANQAKNWLPGPCYRQQRVSTTTGQNNNSNFAWTAGTKYHLNGRNSLANPGIAMATHKDDEERFFPSNGILIFGKQNAARDNADYSDVMLTSEEEIKTTNPVATEEYGIVADNLQQQNTAPQIGTVNSQGALPGMVWQNRDVYLQGPIWAKIPHTDGNFHPSPLMGGFGLKHPPPQILIKNTPVPADPPTTFNQSKLNSFITQYSTGQVSVEIEWELQKENSKRWNPEIQYTSNYYKSNNVEFAVNTEGVYSEPRPIGTRYLTRNL

SEQ ID NO: 328 - DNA, 2211 bp, Artificial Sequence
  Description of Artificial Sequence: Synthetic polynucleotide
atggctgccgatggttatcttccagattggctcgaggacaacctctctgagggcattcgcgagtggtgggacttgaaacctggagccccgaagcccaaagccaaccagcaaaagcaggacgacggccggggtctggtgcttcctggctacaagtacctcggacccttcaacggactcgacaagggggagcccgtcaacgcggcggacgcagcggccctcgagcacgacaaggcctacgaccagcagctcaaagcgggtgacaatccgtacctgcggtataaccacgccgacgccgagtttcaggagcgtctgcaagaagatacgtcttttgggggcaacctcgggcgagcagtcttccaggccaagaagcgggttctcgaacctctcggtctggttgaggaaggcgctaagacggctcctggaaagaaacgtccggtagagcagtcgccacaagagccagactcctcctcgggcatcggcaagacaggccagcagcccgctaaaaagagactcaattttggtcagactggcgactcagagtcagtccccgacccacaacctctcggagaacctccagcaacccccgctgctgtgggacctactacaatggcttcaggcggtggcgcaccaatggcagacaataacgaaggcgccgacggagtgggtaatgcctcaggaaattggcattgcgattccacatggctgggcgacagagtcatcaccaccagcacccgaacatgggccttgcccacctataacaaccacctctacaagcaaatctccagtgcttcaacgggggccagcaacgacaaccactacttcggctacagcaccccctgggggtattttgatttcaacagattccactgccatttctcaccacgtgactggcagcgactcatcaacaacaattggggattccggcccaagagactcaacttcaagctcttcaacatccaagtcaaggaggtcacgacgaatgatggcgtcacgaccatcgctaataaccttaccagcacggttcaagtcttctcggactcggagtaccagctgccgtacgttctcggctctgcccaccagggctgcctgcctccgttcccggcggacgtgttcatgattccccagtacggctacctaacactcaacaacggtagtcaggccgtgggacgctcctccttctactgcctggaatactttccttcgcagatgctgagaaccggcaacaacttccagtttacttacaccttcgaggacgtgcctttccacagcagctacgcccacagccagagcttggaccggctgatgaatcctctgattgaccagtacctgtactacttgtctcggactcaaacaacaggaggcacggcaaatacgcagactctgggcttcagccaaggtgggcctaatacaatggccaatcaggcaaagaactggctgccaggaccctgttaccgccaacaacgcgtctcaacgacaaccgggcaaaacaacaatagcaattttacctggactggtgcttcaaaatataacctcaatgggcgtgaatccatcatcaaccctggcactgctatggcctcacacaaagacgacgaagacaagttctttcccatgagcggtgtcatgatttttggaaaagagagcgccggagcttcaaacactgcattggacaatgtcatgattacagacgaagaggaaattaaagccactaaccctgtggccaccgaaagatttgggaccgtggcagtcaatttccagagcagcagcacagaccctgcgaccggagatgtgcatgctatgggagcattacctggcatggtgtggcaagatagagacgtgtacctgcagggtcccatttgggccaaaattcctcacacagatggacactttcacccgtctcctcttatgggcggctttggactcaagaacccgcctcctcagatcctcatcaaaaacacgcctgttcctgcgaatcctccggcggagttttcagctacaaagtttgcttcattcatcacccaatactccacaggacaagtgagtgtggaaattgaatgggagctgcagaaagaaaacagcaagcgctggaatcccgaagtgcagtacacatccaattatgcaaaatctgccaacgttgattttactgtggacaacaatggactttatactgagcctcgccccattggcacccgttacctcacccgtcccctgtaa

SEQ ID NO: 329 - protein, 736 aa, Artificial Sequence
  Description of Artificial Sequence: Synthetic polypeptide
MAADGYLPDWLEDNLSEGIREWWDLKPGAPKPKANQQKQDDGRGLVLPGYKYLGPFNGLDKGEPVNAADAAALEHDKAYDQQLKAGDNPYLRYNHADAEFQERLQEDTSFGGNLGRAVFQAKKRVLEPLGLVEEGAKTAPGKKRPVEQSPQEPDSSSGIGKTGQQPAKKRLNFGQTGDSESVPDPQPLGEPPATPAAVGPTTMASGGGAPMADNNEGADGVGNASGNWHCDSTWLGDRVITTSTRTWALPTYNNHLYKQISSASTGASNDNHYFGYSTPWGYFDFNRFHCHFSPRDWQRLINNNWGFRPKRLNFKLFNIQVKEVTTNDGVTTIANNLTSTVQVFSDSEYQLPYVLGSAHQGCLPPFPADVFMIPQYGYLTLNNGSQAVGRSSFYCLEYFPSQMLRTGNNFQFTYTFEDVPFHSSYAHSQSLDRLMNPLIDQYLYYLSRTQTTGGTANTQTLGFSQGGPNTMANQAKNWLPGPCYRQQRVSTTTGQNNNSNFTWTGASKYNLNGRESIINPGTAMASHKDDEDKFFPMSGVMIFGKESAGASNTALDNVMITDEEEIKATNPVATERFGTVAVNFQSSSTDPATGDVHAMGALPGMVWQDRDVYLQGPIWAKIPHTDGHFHPSPLMGGFGLKNPPPQILIKNTPVPANPPAEFSATKFASFITQYSTGQVSVEIEWELQKENSKRWNPEVQYTSNYAKSANVDFTVDNNGLYTEPRPIGTRYLTRPL

SEQ ID NO: 330 - DNA, 2211 bp, Artificial Sequence
  Description of Artificial Sequence: Synthetic polynucleotide
atggctgctgacggttatcttccagattggctcgaggacaacctttctgaaggcattcgagagtggtgggcgctgcaacctggagcccctaaacccaaggcaaatcaacaacatcaggacaacgctcggggtcttgtgcttccgggttacaaatacctcggacccggcaacggactcgacaagggggaacccgtcaacgcagcggacgcggcagccctcgagcacgacaaggcctacgaccagcagctcaaggccggtgacaacccctacctcaagtacaaccacgccgacgccgagttccaggagcggctcaaagaagatacgtcttttgggggcaacctcgggcgagcagtcttccaggccaaaaagaggcttcttgaacctcttggtctggttgaggaagcggctaagacggctcctggaaagaagaggcctgtagatcagtctcctcaggaaccggactcatcatctggtgttggcaaatcgggcaaacagcctgccagaaaaagactaaatttcggtcagactggcgactcagagtcagtcccagaccctcaacctctcggagaaccaccagcagcccccacaagtttgggatctaatacaatggcttcaggcggtggcgcaccaatggcagacaataacgagggtgccgatggagtgggtaattcctcaggaaattggcattgcgattcccaatggctgggcgacagagtcatcaccaccagcaccagaacctgggccctgcccacttacaacaaccatctctacaagcaaatctccagccaatcaggagcttcaaacgacaaccactactttggctacagcaccccttgggggtattttgactttaacagattccactgccacttctcaccacgtgactggcagcgactcattaacaacaactggggattccggcccaagaaactcagcttcaagctcttcaacatccaagttaaagaggtcacgcagaacgatggcacgacgactattgccaataaccttaccagcacggttcaagtgtttacggactcggagtatcagctcccgtacgtgctcgggtcggcgcaccaaggctgtctcccgccgtttccagcggacgtcttcatggtccctcagtatggatacctcaccctgaacaacggaagtcaagcggtgggacgctcatccttttactgcctggagtacttcccttcgcagatgctaaggactggaaataacttccaattcagctataccttcgaggatgtaccttttcacagcagctacgctcacagccagagtttggatcgcttgatgaatcctcttattgatcagtatctgtactacctgaacagaacgcaaggaacaacctctggaacaaccaaccaatcacggctgctttttagccaggctgggcctcagtctatgtctttgcaggccagaaattggctacctgggccctgctaccggcaacagagactttcaaagactgctaacgacaacaacaacagtaactttccttggacagcggccagcaaatatcatctcaatggccgcgactcgctggtgaatccaggaccagctatggccagtcacaaggacgatgaagaaaaatttttccctatgcacggcaatctaatatttggcaaagaagggacaacggcaagtaacgcagaattagataatgtaatgattacggatgaagaagagattcgtaccaccaatcctgtggcaacagagcagtatggaactgtggcaaataacttgcagagctcaaatacagctcccacgactagaactgtcaatgatcagggggccttacctggcatggtgtggcaagatcgtgacgtgtaccttcaaggacctatctgggcaaagattcctcacacggatggacactttcatccttctcctctgatgggaggctttggactgaaacatccgcctcctcaaatcatgatcaaaaatactccggtaccggcaaatcctccgacgactttcagcccggccaagtttgcttcatttatcactcagtactccactggacaggtcagcgtggaaattgagtgggagctacagaaagaaaacagcaaacgttggaatccagagattcagtacacttccaactacaacaagtctgttaatgtggactttactgtagacactaatggtgtttatagtgaacctcgccccattggcacccgttaccttacccgtcccctgtaa

SEQ ID NO: 331 - protein, 736 aa, Artificial Sequence
  Description of Artificial Sequence: Synthetic polypeptide
MAADGYLPDWLEDNLSEGIREWWALQPGAPKPKANQQHQDNARGLVLPGYKYLGPGNGLDKGEPVNAADAAALEHDKAYDQQLKAGDNPYLKYNHADAEFQERLKEDTSFGGNLGRAVFQAKKRLLEPLGLVEEAAKTAPGKKRPVDQSPQEPDSSSGVGKSGKQPARKRLNFGQTGDSESVPDPQPLGEPPAAPTSLGSNTMASGGGAPMADNNEGADGVGNSSGNWHCDSQWLGDRVITTSTRTWALPTYNNHLYKQISSQSGASNDNHYFGYSTPWGYFDFNRFHCHFSPRDWQRLINNNWGFRPKKLSFKLFNIQVKEVTQNDGTTTIANNLTSTVQVFTDSEYQLPYVLGSAHQGCLPPFPADVFMVPQYGYLTLNNGSQAVGRSSFYCLEYFPSQMLRTGNNFQFSYTFEDVPFHSSYAHSQSLDRLMNPLIDQYLYYLNRTQGTTSGTTNQSRLLFSQAGPQSMSLQARNWLPGPCYRQQRLSKTANDNNNSNFPWTAASKYHLNGRDSLVNPGPAMASHKDDEEKFFPMHGNLIFGKEGTTASNAELDNVMITDEEEIRTTNPVATEQYGTVANNLQSSNTAPTTRTVNDQGALPGMVWQDRDVYLQGPIWAKIPHTDGHFHPSPLMGGFGLKHPPPQIMIKNTPVPANPPTTFSPAKFASFITQYSTGQVSVEIEWELQKENSKRWNPEIQYTSNYNKSVNVDFTVDTNGVYSEPRPIGTRYLTRPL

SEQ ID NO: 332 - DNA, 2211 bp, Artificial Sequence
  Description of Artificial Sequence: Synthetic polynucleotide
atggctgccgatggttatcttccagattggctcgaggacaaccttagtgaaggaattcgcgagtggtgggctttgaaacctggagcccctcaacccaaggcaaatcaacaacatcaagacaacgctcgaggtcttgtgcttccgggttacaaataccttggacccggcaacggactcgacaagggggagccggtcaacgcagcagacgcggcggccctcgagcacgacaaggcctacgaccagcagctcaaggccggagacaacccgtacctcaagtacaaccacgccgacgccgagttccaggagcggctcaaagaagatacgtcttttgggggcaacctcgggcgagcagtcttccaggccaaaaagaggcttcttgaacctcttggtctggttgaggaagcggctaagacggctcctggaaagaagagaccggtagagccatcaccccagcgttctccagactcctctacgggcatcggcaagaaaggccaacagcccgctaaaaagagactcaattttggtcagactggcgactcagagtcagtccccgacccacaacctctcggagaacctccagcaacccccgctgctgtgggacctactacaatggcttcaggcggtggcgcaccaatggcagacaataacgagggtgccgatggagtgggtaattcctcaggaaattggcattgcgattcccaatggctgggcgacagagtcatcaccaccagcaccagaacctgggccctgcccacttacaacaaccatctctacaagcaaatctccagccaatcaggagcttcaaacgacaaccactactttggctacagcaccccttgggggtattttgactttaacagattccactgccacttttcaccacgtgactggcaaagactcatcaacaacaactggggattccgacccaagagactcaacttcaagctcttcaacatccaagtcaaggaggtcacgacgaatgatggcgtcacgaccatcgctaataaccttaccagcacggttcaagtcttctcggactcggagtaccagttgccgtacgtcctcggctctgcgcaccagggctgcctccctccgttcccggcggacgtgttcatgattccgcagtacggctacctaacgctcaacaatggcagccaagccgtgggacgttcatccttttactgcctggaatatttcccttctcagatgctgagaacgggcaacaactttaccttcagctacacttttgaggacgttcctttccacagcagctacgctcacagccagagtctggaccgtctcatgaatcctctcatcgaccagtacctgtattacttgagcagaacaaacactccaagtggaaccaccacgcagtcaaggcttcagttttctcaggccggagcgagtgacattcgggaccagtctaggaactggcttcctggaccctgttaccgccagcagcgcgtttctaaaacaaaaacagacaacaacaacagcaattttacctggactggtgcttcaaaatataaccttaatgggcgtgaatctataatcaaccctggcactgctatggcctcacacaaagacgacgaagacaagttctttcccatgagcggtgtcatgatttttggaaaagagagcgccggagcttcaaacactgcattggacaatgtcatgattacagacgaagaggaaattaaagccactaaccctgtggccaccgaaagatttgggaccgtggcagtcaatttccagagcagcagcacagaccctgcgaccggagatgtgcatgttatgggagccttacctggaatggtgtggcaagacagagacgtatacctgcagggtcctatttgggccaaaattcctcacacggatggacactttcacccgtctcctcttatgggcggctttggactcaagaacccgcctcctcagatcctcatcaaaaacacgcctgttcctgcgaatcctccggcggagttttcagctacaaagtttgcttcattcatcacccaatactccacaggacaagtgagtgtggaaattgaatgggagctgcagaaagaaaacagcaagcgctggaatcccgaagtgcagtacacatccaattatgcaaaatctgccaacgttgattttactgtggacaacaatggactttatactgagcctcgccccattggcacccgttaccttacccgtcccctgtaa

SEQ ID NO: 333 - protein, 736 aa, Artificial Sequence
  Description of Artificial Sequence: Synthetic polypeptide
MAADGYLPDWLEDNLSEGIREWWALKPGAPQPKANQQHQDNARGLVLPGYKYLGPGNGLDKGEPVNAADAAALEHDKAYDQQLKAGDNPYLKYNHADAEFQERLKEDTSFGGNLGRAVFQAKKRLLEPLGLVEEAAKTAPGKKRPVEPSPQRSPDSSTGIGKKGQQPAKKRLNFGQTGDSESVPDPQPLGEPPATPAAVGPTTMASGGGAPMADNNEGADGVGNSSGNWHCDSQWLGDRVITTSTRTWALPTYNNHLYKQISSQSGASNDNHYFGYSTPWGYFDFNRFHCHFSPRDWQRLINNNWGFRPKRLNFKLFNIQVKEVTTNDGVTTIANNLTSTVQVFSDSEYQLPYVLGSAHQGCLPPFPADVFMIPQYGYLTLNNGSQAVGRSSFYCLEYFPSQMLRTGNNFTFSYTFEDVPFHSSYAHSQSLDRLMNPLIDQYLYYLSRTNTPSGTTTQSRLQFSQAGASDIRDQSRNWLPGPCYRQQRVSKTKTDNNNSNFTWTGASKYNLNGRESIINPGTAMASHKDDEDKFFPMSGVMIFGKESAGASNTALDNVMITDEEEIKATNPVATERFGTVAVNFQSSSTDPATGDVHVMGALPGMVWQDRDVYLQGPIWAKIPHTDGHFHPSPLMGGFGLKNPPPQILIKNTPVPANPPAEFSATKFASFITQYSTGQVSVEIEWELQKENSKRWNPEVQYTSNYAKSANVDFTVDNNGLYTEPRPIGTRYLTRPL

SEQ ID NO: 334 - DNA, 2211 bp, Artificial Sequence
  Description of Artificial Sequence: Synthetic polynucleotide
atggctgccgatggttatcttccagattggctcgaggacaacctctctgagggcattcgcgagtggtgggacttgaaacctggagcccctaaacccaaggcaaatcaacaacatcaggacaacgctcgaggtcttgtgcttccgggttacaaataccttggacccggcaacggactcgacaagggggagccggtcaacgcagcagacgcggcggccctcgagcacgacaaggcctacgaccagcagctcaaggccggagacaacccgtacctcaagtacaaccacgccgacgccgagttccaggagcggctcaaagaagatacgtcttttgggggcaacctcgggcgagcagtcttccaggccaaaaagaggcttcttgaacctcttggtctggttgaggaagcggctaagacggctcctggaaagaagagaccggtagagccatcaccccagcgttctccagactcctctacgggcatcggcaagaaaggccaacagcccgctaaaaagagactcaattttggtcagactggcgactcagagtcagtccccgacccacaacctctcggagaacctccagcaacccccgctgctgtgggacctactacaatggcttcaggcggtggcgcaccaatggcagacaataacgagggtgccgatggagtgggtaattcctcaggaaattggcattgcgattcccaatggctgggcgacagagtcatcaccaccagcaccagaacctgggccctgcccacttacaacaaccatctctacaagcaaatctccagccaatcaggagcttcaaacgacaaccactactttggctacagcaccccttgggggtattttgactttaacagattccactgccacttttcaccacgtgactggcaaagactcatcaacaacaactggggattccgacccaagagactcaacttcaagctcttcaacatccaagtcaaggaggtcacgacgaatgatggcgtcacgaccatcgctaataaccttaccagcacggttcaagtcttctcggactcggagtaccagttgccgtacgtcctcggctctgcgcaccagggctgcctccctccgttcccggcggacgtgttcatgattccgcagtacggctacctaacgctcaacaatggcagccaagccgtgggacgttcatccttttactgcctggaatatttcccttctcagatgctgagaacgggcaacaactttaccttcagctacacttttgaggacgttcctttccacagcagctacgctcacagccagagtctggaccgtctcatgaatcccctcatcgaccagtacctgtattacttgagcagaacaaacactccaagtggaaccaccacgcagtcaaggcttcagttttctcaggccggagcgagtgacattcgggaccagtctaggaactggcttcctggaccctgttaccggcagcagcgcgtttctaaaacaaaaacagacaacaacaacagcaactttacctggactggtgcttcaaaatataaccttaatgggcgtgaatctataatcaaccctggcactgctatggcctcacacaaagacgacgaagacaagttctttcccatgagcggtgtcatgatttttggaaaggagagcgccggagcttcaaacactgcattggacaatgtcatgatcacagacgaagaggaaatcaaagccactaaccccgtggccaccgaaagatttgggactgtggcagtcaatctccagagcagcagcacagaccctgcgaccggagatgtgcatgttatgggagccttacctggaatggtgtggcaagacagagacgtgtacctgcagggtcctatttgggccaaaattcctcacacggatggacactttcacccgtctcctctcatgggcggctttggacttaagcacccgcctcctcagatcctcatcaaaaacacgcctgttcctgcgaatcctccggcagagttttcggctacaaagtttgcttcattcatcacccagtattccacaggacaagtgagtgtggaaattgaatgggagctgcagaaagaaaacagcaagcgctggaatcccgaagtgcagtacacatccaattatgcaaaatctgccaacgttgattttactgtggacaacaatggactttatactgagcctcgccccattggcacccgttacctcacccgtcccctgtaa

SEQ ID NO: 335 - protein, 736 aa, Artificial Sequence
  Description of Artificial Sequence: Synthetic polypeptide
MAADGYLPDWLEDNLSEGIREWWDLKPGAPKPKANQQHQDNARGLVLPGYKYLGPGNGLDKGEPVNAADAAALEHDKAYDQQLKAGDNPYLKYNHADAEFQERLKEDTSFGGNLGRAVFQAKKRLLEPLGLVEEAAKTAPGKKRPVEPSPQRSPDSSTGIGKKGQQPAKKRLNFGQTGDSESVPDPQPLGEPPATPAAVGPTTMASGGGAPMADNNEGADGVGNSSGNWHCDSQWLGDRVITTSTRTWALPTYNNHLYKQISSQSGASNDNHYFGYSTPWGYFDFNRFHCHFSPRDWQRLINNNWGFRPKRLNFKLFNIQVKEVTTNDGVTTIANNLTSTVQVFSDSEYQLPYVLGSAHQGCLPPFPADVFMIPQYGYLTLNNGSQAVGRSSFYCLEYFPSQMLRTGNNFTFSYTFEDVPFHSSYAHSQSLDRLMNPLIDQYLYYLSRTNTPSGTTTQSRLQFSQAGASDIRDQSRNWLPGPCYRQQRVSKTKTDNNNSNFTWTGASKYNLNGRESIINPGTAMASHKDDEDKFFPMSGVMIFGKESAGASNTALDNVMITDEEEIKATNPVATERFGTVAVNLQSSSTDPATGDVHVMGALPGMVWQDRDVYLQGPIWAKIPHTDGHFHPSPLMGGFGLKHPPPQILIKNTPVPANPPAEFSATKFASFITQYSTGQVSVEIEWELQKENSKRWNPEVQYTSNYAKSANVDFTVDNNGLYTEPRPIGTRYLTRPL

SEQ ID NO: 336 - DNA, 2214 bp, Artificial Sequence
  Description of Artificial Sequence: Synthetic polynucleotide
atggctgccgatggttatcttccagattggctcgaggacaaccttagtgaaggaattcgcgagtggtgggctttgaaacctggagcccctcaacccaaggcaaatcaacaacatcaagacaacgctcgaggtcttgtgcttccgggttacaaataccttggacccggcaacggactcgacaagggggagccggtcaacgcagcagacgcggcggccctcgagcacgacaaggcctacgaccagcagctgcaggcgggtgacaatccgtacctgcggtataaccacgccgacgccgagtttcaggagcgtctgcaagaagatacgtcttttgggggcaaccttggcagagcagtcttccaggccaaaaagaggatccttgagcctcttggtctggttgaggaagcagctaaaacggctcctggaaagaagaggcctgtagatcagtctcctcaggaaccggactcatcatctggtgttggcaaatcgggcaaacagcctgccagaaaaagactaaatttcggtcagactggcgactcagagtcagtcccagaccctcaacctctcggagaaccaccagcagcccccacaagtttgggatctaatacaatggcttcaggcggtggcgcaccaatggcagacaataacgagggtgccgatggggtgggtagttcctcgggaaattggcattgcgattcccaatgactgggggacagagtcatcaccaccagcacccgaacctgggccctgcccacctacaacaatcacctctacaagcaaatctccaacgggacatcgggaggagccaccaacgacaacacctacttcggctacagcaccccctgggggtattttgactttaacagattccactgccacttttcaccacgtgactggcagcgactcatcaacaacaactggggattccggcccaagagactcagcttcaagctcttcaacatccaggtcaaggaggtcacgcagaatgaaggcaccaagaccatcgccaataacctcaccagcaccatccaggtgtttacggactcggagtaccagctgccgtacgttctcggctctgcgcaccagggctgcctccctccgttcccggcggacgtgttcatgattccgcaatacggctacctgacgctcaacaatggcagccaagccgtgggacgttcatccttttactgcctggaatatttcccttctcagatgctgagaacgggcaacaactttaccttcagctacacctttgaggaagtgcctttccacagcagctacgcgcacagccagagcttggaccggctgatgaatcctctgattgaccagtacctgtactacttgtctcggactcaaacaacaggaggcacggcaaatacgcagactctgggcttcagccaaggtgggcctaatacaatggccaatcaggcaaagaactggctgccaggaccctgttaccgccaacaacgcgtctcaacgacaaccgggcaaaacaacaatagcaactttgcctggactgctgggaccaaataccatctgaatggaagaaattcattggctaatcctggcatcgctatggcaacacacaaagacgacgaggagcgtttttttcccagtaacgggatcctgatttttggcaaacaaaatgctgccagagacaatgcggattacagcgatgtcatgctcaccagcgaggaagaaatcaaaaccactaaccctgtggctacagaggaatacggtatcgtggcagataacttgcagcagcaaaacacggctcctcaaattggaactgtcaacagccagggggccttacccggtatggtctggcagaaccgggacgtgtacctgcagggtcccatctgggccaagattcctcacacggacggcaacttccacccgtctccgctgatgggcggctttggcctgaaacatcctccgcctcagatcctgatcaagaacacgcctgtacctgcggatcctccgaccaccttcaaccagtcaaagctgaactctttcatcacgcaatacagcaccggacaggtcagcgtggagatcgagtgggagctgcagaaggaaaacagcaagcgctggaacccggagatccagtacacttccaactattacaagtctaataatgttgaatttgctgttaatactgaaggtgtatatagtgaaccccgccccattggcaccagatacctgactcgtaatctgtaa

SEQ ID NO: 337 - protein, 736 aa, Artificial Sequence
  Description of Artificial Sequence: Synthetic polypeptide
MAADGYLPDWLEDNLSEGIREWWALKPGAPQPKANQQHQDNARGLVLPGYKYLGPGNGLDKGEPVNAADAAALEHDKAYDQQLQAGDNPYLRYNHADAEFQERLQEDTSFGGNLGRAVFQAKKRILEPLGLVEEAAKTAPGKKRPVDQSPQEPDSSSGVGKSGKQPARKRLNFGQTGDSESVPDPQPLGEPPAAPTSLGSNTMASGGGAPMADNNEGADGVGSSSGNWHCDSQLGDRVITTSTRTWALPTYNNHLYKQISNGTSGGATNDNTYFGYSTPWGYFDFNRFHCHFSPRDWQRLINNNWGFRPKRLSFKLFNIQVKEVTQNEGTKTIANNLTSTIQVFTDSEYQLPYVLGSAHQGCLPPFPADVFMIPQYGYLTLNNGSQAVGRSSFYCLEYFPSQMLRTGNNFTFSYTFEEVPFHSSYAHSQSLDRLMNPLIDQYLYYLSRTQTTGGTANTQTLGFSQGGPNTMANQAKNWLPGPCYRQQRVSTTTGQNNNSNFAWTAGTKYHLNGRNSLANPGIAMATHKDDEERFFPSNGILIFGKQNAARDNADYSDVMLTSEEEIKTTNPVATEEYGIVADNLQQQNTAPQIGTVNSQGALPGMVWQNRDVYLQGPIWAKIPHTDGNFHPSPLMGGFGLKHPPPQILIKNTPVPADPPTTFNQSKLNSFITQYSTGQVSVEIEWELQKENSKRWNPEIQYTSNYYKSNNVEFAVNTEGVYSEPRPIGTRYLTRNL

SEQ ID NO: 338 - DNA, 2214 bp, Artificial Sequence
  Description of Artificial Sequence: Synthetic polynucleotide
atggctgccgatggttatcttccagattggctcgaggacaaccttagtgaaggaattcgcgagtggtgggctttgaaacctggagcccctcaacccaaggcaaatcaacaacatcaagacaacgctcgaggtcttgtgcttccgggttacaaataccttggacccggcaacggactcgacaagggggagccggtcaacgcagcagacgcggcggccctcgagcacgacaaggcctacgaccagcagctgcaggcgggtgacaatccgtacctgcggtataaccacgccgacgccgagtttcaggagcgtctgcaagaagatacgtcttttgggggcaaccttggcagagcagtcttccaggccaaaaagaggatccttgagcctcttggtctggttgaggaagcagctaaaacggctcctggaaagaagaggcctgtagatcagtctcctcaggaaccggactcatcatctggtgttggcaaatcgggcaaacagcctgccagaaaaagactaaatttcggtcagactggcgactcagagtcagtcccagaccctcaacctctcggagaaccaccagcagcccccacaagtttgggatctaatacaatggcttcaggcggtggcgcaccaatggcagacaataacgagggtgccgatggggtgggtagttcctcgggaaattggcattgcgattcccaatggctgggggacagagtcatcaccaccagcacccgaacctgggccctgcccacctacaacaatcacctctacaagcaaatctccaacgggacatcgggaggagccaccaacgacaacacctacttcggctacagcaccccctgggggtattttgactttaacagattccactgccacttttcaccacgtgactggcagcgactcatcaacaacaactggggattccggcccaagagactcagcttcaagctcttcaacatccaggtcaaggaggtcacgcagaatgaaggcaccaagaccatcgccaataacctcaccagcaccatccaggtgtttacggactcggagtaccagctgccgtacgttctcggctctgcgcaccagggctgcctccctccgttcccggcggacgtgttcatgattccgcaatacggctacctgacgctcaacaatggcagccaagccgtgggacgttcatccttttactgcctggaatatttcccttctcagatgctgagaacgggcaacaactttaccttcagctacacctttgaggaagtgccttttcacagcagctacgcgcacagccagagcttggaccggctgatgaatcctctgattgaccagtacctgtactacttgtctcggactcaaacaacaggaggcacggcaaatacgcagactctgggcttcagccaaggtgggcctaatacaatggccaatcaggcaaagaactggctgccaggaccctgttaccgccaacaacgcgtctcaacgacaaccgggcaaaacaacaatagcaactttgcctggactgctgggaccaaataccatctgaatggaagaaattcattggctaatcctggcatcgctatggcaacacacaaagacgacgaggagcgtttttttcccagtaacgggatcctgatttttggcaaacaaaatgctgccagagacaatgcggattacagcgatgtcatgctcaccagcgaggaagaaatcaaaaccactaaccctgtggctacagaggaatacggtatcgtggcagataacttgcagcagcaaaacacggctcctcaaattggaactgtcaacagccagggggccttacccggtatggtctggcagaaccgggacgtgtacctgcagggtcccatctgggccaagattcctcacacggacggcaacttccacccgtctccgctgatgggcggctttggcctgaaacatcctccgcctcagatcctgatcaagaacacgcctgtacctgcggatcctccgaccaccttcaaccagtcaaagctgaactctttcatcacgcaatacagcaccggacaggtcagcgtggagatcgagtgggagctgcagaaggaaaacagcaagcgctggaacccggagatccagtacacttccaactattacaagtctaataatgttgaatttgctgttaatactgaaggtgtatatagtgaaccccgccccattggcaccagatacctgactcgtaatctgtaa

SEQ ID NO: 339 - protein, 737 aa, Artificial Sequence; identical to SEQ ID NO: 327
  Description of Artificial Sequence: Synthetic polypeptide

SEQ ID NO: 340 - DNA, 2211 bp, Artificial Sequence
  Description of Artificial Sequence: Synthetic polynucleotide
atggctgccgatggttatcttccagattggctcgaggacaacctctctgagggcattcgcgagtggtgggacttgaaacctggagcccctaaacccaaggcaaatcaacaacatcaggacaacgctcgaggtcttgtgcttccgggttacaaataccttggacccggcaacggactcgacaagggggagccggtcaacgcagcagacgcggcggccctcgagcacgacaaggcctacgaccagcagctcaaggccggagacaacccgtacctcaagtacaaccacgccgacgccgagttccaggagcggctcaaagaagatacgtcttttgggggcaacctcgggcgagcagtcttccaggccaaaaagaggcttcttgaacctcttggtctggttgaggaagcggctaagacggctcctggaaagaagagaccggtagagccatcaccccagcgttctccagactcctctacgggcatcggcaagaaaggccaacagcccgctaaaaagagactcaattttggtcagactggcgactcagagtcagtccccgacccacaacctctcggagaacctccagcaacccccgctgctgtgggacctactacaatggcttcaggcggtggcgcaccaatggcagacaataacgagggtgccgatggagtgggtaattcctcaggaaattggcattgcgattcccaatggctgggcgacagagtcatcaccaccagcaccagaacctgggccctgcccacttacaacaaccatctctacaagcaaatctccagccaatcaggagcttcaaacgacaaccactactttggctacagcaccccttgggggtattttgactttaacagattccactgccacttttcaccacgtgactggcaaagactcatcaacaacaactggggattccgacccaagagactcaacttcaagctcttcaacatccaagtcaaggaggtcacgacgaatgatggcgtcacgaccatcgctaataaccttaccagcacggttcaagtcttctcggactcggagtaccagttgccgtacgtcctcggctctgcgcaccagggctgcctccctccgttcccggcggacgtgttcatgattccgcagtacggctacctaacgctcaacaatggcagccaagccgtgggacgttcatccttttactgcctggaatatttcccttctcagatgctgagaacgggcaacaactttaccttcagctacacttttgaggacgttcctttccacagcagctacgctcacagccagagtctggaccgtctcatgaatcctctcatcgaccagtacctgtattacttgagcagaacaaacactccaagtggaaccaccacgcagtcaaggcttcagttttctcaggccggagcgagtgacattcgggaccagtctaggaactggcttcctggaccctgttaccgccagcagcgcgtttctaaaacaaaaacagacaacaacaacagcaattttacctggactggtgcttcaaaatataaccttaatgggcgtgaatctataatcaaccctggcactgctatggcctcacacaaagacgacgaagacaagttctttcccatgagcggtgtcatgatttttggaaaagagagcgccggagcttcaaacactgcattggacaatgtcatgattacagacgaagaggaaattaaagccactaaccctgtggccaccgaaagatttgggaccgtggcagtcaatttccagagcagcagcacagaccctgcgaccggagatgtgcatgctatgggagcattacctggcatggtgtggcaagatagagacgtgtacctgcagggtcccatttgggccaaaattcctcacacagatggacactttcacccgtctcctcttatgggcggctttggactcaagaacccgcctcctcagatcctcatcaaaaacacgcctgttcctgcgaatcctccggcggagttttcagctacaaagtttgcttcattcatcacccaatactccacaggacaagtgagtgtggaaattgaatgggagctgcagaaagaaaacagcaagcgctggaatcccgaagtgcagtacacatccaattatgcaaaatctgccaacgttgattttactgtggacaacaatggactttatactgagcctcgccccattggcacccgttaccttacccgtcccctgtaa

SEQ ID NO: 341 - protein, 736 aa, Artificial Sequence
  Description of Artificial Sequence: Synthetic polypeptide
MAADGYLPDWLEDNLSEGIREWWDLKPGAPKPKANQQHQDNARGLVLPGYKYLGPGNGLDKGEPVNAADAAALEHDKAYDQQLKAGDNPYLKYNHADAEFQERLKEDTSFGGNLGRAVFQAKKRLLEPLGLVEEAAKTAPGKKRPVEPSPQRSPDSSTGIGKKGQQPAKKRLNFGQTGDSESVPDPQPLGEPPATPAAVGPTTMASGGGAPMADNNEGADGVGNSSGNWHCDSQWLGDRVITTSTRTWALPTYNNHLYKQISSQSGASNDNHYFGYSTPWGYFDFNRFHCHFSPRDWQRLINNNWGFRPKRLNFKLFNIQVKEVTTNDGVTTIANNLTSTVQVFSDSEYQLPYVLGSAHQGCLPPFPADVFMIPQYGYLTLNNGSQAVGRSSFYCLEYFPSQMLRTGNNFTFSYTFEDVPFHSSYAHSQSLDRLMNPLIDQYLYYLSRTNTPSGTTTQSRLQFSQAGASDIRDQSRNWLPGPCYRQQRVSKTKTDNNNSNFTWTGASKYNLNGRESIINPGTAMASHKDDEDKFFPMSGVMIFGKESAGASNTALDNVMITDEEEIKATNPVATERFGTVAVNFQSSSTDPATGDVHAMGALPGMVWQDRDVYLQGPIWAKIPHTDGHFHPSPLMGGFGLKNPPPQILIKNTPVPANPPAEFSATKFASFITQYSTGQVSVEIEWELQKENSKRWNPEVQYTSNYAKSANVDFTVDNNGLYTEPRPIGTRYLTRPL

SEQ ID NO: 342 - DNA, 2211 bp, Artificial Sequence
  Description of Artificial Sequence: Synthetic polynucleotide
atggctgccgatggttatcttccagattggctcgaggacaaccttagtgaaggaattcgcgagtggtgggcgctgaaacctggagccccgaagcccaaagccaaccagcaaaagcaggacgacggccggggtctggtgcttccgggttacaaatacctcggacccggtaacggactcgacaaaggagagccggtcaacgaggcggacgcggcagccctcgagcacgacaaggcctacgaccagcagctcaaagcgggtgacaatccgtacctgcggtataaccacgccgacgccgagtttcaggagcgtctgcaagaagatacgtcttttgggggcaacctcgggcgagcagtcttccaggccaagaagcgggttctcgaacctctcggtctggttgaggaaggcgctaagacggctcccggaaagaaacgtccggtagagcagtcgccacaagagccagactcctctacgggcatcggcaagaaaggccaacagcccgccagaaaaagactcaatttcggtcagactggcgactcagagtcagttccagaccctcaacctctcggagaacctccagcagcgccctctggtgtgggacctactacaatggcttcaggcggtggcgcaccaatggcagacaataacgaaggcgccgacggagtgggtaatgcctcaggaaattggcattgcgattccacatggctgggcgacagagtcatcaccaccagcacccgaacatgggccttgcccacctataacaaccacctctacaagcaaatctccagtgcttcaacgggggccagcaacgacaacacctacttcggctacagcaccccctgggggtattttgatttcaacagattccactgccatttctcaccacgtgactggcagcgactcatcaacaacaattggggattccggcccaagagactcaacttcaaactcttcaacatccaagtcaaggaggtcacgacgaatgatggcgtcacgaccatcgctaataaccttaccagcacggttcaagtcttctcggactcggagtaccagttgccgtacgtcctcggctctgcgcaccagggctgcctccctccgttcccggcggacgtgttcatgattccgcagtacggctacctaacgctcaacaatggcagccaggcagtgggacggtcatccttttactgcctggaatatttcccatcgcagatgctgagaacgggcaataactttaccttcagctacaccttcgaggacgtgcctttccacagcagctacgcgcacagccagagcctggaccggctgatgaatcctctcatcgaccagtacctgtattacctgaacagaactcagaatcagtccggaagtgcccaaaacaaggacttgctgtttagccgggggtctccagctggcatgtctgttcagcccaaaaactggctacctggaccctgttatcggcagcagcgcgtttctaaaacaaaaacagacaacaacaacagcaattttacctggactggtgcttcaaaatataacctcaatgggcgtgaatccatcatcaaccctggcactgctatggcctcacacaaagacgacgaagacaagttctttcccatgagcggtgtcatgatttttggaaaagagagcgccggagcttcaaacactgcattggacaatgtcatgattacagacgaagaggaaattaaagccactaaccctgtggccaccgaaagatttgggaccgtggcagtcaatttccagagcagcagcacagaccctgcgaccggagatgtgcatgttatgggagccttacctggaatggtgtggcaagacagagacgtatacctgcagggtcctatttgggccaaaattcctcacacagatggacactttcacccgtctcctcttatgggcggctttggactcaagaacccgcctcctcagatcctcatcaaaaacacgcctgttcctgcgaatcctccggcagagttttcggctacaaagtttgcttcattcatcacccagtattccacaggacaagtgagcgtggagattgaatgggagctgcagaaagaaaacagcaaacgctggaatcccgaagtgcagtatacatctaactatgcaaaatctgccaacgttgatttcactgtggacaacaatggactttatactgagcctcgccccattggcacccgttacctcacccgtcccctgtaa

SEQ ID NO: 343 - protein, 736 aa, Artificial Sequence
  Description of Artificial Sequence: Synthetic polypeptide
MAADGYLPDWLEDNLSEGIREWWALKPGAPKPKANQQKQDDGRGLVLPGYKYLGPGNGLDKGEPVNEADAAALEHDKAYDQQLKAGDNPYLRYNHADAEFQERLQEDTSFGGNLGRAVFQAKKRVLEPLGLVEEGAKTAPGKKRPVEQSPQEPDSSTGIGKKGQQPARKRLNFGQTGDSESVPDPQPLGEPPAAPSGVGPTTMASGGGAPMADNNEGADGVGNASGNWHCDSTWLGDRVITTSTRTWALPTYNNHLYKQISSASTGASNDNTYFGYSTPWGYFDFNRFHCHFSPRDWQRLINNNWGFRPKRLNFKLFNIQVKEVTTNDGVTTIANNLTSTVQVFSDSEYQLPYVLGSAHQGCLPPFPADVFMIPQYGYLTLNNGSQAVGRSSFYCLEYFPSQMLRTGNNFTFSYTFEDVPFHSSYAHSQSLDRLMNPLIDQYLYYLNRTQNQSGSAQNKDLLFSRGSPAGMSVQPKNWLPGPCYRQQRVSKTKTDNNNSNFTWTGASKYNLNGRESIINPGTAMASHKDDEDKFFPMSGVMIFGKESAGASNTALDNVMITDEEEIKATNPVATERFGTVAVNFQSSSTDPATGDVHVMGALPGMVWQDRDVYLQGPIWAKIPHTDGHFHPSPLMGGFGLKNPPPQILIKNTPVPANPPAEFSATKFASFITQYSTGQVSVEIEWELQKENSKRWNPEVQYTSNYAKSANVDFTVDNNGLYTEPRPIGTRYLTRPL

SEQ ID NO: 344 - DNA, 2205 bp, Artificial Sequence
  Description of Artificial Sequence: Synthetic polynucleotide
atggctgctgacggttatcttccagattggctcgaggacaacctttctgaaggcattcgtgagtggtgggctctgaaacctggagtccctcaacccaaagcgaaccaacaacaccaggacaaccgtcggggtcttgtgcttccgggttacaaatacctcggacccggtaacggactcgacaaaggagagccggtcaacgaggcggacgcggcagccctcgaacacgacaaggcctacgaccagcagctcaaggccggagacaacccgtacctcaagtacaaccacgccgacgccgagttccaggagcggctcaaagaagatacgtcttttgggggcaacctcgggcgagcagtcttccaggccaaaaagaggcttcttgaacctcttggtctggttgaggaagcggctaagacggctcctggaaagaagaggcctgtagagcagtctcctcaggaaccggactcctccgcgggtattggcaaatcgggtgcacagcccgctaaaaagagactcaatttcggtcagactggcgacacagagtcagtcccagaccctcaaccaatcggagaacctcccgcagccccctcaggtgtgggatctcttacaatggcttcaggtggtggcgcaccagtggcagacaataacgaaggtgccgatggagtgggtagttcctcgggaaattggcattgcgattcccaatggctgggggacagagtcatcaccaccagcacccgaacctgggccctgcccacctacaacaaccacctctacaaacaaatttccagccaatcaggagcctcgaacgacaatcactactttggctacagcaccccttgggggtattttgacttcaacagattccactgccacttttcaccacgtgactggcagcgactcatcaacaacaactggggattccggcccaagagactcagcttcaagctcttcaacatccaggtcaaagaggttacggacaacaatggagtcaagaccatcgccaataaccttaccagcacggtccaggtcttcacggactcagactatcagctcccgtacgtgctcgggtcggctcacgagggctgcctcccgccgttcccagcggacgttttcatgattcctcagtacgggtatctgacgcttaatgatggaagccaggccgtgggtcgttcgtccttttactgcctggaatatttcccgtcgcaaatgctaagaacgggtaacaacttccagttcagctacgagtttgagaacgtacctttccatagcagctacgctcacagccaaagcctggaccgactaatgaatccactcatcgaccaatacttgtactatctctcaaagactattaacggttctggacagaatcaacaaacgctaaaattcagtgtggccggacccagcaacatggctgtccagggaagaaactacatacctggacccagctaccgacaacaacgtgtctcaaccactgtgactcaaaacaacaacagcgaatttgcttggcctggagcttcttcttgggctctcaatggacgtaatagcttgatgaatcctggacctgctatggccagccacaaagaaggagaggaccgtttctttcctttgtctggatctttaatttttggcaaacaaggaactggaagagacaacgtggatgcggacaaagtcatgataaccaacgaagaagaaattaaaactactaacccggtagcaacggagtcctatggacaagtggccacaaaccaccagagtgcccaagcacaggcgcagaccggctgggttcaaaaccaaggaatacttccgggtatggtttggcaggacagagatgtgtacctgcaaggacccatctgggccaagattcctcacacggacggcaacttccacccgtctccgctgatgggcggctttggcctgaaacatcctccgcctcagatcctgatcaagaacacgcctgtacctgcggatcctccgaccaccttcaaccagtcaaagctgaactctttcatcacgcaatacagcaccggacaggtcagcgtggaaattgaatgggagctgcagaaggaaaacagcaagcgctggaatcccgaagtgcagtatacatctaactatgcaaaatctgccaacgttgatttcactgtggacaacaatggactttatactgagcctcgccccattggcacccgttacctcacccgtcccctgtaa

SEQ ID NO: 345 - protein, 734 aa, Artificial Sequence
  Description of Artificial Sequence: Synthetic polypeptide
MAADGYLPDWLEDNLSEGIREWWALKPGVPQPKANQQHQDNRRGLVLPGYKYLGPGNGLDKGEPVNEADAAALEHDKAYDQQLKAGDNPYLKYNHADAEFQERLKEDTSFGGNLGRAVFQAKKRLLEPLGLVEEAAKTAPGKKRPVEQSPQEPDSSAGIGKSGAQPAKKRLNFGQTGDTESVPDPQPIGEPPAAPSGVGSLTMASGGGAPVADNNEGADGVGSSSGNWHCDSQWLGDRVITTSTRTWALPTYNNHLYKQISSQSGASNDNHYFGYSTPWGYFDFNRFHCHFSPRDWQRLINNNWGFRPKRLSFKLFNIQVKEVTDNNGVKTIANNLTSTVQVFTDSDYQLPYVLGSAHEGCLPPFPADVFMIPQYGYLTLNDGSQAVGRSSFYCLEYFPSQMLRTGNNFQFSYEFENVPFHSSYAHSQSLDRLMNPLIDQYLYYLSKTINGSGQNQQTLKFSVAGPSNMAVQGRNYIPGPSYRQQRVSTTVTQNNNSEFAWPGASSWALNGRNSLMNPGPAMASHKEGEDRFFPLSGSLIFGKQGTGRDNVDADKVMITNEEEIKTTNPVATESYGQVATNHQSAQAQAQTGWVQNQGILPGMVWQDRDVYLQGPIWAKIPHTDGNFHPSPLMGGFGLKHPPPQILIKNTPVPADPPTTFNQSKLNSFITQYSTGQVSVEIEWELQKENSKRWNPEVQYTSNYAKSANVDFTVDNNGLYTEPRPIGTRYLTRPL

SEQ ID NO: 346 - DNA, 2211 bp, Artificial Sequence
  Description of Artificial Sequence: Synthetic polynucleotide
atggctgccgatggttatcttccagattggctcgaggacaacctctctgagggcattcgcgagtggtgggcgctgaaacctggagccccgaagcccaaagccaaccagcaaaagcaggacgacggccggggtctggtgcttcctggctacaagtacctcggacccttcaacggactcgacaagggggagcccgtcaacgcggcggacgcagcggccctcgagcacgacaaggcctacgaccagcagctgcaggcgggtgacaatccgtacctgcggtataaccacgccgacgccgagtttcaggagcgtctgcaagaagatacgtcttttgggggcaacctcgggcgagcagtcttccaggccaagaagtgggttctcgaacctctcggtctggttgaggaaggcgctaagacggctcctggaaagaaacgtccggtagagcagtcgccacaagagccagactcctcctcgggcatcggcaagacaggccagcagcccgctaaaaagagactcaattttggtcagactggcgactcagagtcagtccccgacccacaacctctcggagaacctccagcaacccccgctgctgtgggacctactacaatggcttcaggcggtggcgcaccaatggcagacaataacgaaggcgccgacggagtgggtaatgcctcaggaaattggcattgcgattccacatggctgggcgacagagtcatcaccaccagcacccgcacctgggccttgcccacctacaataaccacctctacaagcaaatctccagtgcttcaacgggggccagcaacgacaaccactacttcggctacagcaccccctgggggtattttgatttcaacagattccactgccatttctcaccacgtgactggcagcgactcatcaacaacaattggggattccggcccaagagactcaacttcaagctcttcaacatccaagtcaaggaggtcacgacgaatgatggcgtcacaaccatcgctaataaccttaccagcacggttcaagtcttctcggactcggagtaccagcttccgtacgtcctcggctctgcgcaccagggctgcctccctccgttcccggcggacgtgttcatgattccgcaatacggctacctgacgctcaacaatggcagccaagccgtgggacgttcatccttttactgcctggaatatttcccttctcagatgctgagaacgggcaacaactttaccttcagctacacctttgaggaagtgcctttccacagcagctacgcgcacagccagagcctggaccggctgatgaatcctctcatcgaccaatacctgtattacctgaacagaactcaaaatcagtccggaagtgcccaaaacaaggacttgctgtttagccgtgggtctccagctggcatgtctgttcagcccaaaaactggctacctggaccctgttatcggcagcagcgcgtttctaaaacaaaaacagacaacaacaacagcaattttacctggactggtgcttcaaaatataacctcaatgggcgtgaatccatcatcaaccctggcactgctatggcctcacacaaagacgacgaagacaagttctttcccatgagcggtgtcatgatttttggaaaggagagcgccggagcttcaaacactgcattggacaatgtcatgatcaccgacgaagaggaaatcaaagccactaaccccgtggccaccgaaagatttgggactgtggcagtcaatctccagagcagcagcacagaccctgcgaccggagatgtgcatgttatgggagccttacctggcatggtgtggcaagatagagacgtgtacctgcagggtcccatttgggccaaaattcctcacacagatggacactttcacccgtctcctcttatgggcggctttggactcaagaacccgcctcctcagatcctcatcaaaaacacgcctgttcctgcgaatcctccggcggagttttcagctacaaagtttgcttcattcatcacccaatactccacaggacaagtgagtgtggaaattgaatgggagctgcagaaagaaaacagcaagcgctggaatcccgaagtgcagtacacatccaattatgcaaaatctgccaacgttgattttactgtggacaacaatggactttatactgagcctcgccccattggcacccgttacctcacccgtcccctgtaa

SEQ ID NO: 347 - protein, 736 aa, Artificial Sequence
  Description of Artificial Sequence: Synthetic polypeptide
MAADGYLPDWLEDNLSEGIREWWALKPGAPKPKANQQKQDDGRGLVLPGYKYLGPFNGLDKGEPVNAADAAALEHDKAYDQQLQAGDNPYLRYNHADAEFQERLQEDTSFGGNLGRAVFQAKKWVLEPLGLVEEGAKTAPGKKRPVEQSPQEPDSSSGIGKTGQQPAKKRLNFGQTGDSESVPDPQPLGEPPATPAAVGPTTMASGGGAPMADNNEGADGVGNASGNWHCDSTWLGDRVITTSTRTWALPTYNNHLYKQISSASTGASNDNHYFGYSTPWGYFDFNRFHCHFSPRDWQRLINNNWGFRPKRLNFKLFNIQVKEVTTNDGVTTIANNLTSTVQVFSDSEYQLPYVLGSAHQGCLPPFPADVFMIPQYGYLTLNNGSQAVGRSSFYCLEYFPSQMLRTGNNFTFSYTFEEVPFHSSYAHSQSLDRLMNPLIDQYLYYLNRTQNQSGSAQNKDLLFSRGSPAGMSVQPKNWLPGPCYRQQRVSKTKTDNNNSNFTWTGASKYNLNGRESIINPGTAMASHKDDEDKFFPMSGVMIFGKESAGASNTALDNVMITDEEEIKATNPVATERFGTVAVNLQSSSTDPATGDVHVMGALPGMVWQDRDVYLQGPIWAKIPHTDGHFHPSPLMGGFGLKNPPPQILIKNTPVPANPPAEFSATKFASFITQYSTGQVSVEIEWELQKENSKRWNPEVQYTSNYAKSANVDFTVDNNGLYTEPRPIGTRYLTRPL

SEQ ID NO: 348 - DNA, 2214 bp, Artificial Sequence
  Description of Artificial Sequence: Synthetic polynucleotide
atggctgccgatggttatcttccagattggctcgaggacaaccttagtgaaggaattcgcgagtggtgggctttgaaacctggagcccctcaacccaaggcaaatcaacaacatcaagacaacgctcgaggtcttgtgcttccgggttacaaataccttggacccggcaacggactcgacaagggggagccggtcaacgcagcagacgcggcggccctcgagcacgacaaggcctacgaccagcagctgcaggcgggtgacaatccgtacctgcggtataaccacgccgacgccgagtttcaggagcgtctgcaagaagatacgtcttttgggggcaaccttggcagagcagtcttccaggccaaaaagaggatccttgagcctcttggtctggttgaggaagcagctaaaacggctcctggaaagaagaggcctgtagatcagtctcctcaggaaccggactcatcatctggtgttggcaaatcgggcaaacagcctgccagaaaaagactaaatttcggtcagactggcgactcagagtcagtcccagaccctcaacctctcggagaaccaccagcagcccccacaagtttgggatctaatacaatggcttcaggcggtggcgcaccaatggcagacaataacgagggtgccgatggggtgggtagttcctcgggaaattggcattgcgattcccaatggctgggggacagagtcatcaccaccagcacccgaacctgggccctgcccacctacaacaatcacctctacaagcaaatctccaacgggacatcgggaggagccaccaacgacaacacctacttcggctacagcaccccctgggggtattttgactttaacagattccactgccacttttcaccacgtgactggcagcgactcatcaacaacaactggggattccggcccaagagactcagcttcaagctcttcaacatccaggtcaaggaggtcacgcagaatgaaggcaccaagaccatcgccaataacctcaccagcaccatccaggtgtttacggactcggagtaccagctgccgtacgttctcggctcggcgcaccagggctgcctccctccgttcccggcggacgtcttcatggtgccacagtatggatacctgacgctcaacaatggcagccaagccgtgggacgttcatccttttactgcctggaatatttcccttctcagatgctgagaacgggcaacaactttaccttcagctacacctttgaggaagtgcctttccacagcagctacgcgcacagccagagcttggaccggctgatgaatcctctgattgaccagtacctgtactacttgtctcggactcaaacaacaggaggcacggcaaatacgcagactctgggcttcagccaaggtgggcctaatacaatggccaatcaggcaaagaactggctgccaggaccctgttaccgccaacaacgcgtctcaacgacaaccgggcaaaacaacaatagcaactttgcctggactgctgggaccaaataccatctgaatggaagaaattcattggctaatcctggcatcgctatggcaacacacaaagacgacgaggagcgtttttttcccagtaacgggatcctgatttttggcaaacaaaatgctgccagagacaatgcggattacagcgatgtcatgctcaccagcgaggaagaaatcaaaaccactaaccctgtggctacagaggaatacggtatcgtggcagataacttgcagcagcaaaacacggctcctcaaattggaactgtcaacagccagggggacttacccggtatggtctggcagaaccgggacgtgtacctgcagggtcccatctgggccaagattcctcacacggacggcaacttccacccgtctccgctgatgggcggctttggcctgaaacatcctccgcctcagatcctgatcaagaacacgcctgtacctgcggatcctccgaccaccttcaaccagtcaaagctgaactctttcatcacgcaatacagcaccggacaggtcagcgtggagatcgagtgggagctgcagaaggaaaacagcaagcgctggaacccggagatccagtacacttccaactattacaagtctaataatgttgaatttgctgttaatactgaaggtgtatatagtgaaccccgccccattggcaccagatacctgactcgtaatctgtaa

SEQ ID NO: 349 - protein, 737 aa, Artificial Sequence
  Description of Artificial Sequence: Synthetic polypeptide
MAADGYLPDWLEDNLSEGIREWWALKPGAPQPKANQQHQDNARGLVLPGYKYLGPGNGLDKGEPVNAADAAALEHDKAYDQQLQAGDNPYLRYNHADAEFQERLQEDTSFGGNLGRAVFQAKKRILEPLGLVEEAAKTAPGKKRPVDQSPQEPDSSSGVGKSGKQPARKRLNFGQTGDSESVPDPQPLGEPPAAPTSLGSNTMASGGGAPMADNNEGADGVGSSSGNWHCDSQWLGDRVITTSTRTWALPTYNNHLYKQISNGTSGGATNDNTYFGYSTPWGYFDFNRFHCHFSPRDWQRLINNNWGFRPKRLSFKLFNIQVKEVTQNEGTKTIANNLTSTIQVFTDSEYQLPYVLGSAHQGCLPPFPADVFMVPQYGYLTLNNGSQAVGRSSFYCLEYFPSQMLRTGNNFTFSYTFEEVPFHSSYAHSQSLDRLMNPLIDQYLYYLSRTQTTGGTANTQTLGFSQGGPNTMANQAKNWLPGPCYRQQRVSTTTGQNNNSNFAWTAGTKYHLNGRNSLANPGIAMATHKDDEERFFPSNGILIFGKQNAARDNADYSDVMLTSEEEIKTTNPVATEEYGIVADNLQQQNTAPQIGTVNSQGDLPGMVWQNRDVYLQGPIWAKIPHTDGNFHPSPLMGGFGLKHPPPQILIKNTPVPADPPTTFNQSKLNSFITQYSTGQVSVEIEWELQKENSKRWNPEIQYTSNYYKSNNVEFAVNTEGVYSEPRPIGTRYLTRNL

SEQ ID NO: 350 - DNA, 2205 bp, Artificial Sequence
  Description of Artificial Sequence: Synthetic polynucleotide
atggctgctgacggttatcttccagattggctcgaggacaacctttctgaaggcattcgtgagtggtgggctctgaaacctggagtccctcaacccaaagcgaaccaacaacaccaggacaactgtcggggtcttgtgcttccgggttacaaatacctcggacccggtaacggactcgacaaaggagagccggtcaacgaggcggacgcggcagccctcgaacacgacaaggcctacgaccagcagctcaaggccggagacaacccgtacctcaagtacaaccacgccgacgccgagttccaggagcggctcaaagaagatacgtcttttgggggcaacctcgggcgagcagtcttccagaccaaaaagaggcttcttgaacctcttggtctggttgaggaagcggctaagacggctcctggaaagaagaggcctgtagagcagtctcctcaggaaccggactcctccgcgggtattggcaaatcgggtgcacagcccgctaaaaagagactcaatttcggtcagactggcgacacagagtcagtcccagaccctcaaccaatcggagaacctcccgcagccccctcaggtgtgggatctcttacaatggcttcaggtggtggcgcaccagtggcagacaataacgaaggtgccgatggagtgggtagttcctcgggaaattggcattgcgattcccaatggctgggggacagagtcatcaccaccagcacccgaacctgggccctgcccacctacaacaaccacctctacaaacaaatttccagccaatcaggagcctcgaacgacaatcactactttggctacagcaccccttgggggtattttgacttcaacagattccactgccacttttcaccacgtgactggcagcgactcatcaacaacaactggggattccggcccaagagactcagcttcaagctcttcaacatccaggtcaaagaggttacggacaacaatggagtcaagaccatcgccaataaccttaccagcacggtccaggtcttcacggactcagactatcagctcccgtacgtgctcgggtcggctcacgagggctgcctcccgccgttcccagcggacgttttcatgattcctcagtacgggtatctgacgcttaatgatggaagccaggccgtgggtcgttcgtccttttactgcctggaatatttcccgtcgcaaatgctaagaacgggtaacaacttccagttcagctacgagtttgagaacgtacctttccatagcagctacgctcacagccaaagcctggaccgactaatgaatccactcatcgaccaatacttgtactatctctcaaagactattaacggttctggacagaatcaacaaacgctaaaattcagtgtggccggacccagcaacatggctgtccagggaagaaactacatacctggacccagctaccgacaacaacgtgtctcaaccactgtgactcaaaacaacaacagcgaatttgcttggcctggagcttcttcttgggctctcaatggacgtaatagcttgatgaatcctggacctgctatggccagccacaaagaaggagaggaccgtttctttcctttgtctggatctttaatttttggcaaacaaggaactggaagagacaacgtggatgcggacaaagtcatgataaccaacgaagaagaaattaaaactactaacccggtagcaacggagtcctatggacaagtggccacaaaccaccagagtgcccaagcacaggcgcagaccggctgggttcaaaaccaaggaatacttccgggtatggtttggcaggacagagatgtgtacctgcaaggacccatctgggccaagattcctcacacggacggcaacttccacccgtctccgctgatgggcggctttggcctgaaacatcctccgcctcagatcctgatcaagaacacgcctgttcctgcgaatcctccggcggagttttcagctacaaagtttgcttcattcatcacccagtactccacaggacaagtgagtgtggaaattgaatgggagctgcagaaagaaaacagcaagcgctggaatcccgaagtgcagtacacatccaattatgcaaaatctgccaacgttgattttactgtggacaacaatggactttatactgagcctcgccccattggcacccgttaccttaccaaacctctgtaa

SEQ ID NO: 351 - protein, 734 aa, Artificial Sequence
  Description of Artificial Sequence: Synthetic polypeptide
MAADGYLPDWLEDNLSEGIREWWALKPGVPQPKANQQHQDNCRGLVLPGYKYLGPGNGLDKGEPVNEADAAALEHDKAYDQQLKAGDNPYLKYNHADAEFQERLKEDTSFGGNLGRAVFQTKKRLLEPLGLVEEAAKTAPGKKRPVEQSPQEPDSSAGIGKSGAQPAKKRLNFGQTGDTESVPDPQPIGEPPAAPSGVGSLTMASGGGAPVADNNEGADGVGSSSGNWHCDSQWLGDRVITTSTRTWALPTYNNHLYKQISSQSGASNDNHYFGYSTPWGYFDFNRFHCHFSPRDWQRLINNNWGFRPKRLSFKLFNIQVKEVTDNNGVKTIANNLTSTVQVFTDSDYQLPYVLGSAHEGCLPPFPADVFMIPQYGYLTLNDGSQAVGRSSFYCLEYFPSQMLRTGNNFQFSYEFENVPFHSSYAHSQSLDRLMNPLIDQYLYYLSKTINGSGQNQQTLKFSVAGPSNMAVQGRNYIPGPSYRQQRVSTTVTQNNNSEFAWPGASSWALNGRNSLMNPGPAMASHKEGEDRFFPLSGSLIFGKQGTGRDNVDADKVMITNEEEIKTTNPVATESYGQVATNHQSAQAQAQTGWVQNQGILPGMVWQDRDVYLQGPIWAKIPHTDGNFHPSPLMGGFGLKHPPPQILIKNTPVPANPPAEFSATKFASFITQYSTGQVSVEIEWELQKENSKRWNPEVQYTSNYAKSANVDFTVDNNGLYTEPRPIGTRYLTKPL

SEQ ID NO: 352 - DNA, 2211 bp, Artificial Sequence
  Description of Artificial Sequence: Synthetic polynucleotide
atggctgccgatggttatcttccagattggctcgaggacaacctctctgagggcattcgcgagtggtgggacttgaaacctggagcccctaaacccaaggcaaatcaacaacatcaggacaacgctcgaggtcttgtgcttccgggttacaaataccttggacccggcaacggactcgacaagggggagccggtcaacgcagcagacgcggcggccctcgagcacgacaaggcctacgaccagcagctcaaggccggagacaacccgtacctcaagtacaaccacgccgacgccgagttccaggagcggctcaaagaagatacgtcttttgggggcaacctcgggcgagcagtcttccaggccaaaaagaggcttcttgaacctcttggtctggttgaggaagcggctaagacggctcctggaaagaagagaccggtagagccatcaccccagcgttctccagactcctctacgggcatcggcaagaaaggccaacagcccgctaaaaagagactcaattttggtcagactggcgactcagagtcagtccccgacccacaacctctcggagaacctccagcaacccccgctgctgtgggacctactacaatggcttcaggcggtggcgcaccaatggcagacaataacgagggtgccgatggagtgggtaattcctcaggaaattggcattgcgattcccaatggctgggcgacagagtcatcaccaccagcaccagaacctgggccctgcccacttacaacaaccatctctacaagcaaatctccagccaatcaggagcttcaaacgacaaccactactttggctacagcaccccttgggggtattttgactttaacagattccactgccacttttcaccacgtgactggcaaagactcatcaacaacaactggggattccgacccaagagactcaacttcaagctcttcaacatccaagtcaaggaggtcacgacgaatgatggcgtcacgaccatcgctaataaccttaccagcacggttcaagtcttctcggactcggagtaccagttgccgtacgtcctcggctctgcgcaccagggctgcctccctccgttcccggcggacgtgttcatgattccgcagtacggctacctaacgctcaacaatggcagccaagccgtgggacgttcatccttttactgcctggaatatttcccttctcagatgctgagaacgggcaacaactttaccttcagctacacttttgaggacgttcctttccacagcagctacgctcacagccagagtctggaccgtctcatgaatcctctcatcgaccagtacctgtattacttgagcagaacaaacactccaagtggaaccaccacgcagtcaaggcttcagttttctcaggccggagcgagtgacattcgggaccagtctaggaactggcttcctggaccctgttaccgccagcagcgcgtttctaaaacaaaaacagacaacaacaacagcaattttacctggactggtgcttcaaaatataaccttaatgggcgtgaatctataatcaaccctggcactgctatggcctcacacaaagacgacgaagacaagttctttcccatgagcggtgtcatgatttttggaaaagagagcgccggagcttcaaacactgcattggacaatgtcatgatcacagacgaagaggaaatcaaagccactaaccccgtggccaccgaaagatttgggactgtggcagtcaatctccagagcagcagcacagaccctgcgaccggagatgtgcatgttatgggagcattacctggcatggtgtggcaagatagagacgtgtacctgcagggtcccatttgggccaaaattcctcacacagatggacactttcacccgtctcctcttatgggcggctttggactcaagaacccgcctcctcagatcctcatcaaaaacacgcctgttcctgcgaatcctccggcggagttttcagctacaaagtttgcttcattcatcacccaatactccacaggacaagtgagtgtggaaattgaatgggagctgcagaaagaaaacagcaagcgctggaatcccgaagtgcagtacacatccaattatgcaaaatctgccaacgttgattttactgtggacaacaatggactttatactgagcctcgccccattggcacccgttaccttacccgtcccctgtaa

SEQ ID NO: 353 - protein, 736 aa, Artificial Sequence
  Description of Artificial Sequence: Synthetic polypeptide
MAADGYLPDWLEDNLSEGIREWWDLKPGAPKPKANQQHQDNARGLVLPGYKYLGPGNGLDKGEPVNAADAAALEHDKAYDQQLKAGDNPYLKYNHADAEFQERLKEDTSFGGNLGRAVFQAKKRLLEPLGLVEEAAKTAPGKKRPVEPSPQRSPDSSTGIGKKGQQPAKKRLNFGQTGDSESVPDPQPLGEPPATPAAVGPTTMASGGGAPMADNNEGADGVGNSSGNWHCDSQWLGDRVITTSTRTWALPTYNNHLYKQISSQSGASNDNHYFGYSTPWGYFDFNRFHCHFSPRDWQRLINNNWGFRPKRLNFKLFNIQVKEVTTNDGVTTIANNLTSTVQVFSDSEYQLPYVLGSAHQGCLPPFPADVFMIPQYGYLTLNNGSQAVGRSSFYCLEYFPSQMLRTGNNFTFSYTFEDVPFHSSYAHSQSLDRLMNPLIDQYLYYLSRTNTPSGTTTQSRLQFSQAGASDIRDQSRNWLPGPCYRQQRVSKTKTDNNNSNFTWTGASKYNLNGRESIINPGTAMASHKDDEDKFFPMSGVMIFGKESAGASNTALDNVMITDEEEIKATNPVATERFGTVAVNLQSSSTDPATGDVHVMGALPGMVWQDRDVYLQGPIWAKIPHTDGHFHPSPLMGGFGLKNPPPQILIKNTPVPANPPAEFSATKFASFITQYSTGQVSVEIEWELQKENSKRWNPEVQYTSNYAKSANVDFTVDNNGLYTEPRPIGTRYLTRPL

SEQ ID NO: 354 - DNA, 2214 bp, Artificial Sequence; identical to SEQ ID NO: 326
  Description of Artificial Sequence: Synthetic polynucleotide

SEQ ID NO: 355 - protein, 737 aa, Artificial Sequence; identical to SEQ ID NO: 327
  Description of Artificial Sequence: Synthetic polypeptide

SEQ ID NO: 356 - DNA, 2205 bp, Artificial Sequence
  Description of Artificial Sequence: Synthetic polynucleotide
atggctgctgacggttatcttccagattggctcgaggacaacctttctgaaggcattcgtgagtggtgggctctgaaacctggagtccctcaacccaaagcgaaccaacaacaccaggacaaccgtcggggtcttgtgcttccgggttacaaatacctcggacccggtaacggactcgacaaaggagagccggtcaacgaggcggacgcggcagccctcgaacacgacaaggcctacgaccagcagctcaaggccggagacaacccgtacctcaagtacaaccacgccgacgccgagttccaggagcggctcaaagaagatacgtcttttgggggcaacctcgggcgagcagtcttccaggccaaaaagaggcttcttgaacctcttggtctggttgaggaagcggctaagacggctcctggaaagaagaggcctgtagagcagtctcctcaggaaccggactcctccgcgggtattggcaaatcgggtgcacagcccgctaaaaagagactcaatttcggtcagactggcgacacagagtcagtcccagaccctcaaccaatcggagaacctcccgcagccccctcaggtgtgggatctcttacaatggcttcaggtggtggcgcaccagtggcagacaataacgaaggtgccgatggagtgggtagttcctcgggaaattggcattgcgattcccaatggctgggggacagagtcatcaccaccagcacccgaacctgggccctgcccacctacaacaaccacctctacaaacaaatttccagccaatcaggagcctcgaacgacaatcactactttggctacagcaccccttgggggtattttgacttcaacagattccactgccacttttcaccacgtgactggcagcgactcatcaacaacaactggggattccggcccaagagactcagcttcaagctcttcaacatccaggtcaaagaggttacggacaacaatggagtcaagaccatcgccaataaccttaccagcacggtccaggtcttcacggactcagactatcagctcccgtacgtgctcgggtcggctcacgagggctgcctcccgccgttcccagcggacgttttcatgattcctcagtacgggtatctgacgcttaatgatggaagccaggccgtgggtcgttcgtccttttactgcctggaatatttcccgtcgcaaatgctaagaacgggtaacaacttccagttcagctacgagtttgagaacgtacctttccatagcagctacgctcacagccaaagcctggaccgactaatgaatccactcatcgaccaatacttgtactatctctcaaagactattaacggttctggacagaatcaacaaacgctaaaattcagtgtggccggacccagcaacatggctgtccagggaagaaactacatacctggacccagctaccgacaacaacgtgtctcaaccactgtgactcaaaacaacaacagcgaatttgcttggcctggagcttcttcttgggctctcaatggacgtaatagcttgatgaatcctggacctgctatggccagccacaaagaaggagaggaccgtttctttcctttgtctggatctttaatttttggcaaacaaggaactggaagagacaacgtggatgcggacaaagtcatgataaccaacgaagaagaaattaaaactactaacccggtagcaacggagtcctatggacaagtggccacaaaccaccagagtgcccaagcacaggcgcagaccggctgggttcaaaaccaaggaatacttccgggtatggtttggcaggacagagatgtgtacctgcaaggacccatttgggccaaaattcctcacacggacggcaactttcacccttctccgctgatgggagggtttggaatgaaacacccgcctcctcagatcctcatcaaaaacacacctgtacctgcggatcctccaacggccttcaacaaggacaagctgaactctttcatcacccagtattctactggccaagtcagcgtggagatcgagtgggagctgcagaaggaaaacagcaagcgctggaaccccgagatccagtacacctccaactactacaaatctacaagtgtggactttgctgttaatacagaaggcgtgtactctgaaccccgccccattggcacccgttacctcacccgtaatctgtaa

SEQ ID NO: 357 - protein, 734 aa, Artificial Sequence
  Description of Artificial Sequence: Synthetic polypeptide
MAADGYLPDWLEDNLSEGIREWWALKPGVPQPKANQQHQDNRRGLVLPGYKYLGPGNGLDKGEPVNEADAAALEHDKAYDQQLKAGDNPYLKYNHADAEFQERLKEDTSFGGNLGRAVFQAKKRLLEPLGLVEEAAKTAPGKKRPVEQSPQEPDSSAGIGKSGAQPAKKRLNFGQTGDTESVPDPQPIGEPPAAPSGVGSLTMASGGGAPVADNNEGADGVGSSSGNWHCDSQWLGDRVITTSTRTWALPTYNNHLYKQISSQSGASNDNHYFGYSTPWGYFDFNRFHCHFSPRDWQRLINNNWGFRPKRLSFKLFNIQVKEVTDNNGVKTIANNLTSTVQVFTDSDYQLPYVLGSAHEGCLPPFPADVFMIPQYGYLTLNDGSQAVGRSSFYCLEYFPSQMLRTGNNFQFSYEFENVPFHSSYAHSQSLDRLMNPLIDQYLYYLSKTINGSGQNQQTLKFSVAGPSNMAVQGRNYIPGPSYRQQRVSTTVTQNNNSEFAWPGASSWALNGRNSLMNPGPAMASHKEGEDRFFPLSGSLIFGKQGTGRDNVDADKVMITNEEEIKTTNPVATESYGQVATNHQSAQAQAQTGWVQNQGILPGMVWQDRDVYLQGPIWAKIPHTDGNFHPSPLMGGFGMKHPPPQILIKNTPVPADPPTAFNKDKLNSFITQYSTGQVSVEIEWELQKENSKRWNPEIQYTSNYYKSTSVDFAVNTEGVYSEPRPIGTRYLTRNL

SEQ ID NO: 358 - DNA, 2217 bp, Artificial Sequence
  Description of Artificial Sequence: Synthetic polynucleotide
atggctgccgatggttatcttccagattggctcgaggacaacctctctgagggcattcgcgagtggtgggcgctgaaacctggagccccgaagcccaaagccaaccagcaaaagcaggacgacggccggggtctggtgcttcctggctacaagtacctcggacccttcaacggactcgacaagggggagcccgtcaacgcggcggacgcagcggccctcgagcacgacaaggcctacgaccagcagctgcaggcgggtgacaatccgtacctgcggtataaccacgccgacgccgagtttcaggagcgtctgcaagaagatacgtcttttgggggcaacctcgggcgagcagtcttccaggccaagaagcgggttctcgaacctctcggtctggttgaggaaggcgctaagacggctcctggaaagaagagaccggtagagccatcaccccagcgttctccagactcctctacgggcatcggcaagaaaggccaacagcccgccagaaaaagactcaattttggtcagactggcgactcagagtcagttccagaccctcaacctctcggagaacctccagcagcgccctctggtgtgggacctaatacaatggctgcaggcggtggcgcaccaatggcagacaataacgaaggcgccgacggagtgggtagttcctcgggaaattggcattgcgattccacatggctgggcgacagagtcatcaccaccagcacccgaacctgggccctgcccacctacaacaaccacctctacaagcaaatctccaacgggacatcgggaggagccaccaacgacaacacctacttcggctacagcaccccctgggggtattttgactttaacagattccactgccacttttcaccacgtgactggcagcgactcatcaacaacaactggggattccggcccaagagactcagcttcaagctcttcaacatccaggtcaaggaggtcacgcagaatgaaggcaccaagaccatcgccaataacctcaccagcaccatccaggtgtttacggactcggagtaccagctgccgtacgttctcggctctgcccaccagggctgcctgcctccgttcccggcggacgtgttcatgattccccagtacggctacctaacactcaacaacggtagtcaggccgtgggacgctcctccttctactgcctggaatactttccttcgcagatgctgagaaccggcaacaacttccagtttacttacaccttcgaggacgtgcctttccacagcagctacgcccacagccagagcttggaccggctgatgaatcctctgattgaccagtacctgtactacttgtctcggactcaaacaacaggaggcacggcaaatacgcagactctgggcttcagccaaggtgggcctaatacaatggccaatcaggcaaagaactggctgccaggaccctgttaccgccaacaacgcgtctcaacgacaaccgggcaaaacaacaatagcaactttgcctggactgctgggaccaaataccatctgaatggaagaaattcattggctaatcctggcatcgctatggcaacacacaaagacgacgaggagcgtttttttcccagtaacgggatcctgatttttggcaaacaaaatgctgccagagacaatgcggattacagcgatgtcatgctcaccagcgaggaagaaatcaaaaccactaaccctgtggctacagaggaatacggtatcgtggcagataacttgcagcagcaaaacacggctcctcaaattggaactgtcaacagccagggggccttacccggtatggtctggcagaaccgggacgtgtacctgcagggtcccatctgggccaagattcctcacacggacggcaacttccacccctctcccctcatgggtggattcggacttaaacatcctccgcctcagatcctgatcaagaacacgcctgtacctgcggatcctccgaccaccttcaaccagtcaaagctgaactctttcatcacgcaatacagcaccggacaggtcagcgtggaaattgaatgggagctgcagaaggaaaacagcaagcgctggaaccccgagatccagtacacctccaactactacaaatctacaagtgtggactttgctgttaatacagaaggcgtgtactctgaaccccgccccattggcacccgttacctcacccgtaatctgtaa

SEQ ID NO: 359 - protein, 738 aa, Artificial Sequence; identical to SEQ ID NO: 105
  Description of Artificial Sequence: Synthetic polypeptide

SEQ ID NO: 360 - DNA, 2211 bp, Artificial Sequence
  Description of Artificial Sequence: Synthetic polynucleotide
atggctgctgacggttatcttccagattggctcgaggacaacctttctgaaggcattcgagagtggtgggcgctgcaacctggagcccctaaacccaaggcaaatcaacaacatcaggacaacgctcggggtcttgtgcttccgggttacaaatacctcggacccggcaacggactcgacaagggggaacccgtcaacgcagcggacgcggcagccctcgagcacgacaaggcctacgaccagcagctcaaggccggtgacaacccctacctcaagtacaaccacgccgacgccgagttccaggagcggctcaaagaagatacgtcttttgggggcaacctcgggcgagcagtcttccaggccaaaaagaggcttcttgaacctcttggtctggttgaggaagcggctaagacggctcctggaaagaagaggcctgtagatcagtctcctcaggaaccggactcatcatctggtgttggcaaatcgggcaaacagcctgccagaaaaagactaaatttcggtcagactggcgactcagagtcagtcccagaccctcaacctctcggagaaccaccagcagcccccacaagtttgggatctaatacaatggcttcaggcggtggcgcaccaatggcagacaataacgagggtgccgatggagtgggtaattcctcaggaaattggcattgcgattcccaatggctgggcgacagagtcatcaccaccagcaccagaacctgggccctgcccacttacaacaaccatctctacaagcaaatctccagccaatcaggagcttcaaacgacaaccactactttggctacagcaccccttgggggtattttgactttaacagattccactgccacttctcaccacgtgactggcagcgactcattaacaacaactggggattccggcccaagaaactcagcttcaagctcttcaacatccaagttaaagaggtcacgcagaacgatggcacgacgactattgccaataaccttaccagcacggttcaggtgtttacggactcggagtatcagctcccgtacgtgctcgggtcggcgcaccaaggctgtctcccgccgtttccagcggacgtcttcatggtccctcagtatggatacctcaccctgaacaacggaagtcaagcggtgggacgctcatccttttactgcctggagtacttcccttcgcagatgctaaggactggaaataacttccaattcagctataccttcgaggatgtaccttttcacagcagctacgctcacagccagagtttggatcgcttgatgaatcctcttattgatcagtatctgtactacctgaacagaacgcaaggaacaacctctggaacaaccaaccaatcacggctgctttttagccaggctgggcctcagtctatgtctttgcaggccagaaattggctacctgggccctgctaccggcaacagagactttcaaagactgctaacgacaacaacaacagtaactttccttggacagcggccagcaaatatcatctcaatggccgcgactcgctggtgaatccaggaccagctatggccagtcacaaggacgatgaagaaaaatttttccctatgcacggcaatctaatatttggcaaagaagggacaacggcaagtaacgcagaattagataatgtaatgattacggatgaagaagagattcgtaccaccaatcctgtggcaacagagcagtatggaactgtggcaaataacttgcagagctcaaatacagctcccacgactagaactgtcaatgatcagggggccttacctggcatggtgtggcaagatcgtgacgtgtaccttcaaggacctatctgggcaaagattcctcacacggatggacactttcatccttctcctctgatgggaggctttggactgaaacatccgcctcctcaaatcatgatcaaaaatactccggtaccggcaaatcctccgacgactttcagcccggccaagtttgcttcatttatcactcagtactccactggacaggtcagcgtggaaattgagtgggagctacagaaagaaaacagcaaacgttggaatccagagattcagtacacttccaactacaacaagtctgttaatgtggactttactgtagacactaatggtgtttatagtgaacctcgccccattggcacccgttaccttacccgtcccctgtaa

SEQ ID NO: 361 - protein, 736 aa, Artificial Sequence; identical to SEQ ID NO: 331
  Description of Artificial Sequence: Synthetic polypeptide

SEQ ID NO: 362 - DNA, 2211 bp, Artificial Sequence; identical to SEQ ID NO: 330
  Description of Artificial Sequence: Synthetic polynucleotide

SEQ ID NO: 363 - protein, 736 aa, Artificial Sequence; identical to SEQ ID NO: 331
  Description of Artificial Sequence: Synthetic polypeptide

SEQ ID NO: 364 - DNA, 2211 bp, Artificial Sequence
  Description of Artificial Sequence: Synthetic polynucleotide
atggctgctgacggttatcttccagattggctcgaggacaacctttctgaaggcattcgtgagtggtgggctctgaaacctggagtccctcaacccaaagcgaaccaacaacaccaggacaaccgtcggggtcttgtgcttccgggttacaaatacctcggacccggtaacggactcgacaaaggagagcccgtcaacgcggcggatgcagcggccctcgagcacgacaaggcctacgaccagcagctcaaagcgggtgacaatccgtacctgcggtataaccacgccgacgccgagtttcaggagcgtctgcaagaagatacgtcttttgggggcaacctcgggcgagcagtcttccaggccaagaagagggttctcgaaccttttggtctggttgaggaaggtgctaagacggctcctggaaagaaacgtccggtagagcagtcgccacaagagccagactcctcctcgggcatcggcaagacaggccagcagcccgctaaaaagagactcaattttggtcagactggcgactcagagtcagtccccgacccacaacctctcggagaacctccagcaacccccgctgctgtgggacctactacaatggcttcaggcggtggcgcaccaatggcagacaataacgaaggcgccgacggagtgggtaatgcctcaggaaattggcattgcgattccacatggctgggcgacagagtcatcaccaccagcacccgcacctgggccttgcccacctacaataaccacctctacaagcaaatctccagtgcttcaacgggggccagcaacgacaaccactacttcggctacagcaccccctgggggtattttgatttcaacagattccactgccatttctcaccacgtgactggcagcgactcatcaacaacaattggggattccggcccaagagactcaacttcaagctcttcaacatccaagtcaaggaggtcacgacgaatgatggcgtcacgaccatcgctaataaccttaccagcacggttcaagtcttctcggactcggagtaccagcttccgtacgtcctcggctctgcgcaccagggctgcctccctccgttcccggcggacgtgttcatgattccgcaatacggctacctgacgctcaacaatggcagccaagccgtgggacgttcatccttttactgcctggaatatttcccttctcagatgctgagaacgggcaacaactttaccttcagctacacctttgaggaagtgcctttccacagcagctacgcgcacagccagagcctggaccggctgatgaatcctctcatcgaccaatacctgtattacctgaacagaactcaaaatcagtccggaagtgcccaaaacaaggacttgctgtttagccgtgggtctccagctggcatgtctgttcagcccaaaaactggctacctggaccctgttatcggcagcagcgcgtttctaaaacaaaaacagacaacaacaacagcaattttacctggactggtgcttcaaaatataacctcaatgggcgtgaatccatcatcaaccctggcactgctatggcctcacacaaagacgacgaagacaagttctttcccatgagcggtgtcatgatttttggaaaagagagcgccggagcttcaaacactgcattggacaatgtcatgattacagacgaagaggaaattaaagccactaaccctgtggccaccgaaagatttgggaccgtggcagtcaatttccagagcagcagcacagaccctgcgaccggagatgtgcatgttatgggagccttacctggaatggtgtggcaagacagagacgtatacctgcagggtcctatttgggccaaaattcctcacacggatggacactttcacccgtctcctctcatgggcggctttggacttaagcacccgcctcctcagatcctcatcaaaaacacgcctgttcctgcgaatcctccggcagagttttcggctacaaagtttgcttcattcatcacccagtattccacaggacaagtgagcgtggagattgaatgggagctgcagaaagaaaacagcaaacgctggaatcccgaagtgcagtatacatctaactatgcaaaatctgccaacgttgatttcactgtggacaacaatggactttatactgagcctcgccccattggcacccgttacctcacccgtcccctgtaa

SEQ ID NO: 365 - protein, 736 aa, Artificial Sequence
  Description of Artificial Sequence: Synthetic polypeptide
MAADGYLPDWLEDNLSEGIREWWALKPGVPQPKANQQHQDNRRGLVLPGYKYLGPGNGLDKGEPVNAADAAALEHDKAYDQQLKAGDNPYLRYNHADAEFQERLQEDTSFGGNLGRAVFQAKKRVLEPFGLVEEGAKTAPGKKRPVEQSPQEPDSSSGIGKTGQQPAKKRLNFGQTGDSESVPDPQPLGEPPATPAAVGPTTMASGGGAPMADNNEGADGVGNASGNWHCDSTWLGDRVITTSTRTWALPTYNNHLYKQISSASTGASNDNHYFGYSTPWGYFDFNRFHCHFSPRDWQRLINNNWGFRPKRLNFKLFNIQVKEVTTNDGVTTIANNLTSTVQVFSDSEYQLPYVLGSAHQGCLPPFPADVFMIPQYGYLTLNNGSQAVGRSSFYCLEYFPSQMLRTGNNFTFSYTFEEVPFHSSYAHSQSLDRLMNPLIDQYLYYLNRTQNQSGSAQNKDLLFSRGSPAGMSVQPKNWLPGPCYRQQRVSKTKTDNNNSNFTWTGASKYNLNGRESIINPGTAMASHKDDEDKFFPMSGVMIFGKESAGASNTALDNVMITDEEEIKATNPVATERFGTVAVNFQSSSTDPATGDVHVMGALPGMVWQDRDVYLQGPIWAKIPHTDGHFHPSPLMGGFGLKHPPPQILIKNTPVPANPPAEFSATKFASFITQYSTGQVSVEIEWELQKENSKRWNPEVQYTSNYAKSANVDFTVDNNGLYTEPRPIGTRYLTRPL

SEQ ID NO: 366 - DNA, 2217 bp, Artificial Sequence
  Description of Artificial Sequence: Synthetic polynucleotide
atggctgccgatggttatcttccagattggctcgaggacaacctctctgagggcattcgcgagtggtgggacttgaaacctggagccccgaaacccaaagccaaccagcaaaagcaggacgacggccggggtctggtgcttcctggctacaagtacctcggacccttcaacggactcgacaagggggagcccgtcaacgcggcggatgcaacggccctcgagcacgacaaggcctacgaccagcagctgcaggcgggtgacaatccgtacctgcggtataaccacgccgacgccgagtttcaggagcgtctgcaagaagatacgtcttttgggggcaacctcgggcgagcagtcttccaggccaagaagcgggttctcgaacctctcggtctggttgaggaaggcgctaagacggctcctggaaagaagagaccggtagagccatcaccccagcgttctccagactcctctacgggcatcggcaagaaaggccaacagcccgccagaaaaagactcaattttggtcagactggcgactcagagtcagttccagaccctcaacctctcggagaaccaccagcagcccccacaagtttgggatctaatacaatggcttcaggcggtggcgcaccaatggcagacaataacgagggtgccgatggagtgggtaattcctcaggaaattggcattgcgattcccaatggctgggcgacagagtcatcaccaccagcacccgcacctgggccttgcccacctacaataaccacctctacaagcaaatctccagtgcttcaacgggggccagcaacgacaaccactacttcggctacagcaccccctgggggtattttgactttaaccgcttccactgccacttctcgccaagagactggcaaagactcatcaacaacaattggggattccggcccaagagactcaacttcaaactcttcaacatccaagtcaaggaggtcacgacgaatgatggcgtcacgaccatcgccaataacctcaccagcaccatccaggtgtttacggactcggagtaccagctgccgtacgttctcggctctgcccaccagggctgcctgcctccgttcccggcggacgtgttcatgattccccagtatggatacctcaccctgaacaacggaagtcaagcggtgggacgctcatccttttactgcctggagtacttcccttcgcagatgctaaggactggaaataacttccaattcagctataccttcgaggatgtaccttttcacagcagctacgctcacagccagagtttggatcgcttgatgaatcctcttattgatcagtatctgtactacctgaacagaacgcaaggaacaacctctggaacaaccaaccaatcacggctgctttttagccaggctgggcctcagtctatgtctttgcaggccagaaattggctacctgggccctgctaccggcaacagagactttcaaagactgctaacgacaacaacaacagtaactttccttggacagcagccagcaaatatcatctcaatggccgcgactcgctggtgaatccaggaccagctatggccagtcacaaggacgatgaagaaaaatttttccctatgcacggcaatctaatatttggcaaagaagggacaacggcaagtaacgcagaattagataatgtaatgattacggatgaagaagagattcgtaccaccaatcctgtggcaacagagcagtatggaactgtggcaaataacttgcagagctcaaatacagctcccacgactagaactgtcaatgatcagggggccttacctggcatggtgtggcaagatcgtgacgtgtaccttcaggggcccatctgggcaaagattccacacacggacggacattttcacccctctcccctcatgggtggattcggacttaaacaccctcctccgcagattctcatcaagaacaccccggtacctgcgaatccttcgaccaccttcagtgcggcaaagtttgcttccttcatcacacagtactccacgggacaggtcagcgtggagatcgagtgggagctgcagaaggaaaacagcaagcgctggaacccggagatccagtacacttccaactattacaagtctaataatgttgaatttgctgttaatactgaaggtgtatatagtgaaccccgccccattggcaccagatacctgactcgtaatctgtaa

SEQ ID NO: 367 - protein, 738 aa, Artificial Sequence
  Description of Artificial Sequence: Synthetic polypeptide
MAADGYLPDWLEDNLSEGIREWWDLKPGAPKPKANQQKQDDGRGLVLPGYKYLGPFNGLDKGEPVNAADATALEHDKAYDQQLQAGDNPYLRYNHADAEFQERLQEDTSFGGNLGRAVFQAKKRVLEPLGLVEEGAKTAPGKKRPVEPSPQRSPDSSTGIGKKGQQPARKRLNFGQTGDSESVPDPQPLGEPPAAPTSLGSNTMASGGGAPMADNNEGADGVGNSSGNWHCDSQWLGDRVITTSTRTWALPTYNNHLYKQISSASTGASNDNHYFGYSTPWGYFDFNRFHCHFSPRDWQRLINNNWGFRPKRLNFKLFNIQVKEVTTNDGVTTIANNLTSTIQVFTDSEYQLPYVLGSAHQGCLPPFPADVFMIPQYGYLTLNNGSQAVGRSSFYCLEYFPSQMLRTGNNFQFSYTFEDVPFHSSYAHSQSLDRLMNPLIDQYLYYLNRTQGTTSGTTNQSRLLFSQAGPQSMSLQARNWLPGPCYRQQRLSKTANDNNNSNFPWTAASKYHLNGRDSLVNPGPAMASHKDDEEKFFPMHGNLIFGKEGTTASNAELDNVMITDEEEIRTTNPVATEQYGTVANNLQSSNTAPTTRTVNDQGALPGMVWQDRDVYLQGPIWAKIPHTDGHFHPSPLMGGFGLKHPPPQILIKNTPVPANPSTTFSAAKFASFITQYSTGQVSVEIEWELQKENSKRWNPEIQYTSNYYKSNNVEFAVNTEGVYSEPRPIGTRYLTRNL

SEQ ID NO: 368 - DNA, 2208 bp, Artificial Sequence
  Description of Artificial Sequence: Synthetic polynucleotide
atggctgccgatggttatcttccagattggctcgaggacaaccttagtgaaggaattcgcgagtggtgggacttgaaacctggagccccgaagcccaaagccaaccagcaaaagcaggacgacggccggggtctggtgcttcctggctacaagtacctcggacccttcaacggactcgacaagggggagcccgtcaacgcggcggacgcagcggccctcgagcacgacaaggcctacgaccagcagctcaaagcgggtgacaatccgtacctgcggtataaccacgccgacgccgagtttcaggagcgtctgcaagaagatacgtcttttgggggcaacctcgggcgagcagtcttccaggccaagaagcgggttctcgaacctctcggtctggttgaggaaggtgctaagacggctcctggaaagaaacgtccggtagagcagtcgccacaagagccagactcctcctcgggcattggcaagacaggccagcagcccgctaaaaagagactcaattttggtcagactggcgactcagagtcagtccccgacccacaacctctcggagaacctccagcaacccccgctgctgtgggacctactacaatggcttcaggcggtggcgcaccaatggcagacaataacgaaggcgccgacggagtgggtaatgcctcaggaaattggcattgcgattccacatggctgggcgacagagtcatcaccaccagcacccgaacctgggccctgcccacctacaacaaccacctctacaaacaaatttccagccaatcaggagcctcgaacgacaatcactactttggctacagcaccccttgggggtattttgatttcaacagattccactgccacttttcaccacgtgactggcagcgactcatcaacaacaattggggattccggcccaagagactcagcttcaagctcttcaacatccaggtcaaggaggtcacgcagaatgaaggcaccaagaccatcgccaataaccttaccagcacggttcaagtgtttacggactcggagtatcagctcccgtacgtgctcggctcggcgcatcaaggatgcctcccgccgttcccagcagacgtcttcatggtgccacagtatggatacctcaccctgaacaacgggagtcaggcagtaggacgctcttcattttactgcctggagtactttccttctcagatgctgcgtaccggaaacaactttaccttcagctacacttttgaggacgttcctttccacagcagctacgctcacagccagagtctggaccgtctcatgaatcctctgattgaccagtacctgtattacttgagcagaacaaacactccaagtggaaccaccacgcagtcaaggcttcagttttctcaggccggagcgagtgacattcgggaccagtctaggaactggcttcctggaccctgttaccgccagcagcgagtatcaaagacatctgcggataacaacaacagtgaatactcgtggactggagctaccaagtaccacctcaatggcagagactctctggtgaatccgggcccggccatggcaagccacaaggactatgaagaaaagttttttcctcagagcggggttctcatctttgggaagcaaggctcagagaaaacaaatgtggacattgaaaaggtcatgattacagacgaagaggaaatcaggacaaccaatcccgtggctacggagcagtatggttctgtatctaccaacctccagagaggcaacagacaagcagctaccgcagatgtcaacacacaaggcgttcttccaggcatggtctggcaggacagagatgtgtaccttcaggggcccatctgggcaaagattccacacacggacggacattttcacccgtctccgctgatgggcggctttggcctgaaacatcctccgcctcagatcctgatcaagaacacgcctgtacctgcggatcctccgaccaccttcaaccagtcaaagctgaactctttcatcactcagtattctactggccaagtcagcgtggagatcgagtgggagctgcagaaggaaaacagcaagcgctggaaccccgagatccagtacacctccaactactacaaatctacaagtgtggactttgctgttaatacagaaggcgtgtactctgaaccccgccccattggcacccgttacctcacccgtaatctgtaa

SEQ ID NO: 369 - protein, 735 aa, Artificial Sequence
  Description of Artificial Sequence: Synthetic polypeptide
MAADGYLPDWLEDNLSEGIREWWDLKPGAPKPKANQQKQDDGRGLVLPGYKYLGPFNGLDKGEPVNAADAAALEHDKAYDQQLKAGDNPYLRYNHADAEFQERLQEDTSFGGNLGRAVFQAKKRVLEPLGLVEEGAKTAPGKKRPVEQSPQEPDSSSGIGKTGQQPAKKRLNFGQTGDSESVPDPQPLGEPPATPAAVGPTTMASGGGAPMADNNEGADGVGNASGNWHCDSTWLGDRVITTSTRTWALPTYNNHLYKQISSQSGASNDNHYFGYSTPWGYFDFNRFHCHFSPRDWQRLINNNWGFRPKRLSFKLFNIQVKEVTQNEGTKTIANNLTSTVQVFTDSEYQLPYVLGSAHQGCLPPFPADVFMVPQYGYLTLNNGSQAVGRSSFYCLEYFPSQMLRTGNNFTFSYTFEDVPFHSSYAHSQSLDRLMNPLIDQYLYYLSRTNTPSGTTTQSRLQFSQAGASDIRDQSRNWLPGPCYRQQRVSKTSADNNNSEYSWTGATKYHLNGRDSLVNPGPAMASHKDYEEKFFPQSGVLIFGKQGSEKTNVDIEKVMITDEEEIRTTNPVATEQYGSVSTNLQRGNRQAATADVNTQGVLPGMVWQDRDVYLQGPIWAKIPHTDGHFHPSPLMGGFGLKHPPPQILIKNTPVPADPPTTFNQSKLNSFITQYSTGQVSVEIEWELQKENSKRWNPEIQYTSNYYKSTSVDFAVNTEGVYSEPRPIGTRYLTRNL

SEQ ID NO: 370 - DNA, 2214 bp, Artificial Sequence
  Description of Artificial Sequence: Synthetic polynucleotide
atggctgccgatggttatcttccagattggctcgaggacaacctctctgagggcattcgcgagtggtgggacttgaaacctggagccccgaaacccaaagccaaccagcaaaagcaggacgacggccggggtctggtgcttcctggctacaagtacctcggacccttcaacggactcgacaagggggagcccgtcaacgcggcggatgcagcggccctcgagcacgacaaggcctacgaccagcagctcaaagcgggtgacaatccgtacctgcggtataaccacgccgacgccgagtttcaggagcgtctgcaagaagatacgtcttttgggggcaacctcgggcgagcagtcttccaggccaagaagagggttctcgaaccttttggtctggttgaggaaggtgctaagacggctcctggaaagaaacgtccggtagagcagtcgccacaagagccagactcctcctcgggcattggcaagacaggccagcagcctgcaagaaaaagattgaattttggtcagactggagacgcagactcagtacctgacccccagcctctcggacagccaccagcagccccctctggtctgggaactaatacgatggctacaggcagtggcgcaccaatggcagacaataacgagggcgccgacggagtgggtaattcctcgggaaattggcattgcgattcccaatggctgggggacagagtcatcaccaccagcacccgaacctgggccctgcccacctacaacaatcacctctacaagcaaatctccaacagcacatctggaggatcttcaaatgacaacgcctacttcggctacagcaccccctgggggtattttgatttcaacagattccactgccatttctcaccacgtgactggcagcgactcatcaacaacaattggggattccggcccaagagactcaacttcaagctcttcaacatccaggtcaaggaggtcacgcagaatgaaggcaccaagaccatcgccaataacctcaccagcaccatccaggtgtttacggactcggagtaccagctgccgtacgttctcggctctgcccaccagggctgcctgcctccgttcccggcggacgtgttcatgattccccagtacggctacctaacactcaacaacggtagtcaggccgtgggacgctcctccttctactgcctggaatactttccttcgcagatgctgagaaccggcaacaacttccagtttacttacaccttcgaggacgtgcctttccacagcagctacgcccacagccagagcttggaccggctgatgaatcctctgattgaccagtacctgtactacttgtctcggactcaaacaacaggaggcacgacaaatacgcagactctgggcttcagccaaggtgggcctaatacaatggccaatcaggcaaagaactggctgccaggaccctgttaccgccagcagcgagtatcaaagacatttgcggataacaacaacagtgaatactcgtggactggagctaccaagtaccacctcaatggcagagactctctggtgaatccgggcccggccatggcaagccacaaggacgatgaagaaaagttttttcctcagagcggggttctcatctttgggaagcaaggctcagagaaaacaaatgtggacattgaaaaggtcatgattacagacgaagaggaaatcaggacaaccaatcccgtggctacggagcagtatggttctgtatctaccaacctccagagaggcaacagacaagcagctaccgcagatgtcaacacacaaggcgttcttccaggcatggtctggcaggacagagatgtgtaccttcaggggcccatctgggcaaagattccacacacggacggacattttcacccctctcccctcatgggtggattcggacttaaacaccctccgcctcagatcctgatcaagaacacgcctgtacccgcggatcctccgaccaccttcaaccagtcaaagctgaactctttcatcacccagtattctactggccaagtcagcgtggagatcgagtgggagctgcagaaggaaaacagcaagcgctggaaccccgagatccagtacacctccaactactacaaatctacaagtgtggactttgctgttaatacagaaggcgtgtactctgaaccccgccccattggcacccgttacctcacccgtaatctgtaa

SEQ ID NO: 371 - protein, 737 aa, Artificial Sequence
  Description of Artificial Sequence: Synthetic polypeptide
MAADGYLPDWLEDNLSEGIREWWDLKPGAPKPKANQQKQDDGRGLVLPGYKYLGPFNGLDKGEPVNAADAAALEHDKAYDQQLKAGDNPYLRYNHADAEFQERLQEDTSFGGNLGRAVFQAKKRVLEPFGLVEEGAKTAPGKKRPVEQSPQEPDSSSGIGKTGQQPARKRLNFGQTGDADSVPDPQPLGQPPAAPSGLGTNTMATGSGAPMADNNEGADGVGNSSGNWHCDSQWLGDRVITTSTRTWALPTYNNHLYKQISNSTSGGSSNDNAYFGYSTPWGYFDFNRFHCHFSPRDWQRLINNNWGFRPKRLNFKLFNIQVKEVTQNEGTKTIANNLTSTIQVFTDSEYQLPYVLGSAHQGCLPPFPADVFMIPQYGYLTLNNGSQAVGRSSFYCLEYFPSQMLRTGNNFQFTYTFEDVPFHSSYAHSQSLDRLMNPLIDQYLYYLSRTQTTGGTTNTQTLGFSQGGPNTMANQAKNWLPGPCYRQQRVSKTFADNNNSEYSWTGATKYHLNGRDSLVNPGPAMASHKDDEEKFFPQSGVLIFGKQGSEKTNVDIEKVMITDEEEIRTTNPVATEQYGSVSTNLQRGNRQAATADVNTQGVLPGMVWQDRDVYLQGPIWAKIPHTDGHFHPSPLMGGFGLKHPPPQILIKNTPVPADPPTTFNQSKLNSFITQYSTGQVSVEIEWELQKENSKRWNPEIQYTSNYYKSTSVDFAVNTEGVYSEPRPIGTRYLTRNL

SEQ ID NO: 372 - DNA, 2217 bp, Artificial Sequence
  Description of Artificial Sequence: Synthetic polynucleotide
atggctgccgatggttatcttccagattggctcgaggacactctctctgaaggaataagacagtggtgggcgctgaaacctggagccccgaagcccaaagccaaccagcaaaagcaggacgacggccggggtctggtgcttcctggctacaagtacctcggacccttcaacggactcgacaagggggagcccgtcaacgcggcggatgcagcggccctcgagcacgacaaggcctacgaccagcagctcaaagcgggtgacaatccgtacctgcggtataaccacgccgacgccgagtttcaggagcgtctgcaagaagatacgtcttttgggggcaacctcgggcgagcagtcttccaggccaagaagcgggttctcgaacctctcggtctggttgaggaaggcgctaagacggctcctggaaagaagagaccggtagagccatcaccccagcgttctccagactcctctacgggcatcggcaagaaaggccaacagcccgccagaaaaagactcaattttggtcagactggcgactcagagtcagttccagaccctcaacctctcggagaaccaccagcagcccccacaagtttgggatctaatacaatggcttcaggcggtggcgcaccaatggcagacaataacgagggtgccgatggagtgggtaattcctcaggaaattggcattgcgattcccaatggctgggcgacagagtcatcaccaccagcacccgcacctgggccttgcccacctacaataaccacctctacaagcaaatctccagtgcttcaacgggggccagcaacgacaaccactacttcggctacagcaccccctgggggtattttgactttaaccgcttccactgccacttctcgccaagagactggcaaagactcatcaacaacaattggggattccggcccaagagactcaacttcaaactcttcaacatccaagtcaaggaggtcacgacgaatgatggcgtcacgaccatcgccaataacctcaccagcaccatccaggtgtttacggactcggagtaccagctgccgtacgttctcggctctgcccaccagggctgcctgcctccgttcccggcggacgtgttcatgattccccagtatggatacctcaccctgaacaacggaagtcaagcggtgggacgctcatccttttactgcctggagtacttcccttcgcagatgctaaggactggaaataacttccaattcagctataccttcgaggatgtaccttttcacagcagctacgctcacagccagagtttggatcgcttgatgaatcctcttattgatcagtatctgtactacctgaacagaacgcaaggaacaacctctggaacaaccaaccaatcacggctgctttttagccaggctgggcctcagtctatgtctttgcaggccagaaattggctacctgggccctgctaccggcaacagagactttcaaagactgctaacgacaacaacaacagtaactttccttggacagcagccagcaaatatcatctcaatggccgcgactcgctggtgaatccaggaccagctatggccagtcacaaggacgatgaagaaaaatttttccctatgcacggcaatctaatatttggcaaagaagggacaacggcaagtaacgcagaattagataatgtaatgattacggatgaagaagagattcgtaccaccaatcctgtggcaacagagcagtatggaactgtggcaaataacttgcagagctcaaatacagctcccacgactagaactgtcaatgatcagggggccttacctggcatggtgtggcaagatcgtgacgtgtaccttcaggggcccatctgggcaaagattccacacacggacggacattttcacccctctcccctcatgggtggattcggacttaaacaccctcctccgcagattctcatcaagaacaccccggtacctgcgaatccttcgaccaccttcagtgcggcaaagtttgcttccttcatcacacagtactccacgggacaggtcagcgtggagatcgagtgggagctgcagaaggaaaacagcaagcgctggaacccggagatccagtacacttccaactattacaagtctaataatgttgaatttgctgttaatactgaaggtgtatatagtgaaccccgccccattggcaccagatacctgactcgtaatctgtaa

SEQ ID NO: 373 - protein, 738 aa, Artificial Sequence
  Description of Artificial Sequence: Synthetic polypeptide
MAADGYLPDWLEDTLSEGIRQWWALKPGAPKPKANQQKQDDGRGLVLPGYKYLGPFNGLDKGEPVNAADAAALEHDKAYDQQLKAGDNPYLRYNHADAEFQERLQEDTSFGGNLGRAVFQAKKRVLEPLGLVEEGAKTAPGKKRPVEPSPQRSPDSSTGIGKKGQQPARKRLNFGQTGDSESVPDPQPLGEPPAAPTSLGSNTMASGGGAPMADNNEGADGVGNSSGNWHCDSQWLGDRVITTSTRTWALPTYNNHLYKQISSASTGASNDNHYFGYSTPWGYFDFNRFHCHFSPRDWQRLINNNWGFRPKRLNFKLFNIQVKEVTTNDGVTTIANNLTSTIQVFTDSEYQLPYVLGSAHQGCLPPFPADVFMIPQYGYLTLNNGSQAVGRSSFYCLEYFPSQMLRTGNNFQFSYTFEDVPFHSSYAHSQSLDRLMNPLIDQYLYYLNRTQGTTSGTTNQSRLLFSQAGPQSMSLQARNWLPGPCYRQQRLSKTANDNNNSNFPWTAASKYHLNGRDSLVNPGPAMASHKDDEEKFFPMHGNLIFGKEGTTASNAELDNVMITDEEEIRTTNPVATEQYGTVANNLQSSNTAPTTRTVNDQGALPGMVWQDRDVYLQGPIWAKIPHTDGHFHPSPLMGGFGLKHPPPQILIKNTPVPANPSTTFSAAKFASFITQYSTGQVSVEIEWELQKENSKRWNPEIQYTSNYYKSNNVEFAVNTEGVYSEPRPIGTRYLTRNL

SEQ ID NO: 374 - DNA, 2208 bp, Artificial Sequence; identical to SEQ ID NO: 10
  Description of Artificial Sequence: Synthetic polynucleotide

SEQ ID NO: 375 - protein, 735 aa, Artificial Sequence [sequence omitted]

SEQ ID NO: 376 - DNA, 2208 bp, Artificial Sequence
  Description of Artificial Sequence: Synthetic polynucleotide
atggctgccgatggttatcttccagattggctcgaggacaacctctctgagggcattcgcgagtggtgggcgctgaaacctggagccccgaagcccaaagccaaccagcaaaagcaggacgacggccggggtctggtgcttcctggctacaagtacctcggacccttcaacggactcgacaagggggagcccgtcaacgcggcggacgccgcggccctcgagcacgacaaggcctacgaccagcagctgcaggcgggtgacaatccgtacctgcggtataaccacgccgacgccgagtttcaggagcgtctgcaagaagatacgtcttttgggggcaacctcgggcgagcagtcttccaggccaaaaagaggcttcttgaacctcttggtctggttgaggaagcagctaaaacggctcctggaaagaagaggcctgtagagcagtctcctcaggaaccggactcctccgcgggtattggcaaatcgggtgcacagcccgccaaaaagagactcaatttcggtcagactggcgactcagagtcagtcccagaccctcaacctctcggagaaccaccagcagcccccacaagtttgggatctaatacaatggcttcaggcggtggcgcaccaatggcagacaataacgaaggcgccgacggagtgggtaatgcctcaggaaattggcattgcgattccacatggctgggcgacagagtcatcaccaccagcacccgcacctgggccttgcccacctacagcaaccatctctacaagcaaatctccagccaatcaggagcttcaaacgacaacgactactttggctacagcaccccttgggggtattttgatttcaacagattccactgccacttttcaccacgtgactggcaaagactcatcaacaacaactggggattccgacccaagagactcaacttcaagctctttaacattcaagtcaaagaggtcacgcagaatgacggtacgacgacgattgccaataaccttaccagcacggttcaggtgtttactgactcggagtaccagctcccgtacgtcctcggctcggcgcatcaaggatgcctcccgccgttcccagcagacgtcttcatggtgccacagtatggatacctcaccctgaacaacgggagtcaggcagtaggacgctcttcattttactgcctggagtactttccttctcagatgctgcgtaccggaaacaactttaccttcagctacacttttgaggacgttcctttccacagcagctacgctcacagccagagtctggaccgtctcatgaatcctctcatcgaccagtacctgtattacttgagcagaacaaacactccaagtggaaccaccacgcagtcaaggcttcagttttctcaggccggagcgagtgacattcgggaccagtctaggaactggcttcctggaccctgttaccgccagcagcgagtatcaaagacatctgaggataacaacaacagtgaatactcgtggactggagctaccaagtaccacctcaatggcagagactctctggtgaatccgggcccggccatggcaagccacaaggacgatgaagaaaagttttttcctcagagcggggttctcatctttgggaagcaaggctcagagaaaacaaatgtggacattgaaaaggtcatgattacagacgaagaggaaatcaggacaaccaatcccgtggctacggagcagtatggttctgtatctaccaacctccagagaggcaacagacaagcagctaccgcagatgtcaacacacaaggcgttcttccaggcatggtctggcaggacagagatgtgtaccttcaggggcccatctgggcaaagattccacacacggacggacattttcacccctctcccctcatgggtggattcggacttaaacaccctcctccacagattctcatcaagaacaccccggtacctgcgaatccttcgaccaccttcagtgcggcaaagtttgcttccttcatcacacagtactccacgggacaggtcagcgtggagatcgagtgggagctgcagaaggaaaacagcaaacgctggaatcccgaaattcagtacacttccaactacaacaagtctgttaatgtggactttactgtggacactaatggcgtgtattcagagcctcgccccattggcaccagatacctgactcgtaatctgtaa

SEQ ID NO: 377 - protein, 735 aa, Artificial Sequence
  Description of Artificial Sequence: Synthetic polypeptide
MAADGYLPDWLEDNLSEGIREWWALKPGAPKPKANQQKQDDGRGLVLPGYKYLGPFNGLDKGEPVNAADAAALEHDKAYDQQLQAGDNPYLRYNHADAEFQERLQEDTSFGGNLGRAVFQAKKRLLEPLGLVEEAAKTAPGKKRPVEQSPQEPDSSAGIGKSGAQPAKKRLNFGQTGDSESVPDPQPLGEPPAAPTSLGSNTMASGGGAPMADNNEGADGVGNASGNWHCDSTWLGDRVITTSTRTWALPTYSNHLYKQISSQSGASNDNDYFGYSTPWGYFDFNRFHCHFSPRDWQRLINNNWGFRPKRLNFKLFNIQVKEVTQNDGTTTIANNLTSTVQVFTDSEYQLPYVLGSAHQGCLPPFPADVFMVPQYGYLTLNNGSQAVGRSSFYCLEYFPSQMLRTGNNFTFSYTFEDVPFHSSYAHSQSLDRLMNPLIDQYLYYLSRTNTPSGTTTQSRLQFSQAGASDIRDQSRNWLPGPCYRQQRVSKTSEDNNNSEYSWTGATKYHLNGRDSLVNPGPAMASHKDDEEKFFPQSGVLIFGKQGSEKTNVDIEKVMITDEEEIRTTNPVATEQYGSVSTNLQRGNRQAATADVNTQGVLPGMVWQDRDVYLQGPIWAKIPHTDGHFHPSPLMGGFGLKHPPPQILIKNTPVPANPSTTFSAAKFASFITQYSTGQVSVEIEWELQKENSKRWNPEIQYTSNYNKSVNVDFTVDTNGVYSEPRPIGTRYLTRNL

SEQ ID NO: 378 - DNA, 2208 bp, Artificial Sequence
  Description of Artificial Sequence: Synthetic polynucleotide
atggctgccgatggttatcttccagattggctcgaggacaacctctctgagggcattcgcgagtggtgggcgctgaaacctggagccccgaagcccaaagccaaccagcaaaagcaggacgacggccggggtctggtgcttcctggctacaagtacctcggacccttcaacggactcgacaagggggagcccgtcaacgcggcggacgcagcggccctcgagcacgacaaggcctacgaccagcagctgcaggcgggtgacaatccgtacctgcggtataaccacgccgacgccgagttccaggagcgtctgcaagaagatacgtcttttgggggcaacctcgggcgagcagtcttccaggccaagaagagggttctcgaaccttttggtctggttgaggaaggtgctaagacggctcctggaaagaaacgtccggtagagcagtcgccacaagagccagactcctcctcgggcattggcaagacaggccagcagcccgctaaaaagagactcaattttggtcagactggcgactcagagtcagtcccagaccctcaacctctcggagaaccaccagcagcccccacaagtttgggatctaatacaatggcttcaggcggtggcgcaccaatggcagacaataacgagggcgccgacggagtgggtaattcctcgggaaattggcattgcgattccacatggatgggcgacagagtcatcaccaccagcacccgaacctgggccctgcccacctacaacaaccacctctacaaacaaatttccagccaatcaggagcttcaaacgacaaccactactttggctacagcaccccttgggggtattttgactttaacagattccactgccacttttcaccacgtgactggcagcgactcattaacaacaactggggattccggcccaagaaactcaacttcaagctctttaacatccaggtcaaggaggtcacgcagaatgaaggcaccaagaccatcgccaataacctcaccagcaccatccaggtgtttacggactcggagtaccagctgccgtacgttctcggctctgcccaccagggctgcctgcctccgttcccggcggacgtgttcatgattccccagtacggctacctaacactcaacaacggtagtcaggccgtgggacgctcctccttctactgcctggaatactttccttcgcagatgctgagaaccggcaacaacttccagtttacttacaccttcgaggacgtgcctttccacagcagctacgcccacagccagagcttggaccggctgatgaatcctctgattgaccagtacctgtattacttgtctcggactcaaacaacaggaggcacgacaaatacgcagactctgggcttcagccaaggtgggcctaatacaatggccaatcaggcaaagaactggctgcctggaccctgttaccgccagcagcgagtatcaaagacatctgcggataacaacaacagtgaatactcgtggactggagctaccaagtaccacctcaatggcagagactctctggtgaatccgggcccggccatggcaagccacaaggacgatgaagaaaagttttttcctcagagcggggttctcatctttgggaagcaaggctcagagaaaacaaatgtggacattgaaaaggttatgattacagacgaagaggaaatcaggacaaccaatcccgtggctacggagcagtatggttctgtatctaccaacctccagagaggcaacagacaagcagctaccgcagatgtcaacacacagggcgttcttccaggcatggtctggcaggacagagatgtgtaccttcagggtcccatttgggccaaaattcctcacacagatggacactttcacccgtcccctcttatgggcggctttggactcaagaacccgcctcctcagatcctcatcaaaaacacgcctgttcctgcgaatcctccggcagagttttcagctacaaagtttgcttcattcatcacccaatactccacaggacaagtgagtgtggaaattgaatgggagctgcagaaagaaaacagcaagcgctggaatcccgaagtgcagtacacatccaattatgcaaaatctgccaacgttgattttactgtggacactaatggcgtgtattcagagcctcgccccattggcaccagatacctcacccgtaatctgtaa

SEQ ID NO: 379 - protein, 735 aa, Artificial Sequence
  Description of Artificial Sequence: Synthetic polypeptide
MAADGYLPDWLEDNLSEGIREWWALKPGAPKPKANQQKQDDGRGLVLPGYKYLGPFNGLDKGEPVNAADAAALEHDKAYDQQLQAGDNPYLRYNHADAEFQERLQEDTSFGGNLGRAVFQAKKRVLEPFGLVEEGAKTAPGKKRPVEQSPQEPDSSSGIGKTGQQPAKKRLNFGQTGDSESVPDPQPLGEPPAAPTSLGSNTMASGGGAPMADNNEGADGVGNSSGNWHCDSTWMGDRVITTSTRTWALPTYNNHLYKQISSQSGASNDNHYFGYSTPWGYFDFNRFHCHFSPRDWQRLINNNWGFRPKKLNFKLFNIQVKEVTQNEGTKTIANNLTSTIQVFTDSEYQLPYVLGSAHQGCLPPFPADVFMIPQYGYLTLNNGSQAVGRSSFYCLEYFPSQMLRTGNNFQFTYTFEDVPFHSSYAHSQSLDRLMNPLIDQYLYYLSRTQTTGGTTNTQTLGFSQGGPNTMANQAKNWLPGPCYRQQRVSKTSADNNNSEYSWTGATKYHLNGRDSLVNPGPAMASHKDDEEKFFPQSGVLIFGKQGSEKTNVDIEKVMITDEEEIRTTNPVATEQYGSVSTNLQRGNRQAATADVNTQGVLPGMVWQDRDVYLQGPIWAKIPHTDGHFHPSPLMGGFGLKNPPPQILIKNTPVPANPPAEFSATKFASFITQYSTGQVSVEIEWELQKENSKRWNPEVQYTSNYAKSANVDFTVDTNGVYSEPRPIGTRYLTRNL

SEQ ID NO: 380 - DNA, 2214 bp, Artificial Sequence; identical to SEQ ID NO: 370
  Description of Artificial Sequence: Synthetic polynucleotide

SEQ ID NO: 381 - protein, 737 aa, Artificial Sequence; identical to SEQ ID NO: 371
  Description of Artificial Sequence: Synthetic polypeptide

SEQ ID NO: 382 - DNA, 2196 bp, Adeno-associated virus
atggctgctgacggttatcttccagattggctcgaggacaacctctctgagggcattcgcgagtggtgggcgctgaaacctggagccccgcaacccaaagccaaccagcaaaagcaggacgacggccggggtctggtgcttcctggctacaagtacctcggacccttcaacggactcgacaagggggagcccgtcaacgaggcggacgccgcggccctcgagcacgacaaggcctacgaccagcagctcaaagcgggtgacaatccgtacctgcggtataatcacgccgacgccgagtttcaagagcgtctgcaagaagatacgtcctttgggggcaacctcgggcgagcagtcttccaggccaaaaagagggtactcgagcctctgggtctggttgaggaaggcgctaagacggctcctggaaagaagcggccagtagaaccggactccagctcgggcatcggcaagtcaggccagcagcccgcgaaaaagagactgaattttgggcagactggcgactcagagtcagtgcctgacccccaacctctctcagaaccacccgcaggtccctctggtctgggatctggtacaatggctgctggcggtggcgctccaatggcagacaataacgaaggcgccgacggagtgggtaatgtctcaggaaattggcattgcgattccacatggctgggcgaccgagtcatcaccaccagcactcggacctgggccctccccacctacaacaaccacctctacaagcaaatctccaacgggacctcgggaggcagcagcaacgacaacacctactttggctacagcaccccctgggggtattttgactttaacagattccactgccacttttcaccacgtgactggcagcgactcatcaacaacaactgggggttccggcccaagaagctcaacttcaagctcttcaacatccaggtcaaggaggtcacccagaatgaaggcaccaagaccatcgccaataacctcaccagcacggtgcaggtctttacggactcggagtaccagctcccgtacgtgctcggctctgcccaccagggctgcctgcctccgttcccggcggacgtgttcatgattccgcagtacgggtacctgacgctgaacaacgggagccaggccgtggggcgatcctccttctactgcctggagtactttccctcgcagatgctgagaacgggcaacaactttaccttcagctacaccttcgaggacgtgcccttccacagcagctacgcgcacagccagagcctggaccggctgatgaacccgctgattgaccagtacctgtactacctgtctcggactcagaccaacgggaccaatgccacgcagactctgttgtttgctcaggccgggcctcagaacatgtcggctcaggccaagaactggctgcctggtccttgctatcggcagcagcgcgtctctacgacagtgtcgcaaaacaacaacagcaactttacctggaccggggcgaccaagtaccacctgaacggccgagactccctggtgagccccggtgtcgccatggcaacgcacaaggacgacgaggagcgcttcttcccgagcagcggggtcctgatgtttggcaagcagggcgctggaaaggacaatgtcgagtacaccaacgtgatgctcaccagcgaggaggagatcaagaccaccaaccctgtggccacggagcagtacggcgtggtggctgacaatctgcagcagaccaactcagctcccattgtgggggcagtcaacagccagggggccttacccggtatggtctggcagaaccgggacgtgtacctgcagggtcccatctgggccaagatcccgcatacggacggcaactttcacccgtctcctctcatgggcggctttggactgaaacacccgcctccccagatcctgatcaaaaacacgccggtacctgcggatcccccggtgaactttacggacgctaagctggcgagtttcatcacgcagtacagcaccgggcaggtcagcgtggagattgagtgggagctgcagaaggagaacagcaagcgctggaatcccgagattcagtacacttccaattattataaatcagctaatgtggactttgccgtcaatgcagatggtgtatatagtgaaccccgccccattggcactcgttacctcacccgtaatctgtaa

SEQ ID NO: 383 - protein, 731 aa, Adeno-associated virus
MAADGYLPDWLEDNLSEGIREWWALKPGAPQPKANQQKQDDGRGLVLPGYKYLGPFNGLDKGEPVNEADAAALEHDKAYDQQLKAGDNPYLRYNHADAEFQERLQEDTSFGGNLGRAVFQAKKRVLEPLGLVEEGAKTAPGKKRPVEPDSSSGIGKSGQQPAKKRLNFGQTGDSESVPDPQPLSEPPAGPSGLGSGTMAAGGGAPMADNNEGADGVGNVSGNWHCDSTWLGDRVITTSTRTWALPTYNNHLYKQISNGTSGGSSNDNTYFGYSTPWGYFDFNRFHCHFSPRDWQRLINNNWGFRPKKLNFKLFNIQVKEVTQNEGTKTIANNLTSTVQVFTDSEYQLPYVLGSAHQGCLPPFPADVFMIPQYGYLTLNNGSQAVGRSSFYCLEYFPSQMLRTGNNFTFSYTFEDVPFHSSYAHSQSLDRLMNPLIDQYLYYLSRTQTNGTNATQTLLFAQAGPQNMSAQAKNWLPGPCYRQQRVSTTVSQNNNSNFTWTGATKYHLNGRDSLVSPGVAMATHKDDEERFFPSSGVLMFGKQGAGKDNVEYTNVMLTSEEEIKTTNPVATEQYGVVADNLQQTNSAPIVGAVNSQGALPGMVWQNRDVYLQGPIWAKIPHTDGNFHPSPLMGGFGLKHPPPQILIKNTPVPADPPVNFTDAKLASFITQYSTGQVSVEIEWELQKENSKRWNPEIQYTSNYYKSANVDFAVNADGVYSEPRPIGTRYLTRNL

SEQ ID NO: 384 - DNA, 2196 bp, Adeno-associated virus
atggctgctgacggttatcttccagattggctcgaggacaacctctctgagggcattcgcgagtggtgggcgctgaaacctggagccccgcaacccaaagccaaccagcaaaagcaggacgacggccggggtctggtgcttcctggctacaagtacctcggacccttcaacggactcgacaagggggagcccgtcaacgaggcggacgccgcggccctcgagcacgacaaggcctacgaccagcagctcaaagcgggtgacaatccgtacctgcggtataatcacgccgacgccgagtttcaagagcgtctgcaagaagatacgtcctttgggggcaacctcgggcgagcagtcttccaggccaaaaagagggtactcgagcctctgggtctggttgaggaaggcgctaagacggctcctggaaagaagcggccagtagaaccggactccagctcgggcatcggcaagtcaggccggcagcccgcgaaaaagagactgaattttgggcagactggcgactcagagtcagtgcctgacccccaacctctctcagaaccacccgcaggtccctctggtctgggatctggtacaatggctgcaggcggtggcgctccaatggcagacaataacgaaggcgccgacggagtgggtaatgcctcaggaaattggcattgcgattccacatggctgggcgaccgagtcatcaccaccagcactcggacctgggccctccccacctacaacaaccacctctacaagcaaatctccaacgggacctcgggaggcagcagcaacgacaacacctactttggctacagcaccccctgggggtattttgactttaacagattccactgccacttttcaccacgtgactggcagcgactcatcaacaacaactggggattccggcccaagaggctcaacttcaagctcttcaacatccaggtcaaggaggtcacccagaatgaaggcaccaagaccatcgccaataacctcaccagcacggtgcaggtctttacggactcgaagtaccagctcccgtacgtgctcggctctgcccaccagggctgcctgcctccgttcccggcggacgtgttcatgattccgcagtacgggtacctgacgctgaacaacgggagccaggccgtggggcgatcctccttctactgcctggagtactttccctcgcagatgctgagaacgggcaacaactttaccttcagctacaccttcgaggacgtgcccttccacagcagctacgcgcacagccagagcctggaccggctgatgaacccgctgattgaccagtacctgtactacctgtctcggactcagaccaacgggaccaatgccacgcagactctgttgtttgctcaggccgggcctcagaacatgtcggctcaggccaagaactggctgcctggtccttgctatcggcagcagcgcgtctctacgacagtgtcgcaaaacaacaacagcaactttacctggaccggggcgaccaagtaccacctgaacggccgagactccctggtgaaccccggtgtcgccatggcaacgcacaaggacgacgaggagcgcttcttcccgagcagcggggtcctgatgtttggcaagcagggcgctggaaaggacaatgtcgagtacaccaacgtgatgctcaccagcgaggaggagatcaagaccaccaaccctgtggccacggagcagtacggtgtggtggctgacaatctgcagcagaccaactcggctcccattgtgggggcagtcaacagccagggggccttacccggtatggtctggcagaaccgggacgtgtacctgcagggtcccatctgggccaagatcccgcatacggacggcaactttcacccgtctcctctcatgggcggctttggactgaaacacccgcctccccagatcctgatcaaaaacacgccggtacctgcggatcccccggtgaactttacggacgctaagctggcgagtttcatcacgcagtacagcaccgggcaggtcagcgtggagattgagtgggagctgcagaaggagaacagcaagcgctggaatcccgagattcagtacacttccaattattataaatcagctaatgtggactttgccgtcaatgcagatggtgtatatagtgaaccccgccccattggcactcgttacctcacccgtaatctgtaa

SEQ ID NO: 385 - protein, 731 aa, Adeno-associated virus
MAADGYLPDWLEDNLSEGIREWWALKPGAPQPKANQQKQDDGRGLVLPGYKYLGPFNGLDKGEPVNEADAAALEHDKAYDQQLKAGDNPYLRYNHADAEFQERLQEDTSFGGNLGRAVFQAKKRVLEPLGLVEEGAKTAPGKKRPVEPDSSSGIGKSGRQPAKKRLNFGQTGDSESVPDPQPLSEPPAGPSGLGSGTMAAGGGAPMADNNEGADGVGNASGNWHCDSTWLGDRVITTSTRTWALPTYNNHLYKQISNGTSGGSSNDNTYFGYSTPWGYFDFNRFHCHFSPRDWQRLINNNWGFRPKRLNFKLFNIQVKEVTQNEGTKTIANNLTSTVQVFTDSKYQLPYVLGSAHQGCLPPFPADVFMIPQYGYLTLNNGSQAVGRSSFYCLEYFPSQMLRTGNNFTFSYTFEDVPFHSSYAHSQSLDRLMNPLIDQYLYYLSRTQTNGTNATQTLLFAQAGPQNMSAQAKNWLPGPCYRQQRVSTTVSQNNNSNFTWTGATKYHLNGRDSLVNPGVAMATHKDDEERFFPSSGVLMFGKQGAGKDNVEYTNVMLTSEEEIKTTNPVATEQYGVVADNLQQTNSAPIVGAVNSQGALPGMVWQNRDVYLQGPIWAKIPHTDGNFHPSPLMGGFGLKHPPPQILIKNTPVPADPPVNFTDAKLASFITQYSTGQVSVEIEWELQKENSKRWNPEIQYTSNYYKSANVDFAVNADGVYSEPRPIGTRYLTRNL

SEQ ID NO: 386 - DNA, 2196 bp, Adeno-associated virus
atggctgctgacggttatcttccagattggctcgaggacaacctctctgagggcattcgcgagtggtgggcgctgaaacctggagccccgcaacccaaagccaaccagcaaaagcaggacgacggccggggtctggtgcttcctggctacaagtacctcggacccttcaacggactcgacaagggggagcccgtcaacgaggcggacgccgcggccctcgagcacgacaaggcctacgaccagcagctcaaagcgggtgacaatccgtacctgcggtataatcacgccgacgccgagtttcaagagcgtctgcaagaagatacgtcctttgggggcaacctcgggcgagcagtcttccaggccaaaaagagggtactcgagcctctgggtctggttgaggaaggcgctaagacggctcctggaaagaagcggccagtagaaccggactccagctcgggcatcggcaagtcaggccagcagcccgcgaaaaagagactgaattttgggccgactggcgactcagagtcagtgcctgacccccaacctctctcagaaccacctgcaggtccctctggtctgggatctggtacaatggctgcaggcggtggcgctccaatggcagacaataacgaaggcgccgacggagtgggtaatgtctcaggaaattggcattgcgattccacatggctgggcgaccgagtcatcaccaccagcactcggacctgggccctccccacctacaacaaccacctctacaagcaaatctccaacgggacctcgggaggcagcagcaacgacaacacctactttggctacagcaccccctgggggtattttgactttaacagattccactgccacttttcaccacgcgactggcagcgactcatcaacaacaactggggattccggcccaagaagctcaacttcaagctcttcaacatccaggtcaaggaggtcacccagaatgaaggcaccaagaccaccgccaataacctcaccagcacggtgcaggtctttacggactcggagtaccagctcccgtacgtgctcggctctgcccaccagggctgcctgcctccgttcccggcggacgtgttcatgattccgcagtacgggtacctgacgctgaacaacgggagccaggccgtggggcgatcctccttctactgcctggagtactttccctcgcagatgctgagaacgggcaacaactttaccttcagctacaccttcgaggacgtgcccttccacagcagctacgcgcacagccagagcctggaccggctgatgaacccgctgattgaccagtacctgtactacctgtctcggactcagaccaacgggaccaatgccacgcagactctgttgtttgctcaggccgggcctcagaacatgtcggctcaggccaagaactggctgcctggtccttgctatcggcagcagcgcgtctctacggcagtgtcgcaaaacaacaacagcaactttacctggaccggggcgaccaagtaccacctgaacggccgagactccctggtgaaccccggtgtcgccatggcaacgcacaaggacgacgaggagcgcttcttcccgagcagcggggtcctgatgtttggcaagcagggcgctggaaaggacaatgtcgagtacaccaacgtgatgctcaccagcgaggaggagatcaagaccaccaaccctgtggccacggagcagtacggtgtggtggctgacaatctgcagcagaccaactcggctcccattgtgggggcagtcaacagccagggggccttacccggtatggtctggcagaaccgggacgtgtacctgcagggtcccatctgggccaagatcccgcatacggacggcaactttcacccgtctcctctcatgggcggctttggactgaaacacccgcctccccagatcctgatcaaaaacacgccggtacctgcggatcccccggtgaactttacggacgctaagctggcgagtttcatcacgcagtacagcaccgggcaggtcagcgtggagattgagtgggagctgcagaaggagaacagcaagcgctggaatcccgagattcagtacacttccaattattataaatcagctaatgtggactttgccgtcaatgcagatggtgtatatagcgaaccccgccccattggcactcgttacctcacccgtaatctgtaa

SEQ ID NO: 387 - protein, 731 aa, Adeno-associated virus
MAADGYLPDWLEDNLSEGIREWWALKPGAPQPKANQQKQDDGRGLVLPGYKYLGPFNGLDKGEPVNEADAAALEHDKAYDQQLKAGDNPYLRYNHADAEFQERLQEDTSFGGNLGRAVFQAKKRVLEPLGLVEEGAKTAPGKKRPVEPDSSSGIGKSGQQPAKKRLNFGPTGDSESVPDPQPLSEPPAGPSGLGSGTMAAGGGAPMADNNEGADGVGNVSGNWHCDSTWLGDRVITTSTRTWALPTYNNHLYKQISNGTSGGSSNDNTYFGYSTPWGYFDFNRFHCHFSPRDWQRLINNNWGFRPKKLNFKLFNIQVKEVTQNEGTKTTANNLTSTVQVFTDSEYQLPYVLGSAHQGCLPPFPADVFMIPQYGYLTLNNGSQAVGRSSFYCLEYFPSQMLRTGNNFTFSYTFEDVPFHSSYAHSQSLDRLMNPLIDQYLYYLSRTQTNGTNATQTLLFAQAGPQNMSAQAKNWLPGPCYRQQRVSTAVSQNNNSNFTWTGATKYHLNGRDSLVNPGVAMATHKDDEERFFPSSGVLMFGKQGAGKDNVEYTNVMLTSEEEIKTTNPVATEQYGVVADNLQQTNSAPIVGAVNSQGALPGMVWQNRDVYLQGPIWAKIPHTDGNFHPSPLMGGFGLKHPPPQILIKNTPVPADPPVNFTDAKLASFITQYSTGQVSVEIEWELQKENSKRWNPEIQYTSNYYKSANVDFAVNADGVYSEPRPIGTRYLTRNL

SEQ ID NO: 388 - DNA, 4404 bp, Adeno-associated virus
atggctgccgatggttatcttccagattggctcgagggcaacctctctgagggcattcgcgagtggtgggacttgaaacctggagccccgaaacccaaagccaaccagcaaaagcaggacgacggccggggtctggtgcttcctggctacaggtacctcggacccttcaacggactcgacaagggagagccggtcaacgaggcagacgccgcggccctcgagcacgacaaggcctacgacaagcagctcgagcagggggacaacccgtacctcaagtacaaccacgccgacgccgagtttcaggagcgtcttcaagaagatacgtcttttgggggcaacctcgggcgagcagtcttccaggccaagaagcgggttctcgaacctctcggtctggttgaggaaggcgctaagacggctcctggaaagaagagacccatagaatcccccgactcctccacgggcatcggcaagaacggccagccgcccgctaaaaagaagctcaactttgggcagactggcgactcagagtcagtgcccgacccccaacctctcggagaacctcccgccgcgccctcaggtctgggatctggtacaatggctgcaggcggtggcgcaccaatggcagacaataacgaaggcgccgacggagtgggtaatgcctccggaaattggcattgcgattccacatggctgggcgacagagtcatcaccaccagcacccgcacctgggccctgcccacctacaacaaccacctctacaagcagatatcaagtcagagcggggctaccaacgacaaccacttcttcggctacagcaccccctggggctattttgacttcaacagattccactgccacttctcaccacgtgactggcagcgactcatcaacaacaactggggattccggcccagaaagctgcggttcaagttgttcaacatccaggtcaaggaggtcacgacgaacgacggcgttacgaccatcgctaataaccttaccagcacgattcaggtcttctcggactcggagtaccaactgccgtacgtcctcggctctgcgcaccagggctgcctccctccgttccctgcggacgtgttcatgattcctcagtacggatatctgactctaaacaacggcagtcagtctgtgggacgttcctccttctactgcctggagtactttccttctcagatgctgagaacgggcgataactttgaattcagctacacctttgaggaagtgcctttccacagcagctatgcgcacagccagagcctggaccggctgatgaatcccctcatcgaccagtacctgtactacctggcccggacccagagcactacggggtccacaagggagctgcagttccatcaggctgggcccaacaccatggccgagcaatcaaagaactggctgcccggaccctgttatcggcagcagagactgtcaaaaaacatagacagcaacaacaacagtaactttgcctggaccggggccactaaataccatctgaatggtagaaattcattaaccaacccgggcgtagccatggccaccaacaaggacgacgaggaccagttctttcccatcaacggagtgctggtttttggcaaaacgggggctgccaacaagacaacgctggaaaacgtgctaatgaccagcgaggaggagatcaaaaccaccaatcccgtggctacagaagaatacggtgtggtctccagcaacctgcaatcgtctacggccggaccccagacacagactgtcaacagccagggggctctgcccggcatggtctggcagaaccgggacgtgtacctgcagggtcccatctgggccaaaattcctcacacggacggcaactttcacccgtctcccctgatgggcggatttggactcaaacacccgcctcctcaaattctcatcaaaaacaccccggtacctgctaatcctccagaggtgtttactcctgccaagtttgcctcatttatcacgcagtacagcaccggccaggtcagcgtggagatcgagtgggaactgcagaaagaaaacagcaaacgctggaatccagagattcagtacacctcaaattatgccaagtctaataatgtggaatttgctgtcaacaacgaaggggtttatactgagcctcgccccattggcacccgttacctcacccgtaacctgtaaatggctgccgatggttatcttccagattggctcgaggacaacctctctgagggcattcgcgagtggtgggacttgaaacctggagccccgaaacccaaagccaaccagcaaaagcaggacgacggccggggtctggtgcttcctggctacaagtacctcggacccttcaacggactcgacaagggggagcccgtcaacgcggcggacgcagcggccctcgagcacgacaaggcctacgaccagcagctcaaagcgggtgacaatccgtacctgcggtataaccacgccgacgccgagtttcaggagcgtctgcaagaagatacgtcttttgggggcaacctcgggcgagcagtcttccaggccaagaagcgggttctcgaacctctcggtctggttgaggaaggcgctaagacggctcctggaaagaagagaccggtagagccatcaccccagcgttctccagactcctctacgggcatcggcaagaaaggccagcagcccgcgaaaaagagactcaactttgggcagactggcgactcagagtcagtgcccgaccctcaaccaatcggagaaccccccgcaggcccctctggtctgggatctggtacaatggctgcaggcggtggcgctccaatggcagacaataacgaaggcgccgacggagtgggtagttcctcaggaaattggcattgcgattccacatggctgggcgacagagtcatcaccaccagcacccgaacctgggccctccccacctacaacaaccacctctacaagcaaatctccaacgggacttcgggaggaagcaccaacgacaacacctacttcggctacagcaccccctgggggtattttgactttaacagattccactgccacttctcaccacgtgactggcagcgactcatcaacaacaactggggattccggcccaagagactcaacttcaagctcttcaacatccaggtcaaggaggtcacgcagaatgaaggcaccaagaccatcgccaataaccttaccagcacgattcaggtctttacggactcggaataccagctcccgtacgtcctcggctctgcgcaccagggctgcctgcctccgttcccggcggacgtcttcatgattcctcagtacgggtacctgactctgaacaatggcagtcaggccgtgggccgttcctccttctactgcctggagtactttccttctcaaatgctgagaacgggcaacaactttgagttcagctaccagtttgaggacgtgccttttcacagcagctacgcgcacagccaaagcctggaccggctgatgaaccccctcatcgaccagtacctgtactacctgtctcggactcagtccacgggaggtaccgcaggaactcagcagttgctattttctcaggccgggcctaataacatgtcggctcaggccaaaaactggctacccgggccctgctaccggcagcaacgcgtctccacgacactgtcgcaaaataacaacagcaactttgcctggaccggtgccaccaagtatcatctgaatggcagagactctctggtaaatcccggtgtcgctatggcaacccacaaggacgacgaagagcgattttttccgtccagcggagtcttaatgtttgggaaacagggagctggaaaagacaacgtggactatagcagcgttatgctaaccagtgaggaagaaattaaaaccaccaacccagtggccacagaacagtacggcgtggtggccgataacctgcaacagcaaaacgccgctcctattgtaggggccgtcaacagtcaaggagccttacctggcatggtctggcagaaccgggacgtgtacctgcagggtcctatctgggccaagattcctcacacggacggaaactttcatccctcgccgctgatgggaggctttggactgaaacacccgcctcctcagatcctgattaagaatacacctgttcccgcggatcctccaactaccttcagtcaagctaagctggcgtcgttcatcacgcagtacagcaccggacaggtcagcgtggaaattgaatgggagctgcagaaagaaaacagcaaacgctggaacccagagattcaatacacttccaactactacaaatctacaaatgtggactttgctgttaacacagatggcacttattctgagcctcgccccatcggcacccgttacctcacccgtaatctgtaa

SEQ ID NO: 389 - protein, 738 aa, Adeno-associated virus; identical to SEQ ID NO: 7

SEQ ID NO: 390 - DNA, 3129 bp, Adeno-associated virus
gaattcgccctttctacggctgcgtcaactggaccaatgagaactttcccttcaacgattgcgtcgacaagatggtgatctggtgggaggagggcaagatgacggccaaggtcgtggagtccgccaaggccattctcggcggcagcaaagtgcgcgtggaccaaaagtgcaagtcgtccgcccagatcgaccccacccccgtgatcgtcacctccaacaccaacatgtgcgccgtgattgacgggaacagcaccaccttcgagcaccagcagccgttgcaggaccggatgttcaagtttgaactcacccgccgtctggagcacgactttggcaaggtgacaaagcaggaagtcagagagttcttccgctgggcgcaggatcacgtgaccgaggtggcgcacgagttctacgtcagaaagggtggagccaacaagagacccgcccccgatgacgcggataaaagcgagcccaagcgggcctgcccctcagtcgcggatccatcgacgtcagacgcggaaggagctccggtggactttgccgacaggtaccaaaacaaatgttctcgtcacgcgggcatgcttcagatgctgtttccctgcaaaacatgcgagagaatgaatcagaatttcaacatttgcttcacgcacgggaccagagactgttcagaatgtttccccggcgtgtcagaatctcaaccggtcgtcagaaaaaagacgtatcggaaactctgtgcgattcatcatctgctgggggcgggcacccgagattgcttgctcggcctgcgatctggtcaacgtggacctagatgactgtgtttctgagcaataaatgacttaaaccaggtatggctgccgatggttatcttccagattggctcgaggacaacctctctgagggcattcgcgagtggtgggacttgaaacctggagccccgaaacccaaagccaaccagcaaaagcaggacgacggccggggtctggtgcttcctggctacaagtacctcggacccttcaacggactcgacaagggggagcccgtcaacgcggcggacgcagcggccctcgagcacgacaaggcctacgaccagcagctcaaagcgggtgacaatccgtacctgcggtataaccacgccgacgccgagtttcaggagcgtctgcaagaagatacgtcttttgggggcaacctcgggcgagcagtcttccaggccaagaagcgggttctcgaacctctcggtctggttgaggaaggcgctaagacggctcctggaaagaagagaccggtagagccatcaccccagcgttctccagactcctctacgggcatcggcaagaaaggccagcagcccgcgaaaaagagactcaactttgggcagactggcgactcagagtcagtgcccgaccctcaaccaatcggagaaccccccgcaggcccctctggtctgggatctggtacaatggctgcaggcggtggcgctccaatggcagacaataacgaaggcgccgacggagtgggtagttcctcaggaaattggcattgcgattccacatggctgggcgacagagtcatcaccaccagcacccgaacctgggccctccccacctacaacaaccacctctacaagcaaatctccaacgggacttcgggaggaagcaccaacgacaacacctacttcggctacagcaccccctgggggtattttgactttaacagattccactgccacttctcaccacgtgactggcagcgactcatcaacaacaactggggattccggcccaagagactcaacttcaagctcttcaacatccaggtcaaggaggtcacgcagaatgaaggcaccaagaccatcgccaataaccttaccagcacgattcaggtctttacggactcggaataccagctcccgtacgtcctcggctctgcgcaccagggctgcctgcctccgttcccggcggacgtcttcatgattcctcagtacgggtacctgactctgaacaatggcagtcaggccgtgggccgttcctccttctactgcctggagtactttccttctcaaatgctgagaacgggcaacaactttgagttcagctaccagtttgaggacgtgccttttcacagcagctacgcgcacagccaaagcctggaccggctgatgaaccccctcatcgaccagtacctgtactacctgtctcggactcagtccacgggaggtaccgcaggaactcagcagttgctattttctcaggccgggcctaataacatgtcggctcaggccaaaaactggctacccgggccctgctaccggcagcaacgcgtctccacgacactgtcgcaaaataacaacagcaactttgcctggaccggtgccaccaagtatcatctgaatggcagagactctctggtaaatcccggtgtcgctatggcaacccacaaggacgacgaagagcgattttttccgtccagcggagtcttaatgtttgggaaacagggagctggaaaagacaacgtggactatagcagcgttatgctaaccagtgaggaagaaattaaaaccaccaacccagtggccacagaacagtacggcgtggtggccgataacctgcaacagcaaaacgccgctcctattgtaggggccgtcaacagtcaaggagccttacctggcatggtctggcagaaccgggacgtgtacctgcagggtcctatctgggccaagattcctcacacggacggaaactttcatccctcgccgctgatgggaggctttggactgaaacacccgcctcctcagatcctgattaagaatacacctgttcccgcggatcctccaactaccttcagtcaagctaagctggcgtcgttcatcacgcagtacagcaccggacaggtcagcgtggaaattgaatgggagctgcagaaagaaaacagcaaacgctggaacccagagattcaatacacttccaactactacaaatctacaaatgtggactttgctgttaacacagatggcacttattctgagcctcgccccatcggcacccgttacctcacccgtaatctgtaattgcttgttaatcaataaaccggttgattcgtttcagttgaactttggtctctgcgaagggcgaattc

SEQ ID NO: 391 - protein, 738 aa, Artificial Sequence; identical to SEQ ID NO: 7
  Description of Artificial Sequence: Synthetic polypeptide

SEQ ID NO: 392 - protein, 733 aa, Artificial Sequence
  Description of Artificial Sequence: Synthetic polypeptide
MAADGYLPDWLEDNLSEGIREWWDLRPGAPKPKANQQKQDDGRGLVLPGYKYLGPFNGLDKGEPVNEADAAALEHDKAYDKQLEQGDNPYLKYNHADAEFQERLQEDTSFGGNLGRAVFQAKKRVLEPLGLVEEGAKTAPGKKRPIESPDSSTGIGKKGQQPAKKRLNFGQTGDSESVPDPQPIGEPPAGPSGLGSGTMAAGGGAPMADNNEGADGVGSSSGNWHCDSTWLGDRVITTSTRTWALPTYNNHLYKQISNGTSGGSTNDNTYFGYSTPWGYFDFNRFHCHFSPRDWQRLINNNWGFRPKRLNFKLFNIQVKEVTQNEGTKTIANNLTSTIQVFTDSEYQLPYVLGSAHQGCLPPFPADVFMIPQYGYLTLNNGSQAVGRSSFYCLEYFPSQMLRTGNNFEFSYQFEDVPFHSSYAHSQSLDRLMNPLIDQYLYYLSRTQSTGGTAGTQQLLFSQAGPNNMSAQAKNWLPGPCYRQQRVSTTVSQNNNSNFAWTGATKYHLNGRDSLVNPGVAMATHKGDEERFFPSSGVLMFGKQGAGKDNVDYSSVMLTSEEEIKTTNPVATEQYGVVADNLQQQNAAPIVGAVNSQGALPGMVWQNRDVYLQGPIWAKIPHTDGNFHPSPLMGGFGLKHPPPQILIKNTPVPADPPTTFSQAKLASFITQYSTGQVSVEIEWELQKENSKRWNPEIQYTSNYYKSTNVDFAVNTEGTYSEPRPIGTRYLTRNL

SEQ ID NO: 393 - DNA, 2501 bp, Adeno-associated virus
gaattcgcccttggctgcgtcaactggaccaatgagaactttcccttcaacgattgcgtcgacaagatggtgatctggtgggaggagggcaagatgacggccaaggtcgtggagtccgccaaggccattcatcatctgctggggcgggctcccgagattgcttgctcggcctgcgatctggtcaacgtggacctggatgactgtgtttctgagcaataaatgacttaaaccaggtatggctgccgatggttatcttccagattggctcgaggacaacctctctgagggcattcgcgagtggtgggacttgagacctggagccccgaaacccaaagccaaccagcaaaagcaggacgacggccggggtctggtgcttcctggctacaagtacctcggacccttcaacggactcgacaagggagagccggtcaacgaggcagacgccgcggccctcgagcacgacaaggcctacgacaagcagctcgagcagggggacaacccgtacctcaagtacaaccacgccgacgccgagtttcaggagcgtcttcaagaagatacgtcttttgggggcaacctcgggcgagcagtcttccaggccaagaagcgggttctcgaacctctcggtctggttgaggaaggcgctaagacggctcctggaaagaagagacccatagaatcccccgactcctccacgggcatcggcaagaaaggccagcagcccgctaaaaagagactcaactttgggcagactggcgactcagagtcagtgcccgaccctcaaccaatcggagaaccccccgcaggcccctctggtctgggatctggcacaatggctgcaggcggtggcgctccaatggcagacaataacgaaggcgccgacggagtgggtagttcctcaggaaattggcattgcgattccacatggctgggcgacagagtcatcaccaccagcacccgaacctgggccctccccacctacaacaaccacctctacaagcaaatctccaacgggacatcgggaggaagcaccaacgacaacacctacttcggctacagcaccccctgggggtattttgactttaacagattccactgccacttctcaccacgtgactggcagcgactcatcaacaacaactggggattccggcccaagagactcaacttcaagctcttcaacatccaggtcaaggaggtcacgcagaatgaaggcaccaagaccatcgccaataaccttaccagcacgattcaggtctttacggactcggaataccagctcccgtacgtcctcggctctgcgcaccagggctgcctgcctccgttcccggcggacgtcttcatgattcctcagtacgggtacctgactctgaacaacggcagtcaggccgtgggccgttcctccttctactgcctggagtactttccttctcaaatgctgagaacgggcaacaactttgagttcagctaccagtttgaggacgtgccttttcacagcagctatgcgcacagccaaagcctggaccggctgatgaaccccctcatcgaccagtacctgtactacctgtctcggactcagtccacgggaggtaccgcaggaactcagcagttgctattttctcaggccgggcctaataacatgtcggctcaggccaaaaactggctacccgggccctgctaccggcagcaacgcgtctccacgacagtgtcgcaaaataacaacagcaactttgcttggaccggtgccaccaagtatcatctgaatggcagagactctctggtaaatcccggtgtcgctatggcaacgcacaagggcgacgaagagcgattttttccatccagcggagtcttgatgtttgggaaacagggagctggaaaagacaacgtagactatagcagcgttatgctaaccagtgaggaagaaatcaaaaccaccaacccagtggccacagaacagtacggcgtggtggccgataacctgcaacagcaaaacgccgctcctattgtaggggccgtcaacagtcaaggagccttacctggcatggtctggcagaaccgggacgtgtacctgcagggtcctatctgggccaagattcctcacacggacggcaactttcatccttcgccgctgatgggaggctttggactgaaacacccgcctcctcagatcctgattaagaatacacctgttcccgcggatcctccaactaccttcagtcaagccaagctggcgtcgttcatcacgcagtacagcaccggacaggtcagcgtggaaattgaatgggagctgcagaaagagaacagcaagcgctggaacccagagattcagtatacttccaactactacaaatctacaaatgtggactttgctgtcaatactgagggtacttattcagagcctcgccccattggcacccgttacctcacccgtaacctgtaattgcctgttaatcaataaaccggttgattcgtttcagttgaactttggtctcaagggcgaattc

SEQ ID NO: 394 - DNA, 2187 bp, Adeno-associated virus
atggctgccgatggttatcttccagattggctcgaggacaacctctctgagggcattcgcgagtggtgggacttgaaacctggagccccgaaacccaaagccaaccagcaaaagcaggacgacggccggggtctggtgcttcctggctacaagtacctcggacccttcaacggactcgacaagggagagccggtcaacgaggcagacgccgcggccctcgagcacgacaaggcctacgacaagcagctcgagcagggggacaacccgtacctcaagtacaaccacgccgacgccgagtttcaggagcgtcttcaagaagatacgtcttttgggggcaacctcgggcgagcagtcttccaggccaagaagcgggttctcgaacctctcggtctggttgaggaaggcgctaagacggctcctggaaagaagagacccatagaatcccccgactcctccacgggcatcggcaagaaaggccagcagcccgctaaaaagaagctcaactttgggcagactggcgactcagagtcagtgcccgacccccaacctctcggagaacctcccgccgcgccctcaggtctgggatctggtacaatggctgcaggcggtggcgcaccaatggcagacaataacgaaggcgccgacggagtgggtaatgcctccggaaattggcattgcgattccacatggctgggcgacagagtcatcaccaccagcacccgcacctgggccctgcccacctacaacaaccacctctacaagcagatatcaagtcagagcggggctaccaacgacaaccacttcttcggctacagcaccccctggggctattttgacttcaacagattccactgccacttctcaccacgtgactggcagcgactcatcaacaacaactggggattccggcccagaaagctgcggttcaagttgttcaacatccaggtcaaggaggtcacgacgaacgacggcgttacgaccatcgctaataaccttaccagcacgattcaggtcttctcggactcggagtaccaactgccgtacgtcctcggctctgcgcaccagggctgcctccctccgttccctgcggacgtgttcatgattcctcagtacggatatctgactctaaacaacggcagtcagtctgtgggacgttcctccttctactgcctggagtactttccttctcagatgctgagaacgggcaataactttgaattcagctacacctttgaggaagtgcctttccacagcagctatgcgcacagccagagcctggaccggctgatgaatcccctcatcgaccagtacctgtactacctggcccggacccagagcactacggggtccacaagggagctgcagttccatcaggctgggcccaacaccatggccgagcaatcaaagaactggctgcccggaccctgttatcggcagcagagactgtcaaaaaacatagacagcaacaacaacagtaactttgcctggaccggggccactaaataccatctgaatggtagaaattcattaaccaacccgggcgtagccatggccaccaacaaggacgacgaggaccagttctttcccatcaacggagtgctggtttttggcgaaacgggggctgccaacaagacaacgctggaaaacgtgctaatgaccagcgaggaggagatcaaaaccaccaatcccgtggctacagaagaatacggtgtggtctccagcaacctgcaatcgtctacggccggaccccagacacagactgtcaacagccagggggctctgcccggcatggtctggcagaaccgggacgtgtacctgcagggtcccatctgggccaaaattcctcacacggacggcaactttcacccgtctcccctgatgggcggatttggactcaaacacccgcctcctcaaattctcatcaaaaacaccccggtacctgctaatcctccagaggtgtttactcctgccaagtttgcctcatttatcacgcagtacagcaccggccaggtcagcgtggagatcgagtgggaactgcagaaagaaaacagcaaacgctggaatccagagattcagtacacctcaaattatgccaagtctaataatgtggaatttgctgtcaacaacgaaggggtttatactgagcctcgccccattggcacccgttacctcacccgtaacctgtaa

SEQ ID NO: 395 - protein, 728 aa, Adeno-associated virus; identical to SEQ ID NO: 63

SEQ ID NO: 396 - protein, 728 aa, Adeno-associated virus; identical to SEQ ID NO: 155

SEQ ID NO: 397 - protein, 728 aa, Adeno-associated virus; identical to SEQ ID NO: 155

SEQ ID NO: 398 - protein, 733 aa, Artificial Sequence
  Description of Artificial Sequence: Synthetic polypeptide
MAADGHLPDWLEDNLSEGIREWWDLKPGAPKPKANQQKQDDGRGLVLPGYKYLGPFNGLDKGEPVNAADAAALEHDKAYDQQLKAGDNPYLRYNHADAEFQERLQEDTSFGGNLGRAVFQAKKRVLEPLGLVEEGAKTAPGKKRPIESPDSSTGIGKKGQQPAKKKLNFGQTGDSESVPDPQPIGEPPAGPSGLGSGTMAAGGGAPMADNNEGADGVGSSSGNWHCDSTWLGDRVITTSTRTWALPTYNNHLYKQISNGTSGGSTNDNTYFGYSTPWGYFDFNRFHCHFSPRDWQRLINNSWGFRPKRLNFKLFNIQVKEVTQNEGTKTIANNLTSTIQVFTDSEYQLPYVLGSAHQGCLPPFPADVFMIPQYGYLTLNNGSQAVGRSSFYCLEYFPSQMLRTGNNFEFSYQFEDVPFHSSYAHSQSLDRLMNPLIDQYLYYLSRTQSTGGTAGTQQLLFSQAGPNNMSAQAKNWLPGPCYRQQRVSTTLSQNNNSNFAWTGATKYHLNGRDSLVNPGVAMATHKDDEERFFPSSGVLMFGKQGAGKDNVDYSSVMLTSEEEIKTTNPVATEQYGVVADNLQQQNAAPIVGAVNSQGALPGMVWQNRDVYLQGPIWAKIPHTDGNFHPSPLMGGFGLKHPPPQILIKNTPVPADPPTTFSQAKLASFITQYSTGQVSVEIEWELQKENSKRWNPEIQYTSNYYKSTNVDFAVNTEGTYSEPRPIGTRYLTRNL

SEQ ID NO: 399 - DNA, 3113 bp, Adeno-associated virus
gaattcgccctttctacggctgcgtcaactggaccaatgagaactttcccttcaacgattgcgtcgacaagatggtgatctggtgggaggagggcaagatgacggccaaggtcgtggagtccgccaaggccattctcggcggcagcaaggtgcgcgtggaccaaaagtgcaagtcgtccgcccagatcgatcccacccccgtgatcgtcacttccaacaccaacatgtgcgccgtgattgacgggaacagcaccaccttcgagcaccagcagccgttacaagaccggatgttcaaatttgaactcacccgccgtctggagcatgactttggcaaggtgacaaagcaggaagtcaaagagttcttccgctgggcgcaggatcacgtgaccgaggtggcgcatgagttctacgtcagaaagggtggagccaacaagagacccgcccccgatgacgcggataaaagcgagcccaagcgggcctgcccctcagtcgcggatccatcgacgtcagacgcggaaggagctccggtggactttgccgacaggtaccaaaacaaatgttctcgtcacgcgggcatgcttcagatgctgcttccctgcaagacatgcgagagaatgaatcagaatttcagcatttgcttcacgcacgggaccagagactgttcagaatgtttccccggcgtgtcagaatctcaaccggtcgtcagaaagaggacgtatcggaaactctgtgccattcatcatctgctggggcgggctcccgagattgcttgctcggcctgcgatctggtcaacgtggacctggatgactgtgtttctgagcaataaatgacttaaaccaggtatggctgccgatggtcatcttccagattggctcgaggacaacctctctgagggcattcgcgagtggtgggacttgaaacctggagccccgaaacccaaagccaaccagcaaaagcaggacgacggccggggtctggtgcttcctggctacaagtacctcggacccttcaacggactcgacaagggggagcccgtcaacgcggcggacgcagcggccctcgagcacgacaaggcctacgaccagcagctcaaagcgggtgacaatccgtacctgcggtataaccacgccgacgccgagtttcaggagcgtcttcaagaagatacgtcttttgggggcaacctcgggcgagcagtcttccaggccaagaagcgggttctcgaacctctcggtctggttgaggaaggcgctaagacggctcctggaaagaagagacccatagaatcccccgactcctccacgggcatcggcaagaaaggccagcagcccgctaaaaagaagctcaactttgggcagactggcgactcagagtcagtgcccgaccctcaaccaatcggagaaccccccgcaggcccctctggtctgggatctggtacaatggctgcaggcggtggcgctccaatggcagacaataacgaaggcgccgacggagtgggtagttcctcaggaaattggcattgcgattccacatagctgggcgacagagtcatcaccaccagcacccgaacctgggccctccccacctacaacaaccacctctacaagcaaatctccaacgggacatcgggaggaagcaccaacgacaacacctacttcggctacagcaccccctgggggtattttgactttaacagattccactgccacttctcaccacgtgactggcagcgactcatcaacaacagctggggattccggcccaagagactcaacttcaagctcttcaacatccaggtcaaggaggtcacgcagaatgaaggcaccaagaccatcgccaataaccttaccagcacgattcaggtctttacggactcggaataccagctcccgtacgtcctcggctctgcgcaccagggctgcctgcctccgttcccggcggacgtcttcatgattcctcagtacgggtacctgactctgaacaacggcagtcaggccgtgggccgttcctccttctactgcctggagtactttccttctcaaatgctgagaacgggcaacaactttgagttcagctaccagtttgaggacgtgccttttcacagcagctacgcgcacagccaaagcctggaccggctgatgaaccccctcatcgaccagtacctgtactacctgtctcggactcagtccacgggaggtaccgcaggaactcagcagttgctattttctcaggccgggcctaataacatgtcggctcaggccaaaaactggctacccgggccctgctaccggcagcaacgcgtctccacgacactgtcgcaaaataacaacagcaactttgcttggaccggtgccaccaagtatcatctgaatggcagagactctctggtaaatcccggtgtcgctatggcaacgcacaaggacgacgaagagcgattttttccatccagcggagtcttgatgtttgggaaacagggagctggaaaagacaacgtggactatagcagcgttatgctaaccagtgaggaagaaatcaaaaccaccaacccagtggccacagaacagtacggcgtggtggccgataacctgcaacagcaaaacgccgctcctattgtaggggccgtcaacagtcaaggagccttacctggcatggtctggcagaaccgggacgtgtacctgcagggtcctatctgggccaagattcctcacacggacggcaactttcatccttcgccgctgatgggaggctttggactgaaacacccgcctcctcagatcctgattaagaatacacctgttcccgcggatcctccaactaccttcagtcaagccaagctggcgtcgttcatcacgcagtacagcaccggacaggtcagcgtggaaattgaatgggagctgcagaaagagaacagcaagcgctggaacccagagattcagtatacttccaactactacaaatctacaaatgtggactttgctgtcaatactgagggtacttattcagagcctcgccccattggcacccgttacctcacccgtaacctgtaattgcctgttaatcaataaaccggttaattcgtttcagttgaactttggtctctgcgaagggcgaattc

SEQ ID NO: 400 - protein, 731 aa, Artificial Sequence
  Description of Artificial Sequence: Synthetic polypeptide
MAADGYLPDWLEDNLSEGIREWWDLKPGAPKPKANQQKQDDGRGLVLPGYKYLGPFNGLDKGEPVNEADAAALEHDKAYDKQLEQGDNPYLKYNHADAEFQERLQEDTSFGGNLGRAVFRAKKRVLEPLGLVEEGAKTAPGKKRPIESPDSSTGIGKKGQQPAKKKLNFGQTGDSESVPDPQPLGEPPAAPSGLGSGTMAAGGGAPMADNNEGADGVGNASGNWHCDSTWLGDRVITTSTRTWALPTYNNHLYKQISSQSGATNDNHFFGYSTPWGYFDFNRFHCHFSPRDWQRLINNNRGFRPRKLRFKLFNIQVKEVTTNDGVTTIANNLTSTIQVFSDSEYQLPYVLGSAHQGCLPPFPADVFMIPQYGYLTLNNGSQSVGRSSFYCLEYFPSQMLRTGNNFEFSYQFEDVPFHSSYAHSQSLDRLMNPLIDQYLYYLSRTQSTGGTAGTQQLLFSQAGPNNMSAQAKNWLPGPCYRQQRVSTTLSQNNNSNFAWTGATKYHLNGRDSLVNPGVAMATHKDDEERFFPSSGVLMFGKQGAGKDNVDYSSVMLTSEEEIKTTNPVATEQYGVVADNLQQQNAAPIVGAVNSQGALPGMAWQNRDVYLQGPIWAKIPHTDGNFHPSPLMGGFGLKHPPPQILIKNTPVPADPPTTFSQAKLASFITQYSTGQVSVEIEWELQKENSKRWNPEIQYTSNYYKSTNVDFAVNTEGTYSEPRPIGTRYLTRNL

SEQ ID NO: 401 - DNA, 3106 bp, Adeno-associated virus
gaattcgcccttctacggctgcgtcaactggaccaatgagaactttcccttcaacgattgcgtcgacaagatggtgatctggtgggaggagggcaagatgacggccaaggtcgtggagtccgccaaggccattctcggcggcagcaaggtgcgcgtggaccaaaagtgcaagtcgtccgcccagatcgaccccacccccgtgatcgtcacctccaacaccaacatgtgcgccgtgattgacgggaacagcaccaccttcgagcaccagcagccgttgcaggaccggatgttcaaatttgaactcacccgccgtctggagcatgactttggcaaggcgacaaagcaggaagtcaaagagttcttccgctgggcgcaggatcacgtgaccgaggtggcgcatgagttctacgtcagaaagggtggagccaacaagagacccgcccccgatgacgcggataaaagcgagcccaagcgggcccgcccctcagtcgcggatccatcgacgtcagacgcggaaggagctccggtggactttgccgacaggtaccaaaacaaatgttctcgtcacgcgggcatgcttcagatgctgtttccctgcaaaacatgcgagagaatgaatcagaatttcaacatttgcttcacgcacgggaccagagactgttcagaatgtttccccggcgtgtcagaatctcaaccggtcgtcagaaagaggacgtatcggaaactctgtgccattcatcatctgctggggcgggctcccgagattgcttgctcggcctgcgatctggtcaacgtggacctggatgactgtgtttctgagcaataaatgacttaaaccaggtatggctgccgatggttatcttccagattggctcgaggacaacctctctgagggcattcgcgagtggtgggacttgaaacctggagccccgaaacccaaagccaaccagcaaaagcaggacgacggccggggtctggtgcttcctggctacaagtacctcggacccttcaacggactcgacaagggagagccggtcaacgaggcagacgccgcggccctcgagcacgacaaggcctacgacaagcagctcgagcagggggacaacccgtacctcaagtacaaccacgccgacgccgagtttcaggagcgtcttcaagaagatacgtcttttgggggcaacctcgggcgagcagtcttccgggccaagaagcgggttctcgaacctctcggtctggttgaggaaggcgctaagacggctcctggaaagaagagacccatagaatcccccgactcctccacgggcatcggcaagaaaggccagcagcccgctaaaaagaagctcaactttgggcagactggcgactcagagtcagtgcccgacccccaacctctcggagaacctcccgccgcgccctcaggtctgggatctggtacaatggctgcaggcggtggcgcaccaatggcagacaataacgaaggcgccgacggagtgggtaatgcctccggaaattggcattgcgattccacatggctgggcgacagagtcatcaccaccagcacccgcacctgggccctgcccacctacaacaaccacctctacaagcagatatcaagtcagagcggggctaccaacgacaaccacttcttcggctacagcaccccctggggctattttgacttcaacagattccactgccacttctcaccacgtgactggcagcgactcatcaacaacaaccggggattccggcccagaaagctgcggttcaagttgttcaacatccaggtcaaggaggtcacgacgaacgacggcgttacgaccatcgctaataaccttaccagcacgattcaggtcttctcggactcggagtaccaactgccgtacgtcctcggctctgcgcaccagggctgcctccctccgttccctgcggacgtgttcatgattcctcagtacggatatctgactctaaacaacggcagtcagtctgtgggacgttcctccttctactgcctggagtactttccttctcagatgctgagaacgggcaataactttgaattcagctaccagtttgaggacgtgccctttcacagcagctacgcgcacagccaaagcctggaccggctgatgaaccccctcatcgaccagtacctgtactacctgtctcggactcagtccacgggaggtaccgcaggaactcagcagttgctattttctcaggccgggcctaataacatgtcggctcaggccaaaaactggctacccgggccctgctaccggcagcaacgcgtctccacgacactgtcgcaaaataacaacagcaactttgcttggaccggtgccaccaagtatcatctgaatggcagagactctctggtaaatcccggtgtcgctatggcaacgcacaaggacgacgaagagcgattttttccatccagcggagtcttgatgtttgggaaacagggagctggaaaagacaacgtggactatagcagcgttatgctaaccagtgaggaagaaatcaaaaccaccaacccagtggccacagaacagtacggcgtggtggccgataacctgcaacagcaaaacgccgctcctattgtaggggccgtcaacagtcaaggagccttacctggcatggcctggcagaaccgggacgtgtacctgcagggtcctatctgggccaagattcctcacacggacggcaactttcatccttcgccgctgatgggaggctttggactgaaacacccgcctcctcagatcctgattaagaatacacctgttcccgcggatcctccaactaccttcagtcaagccaagctggcgtcgttcatcacgcagtacagcaccggacaggtcagcgtggaaattgaatgggagctgcagaaagagaacagcaagcgctggaacccagagattcagtatacttccaactactacaaatctacaaatgtggactttgctgtcaatactgagggtacttattcagagcctcgccccattggcacccgttacctcacccgtaacctgtaattgcctgttaatcaataaaccggttaattcgtttcagttgaactttggtctctgcgaagggcgaattc

SEQ ID NO: 402 - protein, 738 aa, Artificial Sequence
  Description of Artificial Sequence: Synthetic polypeptide
MAADGYLPDWLEDNLSEGIREWWDLKPGAPKPKANQQKQDDGRGLVLPGYKYLGPFNGLDKGEPVNEADAAALEHDKAYDKQLEQGDNPYLKYNHADAEFQERLQEDTSFGGNLGRAVFQAKKRVLEPLGLVEEGAKTAPGKKRPVEPSPQRSPDSSTGIGKTGQQPAKKRLNFGQTGDSESVPDPQPIGEPPAGPSGLGSGTMAAGGGAPMADNNEGADGVGSSSGNWHCDSTWLGDRVITTSTRTWALPTYNNHLYKQISNGTSGGSTNDNTYFGYSTPWGYFDFNRFHCHFSPRDWQRLINNNWGFRPKRLNFKLFNIQVKEVTQNEGTKTIANNLTSTIQVFTDSEYQLPYVLGSAHQGCLPPFPADVFMIPQYGYLTLNNGSQAVGRSSFYCLEYFPSQMLRTGNNFEFSYQFEDVPFHSSYAHSQSLDRLMNPLIDQYLYYLSRTQSTGGTAGTQQLLFSQAGPNNMSAQAKNWLPGPCYRQQRVSTTLSQNNNSNFAWTGATKYHLNGRDSLVNPGVAMATHKDDEERFFPSSGVLMFGKQGAGKDNVDYSSVMLTSEEEIKTTNPVATEQYGVVADNLQQQNAAPIVGAVNSQGALPGMVWQNRDVYLQGPIWAKIPHTDGNFHPSPLMGGFGLKHPPPQILIKNTPVPADPPTTFSQAKLASFITQYSTGQVSVEIEWELQKENSKRWNPEIQYTSNYYKSTNVDFAVNTEGTYSEPRPIGTRYLTRNL

SEQ ID NO: 403 - DNA, 3197 bp, Adeno-associated virus
gaattcgccctttctacggctgcgtcaactggaccaatgagaactttcccttcaacgattgcgtcgacaagatggtgatctggtgggaggagggcaagatgacggccaaggtcgtggagtccgccaaggccattctcggcggcagcaaggtgcgcgtggaccaaaagtgcaagtcgtccgcccagatcgaccccacccccgtgatcgtcacctccaacaccaacatgtgcgccgtgattgacgggaacagcaccaccttcgagcaccagcagccgttacaagaccggatgttcaaatttgaactcacccgccgtctggagcacgactttggcaaggtgacaaagcaggaagtcaaagagttcttccgctgggcgcaggatcacgtgaccgaggtggcgcatgagttctacgtcagaaagggtggagccaacaagagacccgcccccgatgacgcggataaaagcgagcccaagcgggcctgcccctcagtcgcggatccatcgacgtcagacgcggaaggagctccggtggactttgccgacaggtaccaaaacaaatgttctcgtcacgcgggcatgcttcagatgctgtttccctgcaagacatgcgagagaatgaatcagaatttcaacatttgcttcacgcacgggaccagagactgttcagaatgtttccccggcgtgtcagaatctcaaccggtcgtcagaaagaggacgtatcggaaactctgtgccattcatcatctgctggggcgggctcccgagattgcttgctcggcctgcgatctggtcaacgtggacctggatgactgtgtttctgagcaataaatgacttaaaccaggtatggctgccgatggttatcttccagattggctcgaggacaacctctctgagggcattcgcgagtggtgggacttgaaacctggagccccgaaacccaaagccaaccagcaaaagcaggacgacggccggggtctggtgcttcctggctacaagtacctcggacccttcaacggactcgacaagggagagccggtcaacgaggcagacgccgcggccctcgagcacgacaaggcctacgacaagcagctcgagcagggggacaacccgtacctcaagtacaaccacgccgacgccgagtttcaggagcgtcttcaagaagatacgtcttttgggggcaacctcgggcgagcagtcttccaggccaagaagcgggttctcgaacctctcggtctggttgaggaaggcgctaagacggctcctggaaagaagagaccggtagagccatcaccccagcgttctccagactcctctacgggcatcggcaagacaggccagcagcccgcgaaaaagagactcaactttgggcagactggcgactcagagtcagtgcccgaccctcaaccaatcggagaaccccccgcaggcccctctggtctgggatctggtacaatggctgcaggcggtggcgctccaatggcagacaataacgaaggcgccgacggagtgggtagttcctcaggaaattggcattgcgattccacatggctgggcgacagagtcatcaccaccagcacccgaacctgggccctccccacctacaacaaccacctctacaagcaaatctccaacgggacatcgggaggaagcaccaacgacaacacctacttcggctacagcaccccctgggggtattttgactttaacagattccactgccacttctcaccacgtgactggcagcgactcatcaacaacaactggggattccggcccaagagactcaacttcaagctcttcaacatccaggtcaaggaggtcacgcagaatgaaggcaccaagaccatcgccaataaccttaccagcacgattcaggtctttacggactcggaataccagctcccgtacgtcctcggctctgcgcaccagggctgcctgcctccgttcccggcggacgtcttcatgattcctcagtacgggtacctgactctgaacaacggcagtcaggccgtgggccgttcctccttctactgcctggagtactttccttctcaaatgctgagaacgggcaacaactttgagttcagctaccagtttgaggacgtgccttttcacagcagctacgcgcacagccaaagcctggaccggctgatgaaccccctcatcgaccagtacctgtactacctgtctcggactcagtccacgggaggtaccgcaggaactcagcagttgctattttctcaggccgggcctaataacatgtcggctcaggccaaaaactggctacccgggccctgctaccggcagcaacgcgtctccacgacactgtcgcaaaataacaacagcaactttgcttggaccggtgccaccaagtatcatctgaatggcagagactctctggtaaatcccggtgtcgctatggcaacgcacaaggacgacgaagagcgattttttccatccagcggagtcttgatgtttgggaaacagggagctggaaaagacaacgtggactatagcagcgttatgctaaccagtgaggaagaaatcaaaaccaccaacccagtggccacagaacagtacggcgtggtggccgataacctgcaacagcaaaacgccgctcctattgtaggggccgtcaacagtcaaggagccttacctggcatggtctggcagaaccgggacgtgtacctgcagggtcctatctgggccaagattcctcacacggacggcaactttcatccttcgccgctgatgggaggctttggactgaaacacccgcctcctcagatcctgattaagaatacacctgttcccgcggatcctccaactaccttcagtcaagccaagctggcgtcgttcatcacgcagtacagcaccggacaggtcagcgtggaaattgaatgggagctgcagaaagagaacagcaagcgctggaacccagagattcagtatacttccaactactacaaatctacaaatgtggactttgctgtcaatactgagggtacttattcagagcctcgccccattggcacccgttacctcacccgtaacctgtaattgcctgttaatcaataaaccggttaattcgtttcagttgaactttggtctctgcgaagggcgaattcgtttaaacctgcaggactagtccctttagtgagggttaattctgagcttggcgtaatcatgggtcatag

SEQ ID NO: 404 - protein, 735 aa, Artificial Sequence
  Description of Artificial Sequence: Synthetic polypeptide
MAADGYLPDWLEDNLSEGIREWWDLKPGAPKPKANQQKQDDGRGLVLPGYKYLGPFNGLDKGEPVNEADAAALEHDKAYDKQLEQGDNPYLKYNHADAEFQERLQEDTSFGGNLGRAVFQAKKRVLEPLGLVEEGAKTAPGKKRPVEPSPQRSPDSSTGIGKTGQQPAKKRLNFGQTGDSESVPDPQPIGEPPAGPSGLGSGTMAAGGGAPMADNNEGADGVGSSSGNWHCDSTWLGDRVITTSTRTWALPTYNNHLYKQISNGTSGGSTNDNTYFGYSTPWGYFDFNRFHCHFSPRDWQRLINNNWGFRPRKLRFKLFNIQVKEVTTDDGVTTIANNLTSTIQVFSDSEYQLPYVLGSAHQGCLPPFPADVFMIPQYGYLTLNNGSQSVGRSSFYCLEYFPSQMLRTGNNFEFSYTFEEVPFHSSYAHSQSLDRLMNPLIDQYLYYLARTQSTTGSTRELQFHQAGPNTMAEQSKNWLPGPCYRQQRLSKNIDSNNNSNFAWTGATKYHLNGRNSLTNPGVAMATNKDDEDQFFPINGVLVFGKTGAANKTTLENVLMTSEEEIKTTNPVATEEYGVVSSNLQSSTAGPQTQTVNSQGALPGMVWQNRDVYLQGPIWAKIPHTDGNFHPSPLMDGFGLKHPPPQILIKNTPVPANPPEVFTPAKFASFITQYSTGQVSVEIEWELQKENSKRWNPEIQYTSNYAKSNNVEFAVNNEGVYTEPRPIGTRYLTRNL

SEQ ID NO: 405 - DNA, 3276 bp, Adeno-associated virus
gaattcgcccttcgcagagaccaaagttcaactgaaacgaattaaccggtttattgattaacaggcaattacaggttacgggtgaggtaacgggtgccaatggggcgaggctcagtataaaccccttcgttgttgacagcaaattccacattattagacttggcataatttgaggtgtactgaatctctggattccagcgtttgctgttttctttctgcagttcccactcgatctccacgctgacctggccggtgctgtactgcgtgataaatgaggcaaacttggcaggagtaaacacctctggaggattagcaggtaccggggtgtttttgatgagaatttgaggaggcgggtgtttgagtccaaatccgtccatcaggggagacgggtgaaagttgccgtccgtgtgaggaattttggcccagatgggaccctgcaggtacacgtcccggttctgccagaccatgccgggcagagccccctggctgttgacagtctgtgtctggggtccggccgtagacgattgcaggttgctggagaccacaccgtattcttctgtagccacgggattggtggttttgatctcctcctcgctggtcattagcacgttttccagcgttgtcttgttggcagcccccgttttgccaaaaaccagcactccgttgatgggaaagaactggtcctcgtcgtccttgttggtggccatggctacgcccgggttggttaatgaatttctaccattcagatggtatttagtggccccggtccaggcaaagttactgttgttgttgctgtctatgttttttgacagtctctgctgccgataacagggtccgggcagccagttctttgattgctcggccatggtgttgggcccagcctgatggaactgcagctcccttgtggaccccgtagtgctctgggtccgggccaggtagtacaggtactggtcgatgaggggattcatcagccggtccaggctctggctatgcgcatagctgctgtggaaaggcacttcctcaaaggtgtagctgaattcaaagttattgcccgttctcagcatctgagaaggaaagtactccaggcagtagaaggaggaacgtcccacagactgactgccgttgtttagagtcagatatccgtactgaggaatcatgaacacgtccgcagggaacggagggaggcagccctggtgcgcagagccgaggacgtacggcagttggtactccgagtccgagaagacctgaatcgtgctggtaaggttattagcgatggtcgtaacgccgtcgtccgtcgtgacctccttgacctggatgttgaacaacttgaaccgcagctttctgggccggaatccccagttgttgttgatgagtcgctgccagtcacgtggtgagaagtggcagtggaatctgttaaagtcaaaatacccccagggggtgctgtagccgaagtaggtgttgtcgttggtgcttcctcccgatgtcccgttggagatttgcttgtagaggtggttgttgtaggtggggagggcccaggttcgggtgctggtggtgatgactctgtcgcccagccatgtggaatcgcaatgccaatttcctgaggaactacccactccgtcggcgccttcgttattgtctgccattggagcgccaccgcctgcagccattgtaccagatcccagaccagaggggcctgcggggggttctccgattggttgagggtcgggcactgactctgagtcgccagtctgcccaaagttgagtctctttttcgcgggctgctggcctgtcttgccgatgcccgtagaggagtctggagaacgctggggtgatggctctaccggtctcttctttccaggagccgtcttagcgccttcctcaaccagaccgagaggttcgagaacccgcttcttggcctggaagactgctcgcccgaggttgcccccaaaagacgtatcttcttgaagacgctcctgaaactcggcgtcggcgtggttgtacttgaggtacgggttgtccccctgctcgagctgcttgtcgtaggccttgtcgtgctcgagggccgcggcgtctgcctcgttgaccggctctcccttgtcgagtccgttgaagggtccgaggtacttgtagccaggaagcaccagaccccggccgtcgtcctgcttttgctggttggctttgggtttcggggctccaggtttcaagtcccaccactcgcgaatgccctcagagaggttgtcctcgagccaatctggaagataaccatcggcagccatacctggtttaagtcatttattgctcagaaacacagtcatccaggtccacgttgaccagatcgcaggccgagcaagcaatctcgggagcccgccccagcagatgatgaatggcacagagtttccgatacgtcctctttctgacgaccggttgagattctgacacgccggggaaacattctgaacagtctctggtcccgtgcgtgaagcaaatgttgaaattctgattcattctctcgcatgtcttgcagggaaacagcatctgaagcatgcccgcgtgacgagaacacttgttttggtacctgtcggcaaagtccaccggagctccttccgcgtctgacgtcgatggatgcaaaatgtcgcaaaagcactcacgtgacagctaatacaggaccactcccctatgacgtgatttacgtcagcgctatgcccgcgtgacgagaacatttgttttggtacctgtcggcaaagtccaccggagctccttccgcgtctgacgtcgatggatccgcgactgaggggcaggcccgcttgggctcgcttttatccgcgtcatcgggggcgggtctcttgttggctccaccctttctgacgtagaactcatgcgccacctcggtcacgtgatcctgcgcccagcggaagaactctttgacttcctgctttgtcaccttgccaaagtcatgctccagacggcgggtgagttcaaatttgaacatccggtcctgcaacggctgctggtgctcgaaggtggtgctgttcccgtcaatcacggcgcacatgttggtgttggaagtgacgatcacgggggtgggatcgatctgggcggaagacttgcacttttggtccacgcgcaccttgctgccgccgagaatggccttggcggactccacgaccttggccgtcatcttgccctcctcccaccagatcaccatcttgtcgacgcaatcgttgaagggaaagttctcattggtccagttgacgcagccgtagaaagggcgaattc

SEQ ID NO: 406 - protein, 738 aa, Adeno-associated virus; identical to SEQ ID NO: 71

SEQ ID NO: 407 - protein, 738 aa, Adeno-associated virus
MAADGYLPDWLEDNLSEGIREWWDLKPGAPKPKANQQKQDDGRGLVLPGYKYLGPFNGLDKGEPVNAADAAALEHDKAYDQQLKAGDNPYLRYNHADAEFQERLQEDTSFGGNLGRAVFQAKKRVLEPLGLVEEGAKTAPGKKRPVEPSPQRSPDSSTGIGKKGHQPARKRLNFGQTGDSESVPDPQPIGEPPAGPSGLGSGTMAAGGGAPMADNNEGADGVGSSSGNWHCDSTWLGDRVITTSTRTWALPTYNNHLYKQISNGTSGGSTNDNTYFGYSTPWGYFDFNRFHCHFSPRDWQRLINNNWGFRPKRLNFKLFNIQVKEVTQNEGTKTIANNLTSTIQVFTDSEYQLPYVPGSAHQGCLPPFPADVFMIPQYGYLTLNNGSQAVGRSSFYCLEYFPSQMLRTGNNFEFSYTFEDVPFHSSYAHSQSLDRLMNPLIDQYLYYLSRTQSTGGTQGTQQLLFSQAGPANMSAQAKNWLPGPCYRQQRVSTTLSQNNNSNFAWTGATKYHLNGRDSLVNPGVAMATHKDDEERFFPSSGVLMFGKQGAGKDNVDYSSVMLTSEEEIKTTNPVATEQYGVVADNLQQTNGAPIVGTVNSQGALPGMVWQNRDVYLQGPIWAKIPHTDGNFHPSPLMGGFGLKHPPPQILIKNTPVPADPPTTFSQAKLASFITQYSTGQVSVEIEWELQKENSKRWNPEIQYTSNYYKSTNVDFAVNTEGTYSEPRPIGTRYLTRNL

SEQ ID NO: 408 - protein, 738 aa, Adeno-associated virus; identical to SEQ ID NO: 69

SEQ ID NO: 409 - protein, 728 aa, Artificial Sequence
  Description of Artificial Sequence: Synthetic polypeptide
MAADGYLPDWLEDNLSEGIREWWDLKPGAPKPKANQQKQDDGRGLVLPGYKYLGPFNGLDKGEPVNEADAAALEHDKAYDKQLEQGDNPYLKYNHADAEFQERLQEDTSFGGNLGRAVFQAKKRVLEPLGLVEEGAKTAPGKKRPIESPDSSTGIGRKGQQPAKKKLNFGQTGDSESVPDPQPIGEPPAGPSGLGSGTMAAGGGAPMADNNEGADGVGNASGNWHCDSTWLGDRVITTSTRTWALPTYNNHLYKQISSQSGATNDNHFFGYSTPWGYFDFNRFHCHFSPRDWQRLINNNWGFRPRKLRFKLFNIQVKEVTTNDGVTTIANNLTSTIQVFSDSEYQLPYVLGSAHQGCLPPFPADVFMIPQYGYLTLNNGSQSVGRSSFYCLEYFPSQMLRTGNNFEFSYTFEEVPFHSSYAHSQSLDRLMNPLIDQYLYYLARTQSTTGSTRELQFHQAGPNTMAEQSKNWLPGPCYRQQRLSKNIDSNNNSNFAWTGATKYHLNGRNSLTNPGVAMATNKDDEDQFFPINGVLVFGKTGAANKTTLENVLMTSEEEIKTTNPVATEEYGVVSSNLQSSTAGPQTQTVNSQGALPGMVWQNRDVYLQGPIWAKIPHTDGNFHPSPLMGGFGLKHPPPQILIKNTPVPANPPEVFTPAKFASFITQYSTGQVSVEIEWELQKENSKRWNPEIQYTSNYAKSNNVEFAVNNEGVYTEPRPIGTRYLTRNL

SEQ ID NO: 410 - DNA, 2489 bp, Adeno-associated virus
gaattcgccctttctacggctgcgtcaactggaccaatgagaactttcccttcaacgattgcgtcgacaagatggtgatctggtgggaggagggcaagatgacggccaaggtcgtgaagtccgccaaggccattcatcatctgctggggcgggctcccgagattgcttgctcggcctgcgatctggtcaacgtggacctggatgactgtgtttctgagcaataaatgacttaaaccaggtatggctgccgatggttatcttccagattggctcgaggacaacctctctgagggcattcgcgagtggtgggacttgaaacctggagccccgaaacccaaagccaaccagcaaaagcaggacgacggccggggtctggtgcttcctggctacaagtacctcggacccttcaacggactcgacaagggagagccggtcaacgaggcagacgccgcggccctcgagcacgacaaggcctacgacaagcagctcgagcagggggacaacccgtacctcaagtacaaccacgccgacgccgagtttcaggagcgtcttcaagaagatacgtcttttgggggcaacctcgggcgagcagtcttccaggccaagaagcgggttctcgaacctctcggtctggttgaggaaggcgctaagacggctcctggaaagaagagacccatagaatcccccgactcctccacgggcatcggcaggaaaggccagcagcccgctaaaaagaagctcaactttgggcagactggcgactcagagtcagtgcccgaccctcaaccaatcggagaaccccccgcaggcccctctggtctgggatctggtacaatggctgcaggcggtggcgctccaatggcagacaataacgaaggcgccgacggagtgggtaatgcctccggaaattggcattgcgattccacatggctgggcgacagagtcatcaccaccagcacccgcacctgggccctgcccacctacaacaaccacctctacaagcagatatcaagtcagagcggggctaccaacgacaaccacttcttcggctacagcaccccctggggctattttgacttcaacagattccactgccacttctcaccacgtgactggcagcgactcatcaacaacaactggggattccggcccagaaagctgcggttcaagttgttcaacatccaggtcaaggaggtcacgacgaacgacggcgttacgaccatcgccaataaccttaccagcacgattcaggtcttctcggactcggagtaccaactgccgtacgtcctcggctctgcgcaccagggctgcctccctccgttccctgcggacgtgttcatgattcctcagtacggatatctgactctaaacaacggcagtcagtctgtgggacgttcctccttctactgcctggagtactttccttctcagatgctgagaacgggcaataactttgaattcagctacacctttgaggaagtgcctttccacagcagctatgcgcacagccagagcctggaccggctgatgaatcccctcatcgaccagtacctgtactacctggcccggacccagagcactacggggtccacaagggagctgcagttccatcaggctgggcccaacaccatggccgagcaatcaaagaactggctgcccggaccctgttatcggcagcagagactgtcaaaaaacatagacagcaacaacaacagtaactttgcctggaccggggccactaaataccatctgaatggtagaaattcattaaccaacccgggcgtagccatggccaccaacaaggacgacgaggaccagttctttcccatcaacggagtgctggtttttggcaaaacgggggctgccaacaagacaacgctggaaaacgtgctaatgaccagcgaggaggagatcaaaaccaccaatcccgtggctacagaagaatacggtgtggtctccagcaacctgcaatcgtctacggccggaccccagacacagactgtcaacagccagggggctctgcccggcatggtctggcagaaccgggacgtgtacctgcagggtcccatctgggccaaaattcctcacacggacggcaactttcacccgtctcccctgatgggcggatttggactcaaacacccgcctcctcaaattctcatcaaaaacaccccggtacctgctaatcctccagaggtgtttactcctgccaagtttgcctcatttatcacgcagtacagcaccggccaggtcagcgtggagatcgagtgggaactgcagaaagaaaacagcaaacgctggaatccagagattcagtacacctcaaattatgccaagtctaataatgtggaatttgctgtcaacaacgaaggggtttatactgagcctcgccccattggcacccgttacctcacccgtaacctgtaattgcctgttaatcaataaaccggttaattcgtttcagttgaactttggtcaagggcgaattc

SEQ ID NO: 411 - protein, 728 aa, Artificial Sequence
  Description of Artificial Sequence: Synthetic polypeptide
MAADGYLPDWLEDNLSEGIREWWDLKPGAPKPKANQQKQDDGRGLVLPGYKYLGPFNGLDKGEPVNAADAAALEHDKAYDQQLKAGDNPYLRYNHADAEFQERLQEDTSFGGNLGRAVFQAKKRVLEPLGLVEEGAKTAPGKKRPIESPDSSTGIGKKGQQPAKKKLNFGQTGDSESVPDPQPIGEPPAGPSGLGSGTMAAGGGAPMADNNEGADGVGNASGNWHCDSTWLGDRVITTSTRTWALPTYNNHLYKQISSQSGATNDNHFFGYSTPWGYFDFNRFHCHFSPRDWQRLINNNWGFRPRKLRFKLFNIQVKEVTTNDGVTTIANNLTSTIQVFSDSEYQLPYVLGSAHQGCLPPFPADVFMIPQYGYLTLNNGSQSVGRSSFYCLEYFPSQMLRTGNNFEFSYTFEEVPFHSSYAHSQSLDRLMNPLIDQYLYYLARTQSTTGSTRELQFHQAGPNTMAEQSKNWLPGPCYRRQRLSKDIDSNNNSNFAWTGATKYHLNGRNSLTNPGVAMATNKDDEDQFFPINGVLVFGKTGAANKTTLENVLMTSEEEIKTTNPVATEEYGVVSSNLQSSTAGPQTQTVNSQGALPGMVWQNRDVYLQGPIWAKIPHTDGNFHPSPLMGGFGLKHPPPQILIKNTPVPANPPEVFTPAKFASFITQYSTGQVSVEIEWELQKENSKRWNPEIQYTSNYAKSNNVEFAVNNEGVYTEPRPIGTRYLTRNL

SEQ ID NO: 412 - DNA, 3098 bp, Adeno-associated virus
gaattcgccctttctacggctgcgtcaactggaccaatgagaactttcccttcaacgattgcgtcgacaagatggtgatctggtgggaggagggcaagatgacggccaaggtcgtggagtccgccaaggccattctcggcggcagcaaggtgcgcgtggaccaaaagtgcaagtcttccgcccagatcgatcccacccccgtgatcgtcacttccaacaccaacatgtgcgccgtgattgacgggaacagcaccaccttcgagcaccagcagccgttacaagaccggatgttcaaatttgaactcacccgccgtctggagcacgactttggcaaggtgacaaagcaggaagtcaaagagttcttccgctgggcgcaggatcacgtgaccgaggtggcgcatgagttctacgtcagaaagggtggagccaacaagagacccgcccccgatgacgcggataaaagcgagcccaagcgggcctgcccctcagtcgcggatccatcgacgtcagacgcggaaggagctccggtggactttgccgacaggtaccaaaacaaatgttctcgtcacgcgggcatgcttcagatgctgtttccctgcaagacatgcgagagaatgaatcagaatttcaacatttgcttcacgcacgggaccggagactgttcagaatgtttccccggcgtgtcagaatctcaaccggtcgtcagaaagaggacgtatcggaaactctgtgccattcatcatctgctggggcgggctcccgagattgcttgctcggcctgcgatctggtcaacgtggacctggatgactgtgtttctgagcaataaatgacttaaaccaggtatggctgccgatggttatcttccagattggctcgaggacaacctctctgagggcattcgcgagtggtgggacttgaaacctggagccccgaaacccaaagccaaccagcaaaagcaggacgacggccggggtctggtgcttcctggctacaagtacctcggacccttcaacggactcgacaagggagagccggtcaacgcggcggacgcagcggccctcgagcacgacaaggcctacgaccagcagctcaaagcgggtgacaatccgtacctgcggtataaccacgccgacgccgagtttcaggagcgtcttcaagaagatacgtcttttgggggcaacctcgggcgagcagtcttccaggccaagaagcgggttctcgaacctctcggtctggttgaggaaggcgctaagacggctcctggaaagaagagacccatagaatcccccgactcctccacgggcatcggcaagaaaggccagcagcccgctaaaaagaagctcaactttgggcagactggcgactcagagtcagtgcccgaccctcaaccaatcggagaaccccccgcaggcccctctggtctgggatctggtacaatggctgcaggcggtggcgctccaatggcagacaataacgaaggcgccgacggagtgggtaatgcctccggaaattggcattgcgattccacatggctgggcgacagagtcatcaccaccagcacccgcacctgggccctgcccacctacaacaaccacctctacaagcagatatcaagtcagagcggggctaccaacgacaaccacttcttcggctacagcaccccctggggctattttgacttcaacagattccactgccacttctcaccacgtgactggcagcgactcatcaacaacaactggggattccggcccagaaagctgcggttcaagttgttcaacatccaggtcaaggaggtcacgacgaacgacggcgttacgaccatcgctaataaccttaccagcacgattcaggtcttctcggactcggagtaccaactgccgtacgtcctcggctctgcgcaccagggctgcctccctccgttccctgcggacgtgttcatgattcctcagtacggatatctgactctaaacaacggcagtcagtctgtgggacgttcctccttctactgcctggagtactttccttctcagatgctgagaacgggcaataactttgaattcagctacacctttgaggaagtgcctttccacagcagctatgcgcacagccagagcctggaccggctgatgaatcccctcatcgaccagtacctgtactacctggcccggacccagagcactacggggtccacaagggagctgcagttccatcaggctgggcccaacaccatggccgagcaatcaaagaactggctgcccggaccctgttatcggcggcagagactgtcaaaagacatagacagcaacaacaacagtaactttgcctggaccggggccactaaataccatctgaatggtagaaattcattaaccaacccgggcgtagccatggccaccaacaaggacgacgaggaccagttctttcccatcaacggagtgctggtttttggcaaaacgggggctgccaacaagacaacgctggaaaacgtgctaatgaccagcgaggaggagatcaaaaccaccaatcccgtggctacagaagaatacggtgtggtctccagcaacctgcaatcgtctacggccggaccccagacacagactgtcaacagccagggggctctgcccggcatggtctggcagaaccgggacgtgtacctgcagggtcccatctgggccaaaattcctcacacggacggcaactttcacccgtctcccctgatgggcggatttggactcaaacacccgcctcctcaaattctcatcaaaaacaccccggtacctgctaatcctccagaggtgtttactcctgccaagtttgcctcatttatcacgcagtacagcaccggccaggtcagcgtggagatcgagtgggaactgcagaaagagaacagcaaacgctggaatccagagattcagtacacctcaaattatgccaagtctaataatgtggaatttgctgtcaacaacgaaggggtttatactgagcctcgccccattggcacccgttacctcacccgtaacctgtaattacttgttaatcaataaaccggttgattcgtttcagttgaactttggtctctgcgaagggcgaattc

SEQ ID NO: 413 - protein, 685 aa, Artificial Sequence
  Description of Artificial Sequence: Synthetic polypeptide
MAADGYLPDWLEDNLSEGIREWWDLKPGAPKPKANQQKQDDGRGLVLPGYKYLGPFNGLDKGEPVNEADAAALEHDKAYDKQLEQGDNPYLKYNHADAEFQERLQEDTSFGGNLGRAVFQAKKRVLEPLGLVEEGAKTAPGKKRPVEPSPQRSPDSSTGIGKTGQQPAKKRLNFGQTGDSESVPDPQPIGEPPAGPSGLGSGTMAAGGGAPMADNNEGADGVGSSSGNWHCDSTWLGDRVITTSTRTWALPTYNNHLYKQISNGTSGGSTNDNTYFGYSTPWGYFDFNRFHCHFSPRDWQRLINNNWGFRPKRLNFKLFNIQVKEVTQNEGTKTIANNLTSTIQVFTDSEYQLPYVLGSAHQGCLPPFPADVFMIPQYGYLTLNNGSQAVGRSSFYCLEYFPSQMLRTGNNFEFSYQFEDVPFHSSYAHSQSLDRLTNPLIDQYLYYLARTQSTTGSTRGLQFHQAGPNTMAEQSKNWLPGPCYRQQRLSKNIDSNNNSNFAWTGATKYHLNGRNSLTNPGVAMATNKDDEDQFFPINGVLVFGKTGAANKTTLENVLMTSEEEIKTTNPVATEEYGVVSSNLQSSTAGPQTQTVNSQGALPGMVWQNRDVYLQGPIWAKIPHTDGNFHPSPLMGGFGLKHPPPQILIKYTSNYYKSTNVDFAVNTEGTYSEPRPIGTRYLTRNL

SEQ ID NO: 414 - DNA, 2969 bp, Adeno-associated virus
gaattcgccctttctacggctgcgtcaactggaccaatgagaactttcccttcaacgattgcgtcgacaagatggtgatctggtgggaggagggcaagatgacggccaaggtcgtggagtccgccaaggccattctcggcggcagcaaggtgcgcgtggaccaaaagtgcaagtcgtccgcccagatcgaccccacccccgtgatcgtcacctccaacaccaacatgtgcgccgtgattgacgggaacagcaccaccttcgagcaccagcagccgttacaagaccggatgttcaaatttgaactcacccgccgtctggagcacgactttggcaaggtgacaaagcaggaagtcaaagagttcttccgctgggcgcaggatcacgtgaccgaggtggcgcatgagttctacgtcagaaagggtggagccaacaagagacccgcccccgatgacgcggataaaagcgagcccaagcgggcctgcccctcagtcgcggatccatcgacgtcagacgcggaaggagctccggtggactttgccgacaggtaccaaaacaaatgttctcgtcacgcgggcatgcttcagatgctgtttccctgcaagacatgcgagagaatgaatcagaatttcaacatttgcttcacgcacgggaccagagactgttcagaatgtttccccggcgtgtcagaatctcaaccggtcgtcagaaagaggacgtatcggaaactctgtgccattcatcatctgctggggcgggctcccgagattgcttgctcggcctgcgatctggtcaacgtggacctggatgactgtgtttctgagcaataaatgacttaaaccaggtatggctgccgatggttatcttccagattggctcgaggacaacctctctgagggcatccgcgagtggtgggacttgaaacctggagccccgaaacccaaagccaaccagcaaaagcaggacgacggccggggtctggtgcttcctggctacaagtacctcggacccttcaacggactcgacaagggagagccggtcaacgaggcagacgccgcggccctcgagcacgacaaggcctacgacaagcagctcgagcagggggacaacccgtacctcaagtacaaccacgccgacgccgagtttcaggagcgtcttcaagaagatacgtcttttgggggcaacctcgggcgagcagtcttccaggccaagaagcgggttctcgaacctctcggtctggttgaggaaggcgctaagacggctcctggaaagaagagaccggtagagccatcaccccagcgttctccagactcctctacgggcatcggcaagacaggccagcagcccgcgaaaaagagactcaactttgggcagactggcgactcagagtcagtgcccgaccctcaaccaatcggagaaccccccgcaggcccctctggtctgggatctggtacaatggctgcaggcggtggcgctccaatggcagacaataacgaaggcgccgacggagtgggtagttcctcaggaaattggcattgcgattccacatggctgggcgacagagtcatcaccaccagcacccgaacctgggccctccccacctacaacaaccacctctacaagcaaatctccaacgggacatcgggaggaagcaccaacgacaacacctacttcggctacagcaccccctgggggtattttgactttaacagattccactgccacttctcaccacgtgactggcagcgactcatcaacaacaactggggattccggcccaagagactcaacttcaagctcttcaacatccaggtcaaggaggtcacgcagaatgaaggcaccaagaccatcgccaataaccttaccagcacgattcaggtctttacggactcggaataccagctcccgtacgtcctcggctctgcgcaccagggctgcctgcctccgttcccggcggacgtcttcatgattcctcagtacgggtacctgactctgaacaacggcagtcaggccgtgggccgttcctccttctactgcctggagtactttccttctcaaatgctgagaacgggcaacaactttgagttcagctaccagtttgaggacgtgccttttcacagcagctacgcgcacagccaaagcctggaccggctgacgaaccccctcatcgaccagtacctgtactacctggcccggacccagagcactacggggtccacaagggggctgcagttccatcaggctgggcccaacaccatggccgagcaatcaaagaactggctgcccggaccctgttatcggcagcagagactgtcaaaaaacatagacagcaacaacaacagtaactttgcctggaccggggccactaaataccatctgaatggtagaaattcattaaccaacccgggcgtagccatggccaccaacaaggacgacgaggaccagttctttcccatcaacggagtgctggtttttggcaaaacgggggctgccaacaagacaacgctggaaaacgtgctaatgaccagcgaggaggagatcaaaaccaccaatcccgtggctacagaagaatacggtgtggtctccagcaacctgcaatcgtctacggccggaccccagacacagactgtcaacagccagggggctctgcccggcatggtctggcagaaccgggacgtgtacctgcagggtcccatctgggccaaaattcctcacacggacggcaactttcacccgtctcccctgatgggcggatttggactcaaacacccgcctcctcaaattctcatcaagtatacttccaactactacaaatctacaaatgtggactttgctgtcaatactgagggtacttattcagagcctcgccccattggcacccgttacctcacccgtaacctgtaattgcctgttaatcaataaaccggttaattcgtttcagttgaactttggtctctgcgaagggcgaattc

SEQ ID NO: 415 - protein, 733 aa, Artificial Sequence
  Description of Artificial Sequence: Synthetic polypeptide
MAADGYLPDWLEDNLSEGIREWWDLKPGAPKPKANQQKQDDGRGLVLPGYKYLGPFNGLDKGEPVNAADAAALEHDKAYDQQLKAGDNPYLRYNHADAEFQERLQEDTSFGGNLGRAVFQAKKRVLEPLGLVEEGAKTAPGKKRPIESPDSSTGIGKKGQQPAKKKLNFGQTGDSESVPDPQPIGEPPAGPSGLGSGTMAAGGGAPMADNNEGADGVGSSSGNWHCDSTWLGDRVITTSTRTWALPTYNNHLYKQISNGTSGGSTNDNTYFGYSTPWGYFDFNRFHCHFSPRDWQRLINNNWGFRPKRLNFKLFNIQVKEVTQNEGTKTIANNLTSTIQVFTDSEYQLPYVLGSAHQGCLPPFPADVFMIPQYGYLTLNNGSQAVGRSSFYCLEYFPSQMLRTGNNFEFSYQFEDVPFHSSYAHSQSLDRLMNPLIDQYLYYLSRTQSTGGTAGTQQLLFSQAGPNNMSAQAKNWLPGPCYRQQRVSTTVSQNNNSNFAWTGATKYHLNGRDSLVNPGVAMATHKGDEERFFPSSGVLMFGKQGAGKDNVDYSSVMLTSEEEIKTTNPVATEQYGVVADNLQQQNAAPIVGAVNSQGALPGMVWQNRDVYLQGPIWAKIPHTDGNFHPSPLMGGFGLKHPPPQILIKNTPVPADPPTTFSQAKLASFITQYSTGQVSVEIEWELQKENSKRWNPEIQYTSNYYKSTNVDFAVNTEGTYSEPRPIGTRYLTRSL

SEQ ID NO: 416 - DNA, 3113 bp, Adeno-associated virus
gaattcgccctttctacggctgcgtcaactggaccaatgagaactttcccttcaacgattgcgtcgacaagatggtgatctggtgggaggagggcaagatgacggccaaggtcgtggagtccgccaaggccattctcggcggcagcaaggtgcgcgtggaccaaaagtgcaagtcgtccgcccagatcgatcccacccccgtgatcgtcacttccaacaccaacatgtgcgccgtgattgacgggaacagcaccaccttcgagcaccagcagccgttacaagaccggatgttcaaatttgaactcacccgccgtctggagcatgactttggcaaggtgacaaagcaggaagtcaaagagttcttccgctgggcgcaggatcacgtgaccgaggtggcgcatgagttctacgtcagaaagggtggagccaacaagagacccgcccccgatgacgcggataaaagcgagcccaagcgggcctgcccctcagtcgcggatccatcgacgtcagacgcggaaggagctccggtggactttgccgacaggtaccaaaacaaatgttctcgtcacgcgggcatgcttcagatgctgtttccctgcaagacatgcgagagaatgaatcagaatttcaacatttgcttcacgcacgggaccagagactgttcagaatgtttccccggcgtgtcagaatctcaaccggtcgtcagaaagaggacgtatcggaaactctgtgccattcatcatctgctggggcgggctcccgagattgcttgctcggcctgcgatctggtcaacgtggacctggatgactgtgtttctgagcaataaatgacttaaaccaggtatggctgccgatggttatcttccagattggctcgaggacaacctctctgagggcattcgcgagtggtgggacttgaaacctggagccccgaaacccaaagccaaccagcaaaagcaggacgacggccggggtctggtgcttcctggctacaagtacctcggacccttcaacggactcgacaagggggagcccgtcaacgcggcggacgcagcggccctcgagcacgacaaggcctacgaccagcagctcaaagcgggtgacaatccgtacctgcggtataaccacgccgacgccgagtttcaggagcgtcttcaagaagatacgtcttttgggggcaacctcgggcgagcagtcttccaggccaagaagcgggttctcgaacctctcggtctggttgaggaaggcgctaagacggctcctggaaagaagagacccatagaatcccccgactcctccacgggcatcggcaagaaaggccagcagcccgctaaaaagaagctcaactttgggcagactggcgactcagagtcagtgcccgaccctcaaccaatcggagaaccccccgcaggcccctctggtctgggatctggtacaatggctgcaggcggtggcgctccaatggcagacaataacgaaggcgccgacggagtgggtagttcctcaggaaattggcattgcgattccacatggctgggcgacagagtcatcaccaccagcacccgaacctgggccctccccacctacaacaaccacctctacaagcaaatctccaacgggacatcgggaggaagcaccaacgacaacacctacttcggctacagcaccccctgggggtattttgactttaacagattccactgccacttctcaccacgtgactggcagcgactcatcaacaacaactggggattccggcccaagagactcaacttcaagctcttcaacatccaggtcaaggaggtcacgcagaatgaaggcaccaagaccatcgccaataaccttaccagcacgattcaggtctttacggactcggaataccagctcccgtacgtcctcggctctgcgcaccagggctgcctgcctccgttcccggcggacgtcttcatgattcctcagtacgggtacctgactctgaacaacggcagtcaggccgtgggccgttcctccttctactgcctggagtactttccttctcaaatgctgagaacgggcaacaactttgagttcagctaccagtttgaggacgtgccttttcacagcagctatgcgcacagccaaagcctggaccggctgatgaaccccctcatcgaccagtacctgtactacctgtctcggactcagtccacgggaggtaccgcaggaactcagcagttgctattttctcaggccgggcctaataacatgtcggctcaggccaaaaactggctacccgggccctgctaccggcagcaacgcgtctccacgacagtgtcgcaaaataacaacagcaactttgcttggaccggtgccaccaagtatcatctgaatggcagagactctctggtaaatcccggtgtcgctatggcaacgcacaagggcgacgaagagcgattttttccatccagcggagtcttgatgtttgggaaacagggagctggaaaagacaacgtggactatagcagcgttatgctaaccagtgaggaagaaatcaaaaccaccaacccagtggccacagaacagtacggcgtggtggccgataacctgcaacagcaaaacgccgctcctattgtaggggccgtcaacagtcaaggagccttacctggcatggtctggcagaaccgggacgtgtacctgcagggtcctatctgggccaagattcctcacacggacggcaactttcatccttcgccgctgatgggaggctttggactgaaacacccgcctcctcagatcctgattaagaatacacctgttcccgcggatcctccaactaccttcagtcaagccaagctggcgtcgttcatcacgcagtacagcaccggacaggtcagcgtggaaattgaatgggagctgcagaaagagaacagcaagcgctggaacccagagattcagtatacttccaactactacaaatctacaaatgtggactttgctgtcaatactgagggtacttattcagagcctcgccccattggcacccgttacctcacccgtagcctgtaattgcctgttaatcaataaaccggttgattcgtttcagttgaactttggtctctgcgaagggcgaattc

SEQ ID NO: 417 - protein, 738 aa, Artificial Sequence
  Description of Artificial Sequence: Synthetic polypeptide
MAADGYLPDWLEDNLSEGIREWWDLKPGAPKPKANQQKQDDGRGLVLPGYKYLGPFNGLDKGEPVNAADAAALEHDKAYDQQLKAGDNPYLRYNHADAEFQERLQEDTSFGGNLGRAVFQAKKRVLEPLGLVEEGAKTAPGKKRPVEPSPQRSPDSSTGIGKTGQQPAKKRLNFGQTGDSESVPDPQPIGEPPAGPSGLGSGTMAAGGGAPMADNNEGADGVGSSSGNWHCDSTWLGDRVITTSTRTWALPTYNNHLYKQISNGTSGGSTNDNTYFGYSTPWGYFDFNRFHCHFSPRDWQRLINNNWGFRPKRLNFKLFNIQVKEVTQNEGTKTIANNLTSTIQVFTDSEYQLPYVLGSAHQGCPPPFPADVFMIPQYGYLTLNNGSQAVGRSSFYCLEYFPSQMRRTGNNFEFSYQFEDVPFHSSYAHSQSLDRLMNPLIDQYLYYLSRTQSTGGTAGTQQLLFSQAGPNNMSAQAKNWLPGPCYRQQRVSTTLSQNNNSNFAWTGATKYHLNGRDSLVNPGVAMATHKDDEERFFPSSGVLMFGKQGAGKDNVDYSSVMLTSEEEIKTTNPVATEQYGVVADNLQQQNAAPIVGAVNSQGALPGMVWQNRDVYLQGPIWAKIPHTDGNFHPSPLMGGFGLKHPPPQILIKNTPVPADPPTTFSQAKLASFITQYSTGQVSVEIEWELQKENSKRWNPEIQYTSNYYKSTNVDFAVNTEGTYSEPRPIGTRYLTRNL

SEQ ID NO: 418 - DNA, 3128 bp, Adeno-associated virus
gaattcgccctttctacggctgcgtcaactggaccaatgagaactttcccttcaacgattgcgtcgacaagatggtgatctggtgggaggagggcaagatgacggccaaggtcgtggagtccgccaaggccattctcggcggcagcaaggtgcgcgtggaccaaaagtgcaagtcgtccgcccagatcgaccccacccccgtgatcgtcacctccaacaccaacatgtgcgccgtgattgacgggaacagcaccaccttcgagcaccagcagccgttgcaggaccggatgttcaaatttgaactcacccgccgtctggagcatgactttggcaaggtgacaaagcaggaagtcaaagagttcttccgctgggcgcaggatcacgtgaccgaggtggcgcatgagttctacgtcagaaagggtggagccaacaagagacccgcccccgatgacgcggataaaagcgagcccaagcgggcctgcccctcagtcgcggatccatcgacgtcagacgcggaaggagctccggtggactttgccgacaggtaccaaaacaaatgttctcgtcacgcgggcatgcttcagatgctgtttccctgcaagacatgcgagagaatgaatcagaatttcaacatttgcttcacgcgcgggaccagagactgttcagaatgtttcccgggcgtgtcagaatctcaaccggtcgtcagaaagaggacgtatcggaaactctgtgccattcatcatctgctggggcgggctcccgagattgcttgctcggcctgcgatctggtcaacgtggacctggatgactgtgtttctgagcaataaatgacttaaaccaggtatggctgccgatggttatcttccagattggctcgaggacaacctctctgagggcattcgcgagtggtgggacttgaaacctggagccccgaaacccaaagccaaccagcaaaagcaggacgacggccggggtctggtgcttcctggctacaagtacctcggacccttcaacggactcgacaagggggagcccgtcaacgcggcggacgcagcggccctcgagcacgacaaggcctacgaccagcagctcaaagcgggtgacaatccgtacctgcggtataaccacgccgacgccgagtttcaggagcgtctgcaagaagatacgtcttttgggggcaacctcgggcgagcagtcttccaggccaagaagcgggttctcgaacctctcggtctggttgaggaaggcgctaagacggctcctggaaagaagagaccggtagagccatcaccccagcgttctccagactcctctacgggcatcggcaagacaggccagcagcccgcgaaaaagagactcaactttgggcagactggcgactcagagtcagtgcccgaccctcaaccaatcggagaaccccccgcaggcccctctggtctgggatctggtacaatggctgcaggcggtggcgctccaatggcagacaataacgaaggcgccgacggagtgggtagttcctcaggaaattggcattgcgattccacatggctgggcgacagagtcatcaccaccagcacccgaacctgggccctccccacctacaacaaccacctctacaagcaaatctccaacgggacatcgggaggaagcaccaacgacaacacctacttcggctacagcaccccctgggggtattttgactttaacagattccactgccacttctcaccacgtgactggcagcgactcatcaacaacaactggggattccggcccaagagactcaacttcaagctcttcaacatccaggtcaaggaggtcacgcagaatgaaggcaccaagaccatcgccaataaccttaccagcacgattcaggtctttacggactcggaataccagctcccgtacgtcctcggctctgcgcaccagggctgcccgcctccgttcccggcggacgtcttcatgattcctcagtacgggtacctgactctgaacaacggcagtcaggccgtgggccgttcctccttctactgcctggagtactttccttctcaaatgcggagaacgggcaacaactttgagttcagctaccagtttgaggacgtgccttttcacagcagctacgcgcatagccaaagcctggaccggctgatgaaccccctcatcgaccagtacctgtactacctgtctcggactcagtccacgggaggtaccgcaggaactcagcagttgctattttctcaggccgggcctaataacatgtcggctcaggccaaaaactggctacccgggccctgctaccggcagcaacgcgtctccacgacactgtcgcaaaataacaacagcaactttgcttggaccggtgccaccaagtatcatctgaatggcagagactctctggtaaatcccggtgtcgctatggcaacgcacaaggacgacgaagagcgattttttccatccagcggagtcttgatgtttgggaaacagggagctggaaaagacaacgtggactatagcagcgttatgctaaccagtgaggaagaaatcaaaaccaccaacccagtggccacagaacagtacggcgtggtggccgataacctgcaacagcaaaacgccgctcctattgtaggggccgtcaacagtcaaggagccttacctggcatggtctggcagaaccgggacgtgtacctgcagggtcctatctgggccaagattcctcacacggacggcaactttcatccttcgccgctgatgggaggctttggactgaaacacccgcctcctcagatcctgattaagaatacacctgttcccgcggatcctccaactaccttcagtcaagccaagctggcgtcgttcatcacgcagtacagcaccggacaggtcagcgtggaaattgaatgggagctgcagaaagagaacagcaagcgctggaacccagagattcagtatacttccaactactacaaatctacaaatgtggactttgctgtcaatactgagggtacttattcagagcctcgccccattggcacccgttacctcacccgtaacctgtaattgcctgttaatcaataaaccggttaattcgtttcagttgaactttggtctctgcgaagggcgaattc

SEQ ID NO: 419 - protein, 738 aa, Adeno-associated virus; identical to SEQ ID NO: 407

SEQ ID NO: 420 - DNA, 1933 bp, Adeno-associated virus
  modified_base (1302)..(1302): a, t, c, or g
caaggcctacgaccagcagctcaaagcgggtgacaatccgtacctgcggtataaccacgccgacgccgagtttcaggagcgtcttcaagaagatacgtcttttgggggcaacctcgggcgagcagtcttccaggccaaaaagcgggttctcgaacctcttggtctggttgagacgccagctaagacggcacctggaaagaagcgaccggtagactcgccagactccacctcgggcatcggcaagaaaggccagcagcccgcgaaaaagagactcaactttgggcagactggcgactcagagtcagtccccgaccctcaaccaatcggagaaccaccagcaggcccctctggtctgggatctggtacaatggctgcaggcggtggcgcaccaatggctgacaataacgagggcgccgacggagtgggtaatgcctcaggaaattggcattgcgattccacatggctgggcgacagagtcatcaccaccagcacccgaacctgggccctgcccacctacaacaaccacctctacaagcaaatctccagtcagtcagcagggagcaccaacgataacgtctatttcggctacagcaccccctgggggtattttgacttcaacagattccattgccacttctcaccacgtgactggcagcgacttatcaacaacaactggggattccggcccaagaagctcaacttcaagctcttcaacatccaggtcaaggaggtcacgacgaatgacggtgtcacaaccatcgctaataaccttaccagcacggttcaggtcttttcggactcggaatatcaactgccgtacgtcctcggctccgcgcaccagggctgcctgcctccgttcccggcagacgtgttcatgattccgcagtacggatacctgactctgaacaatggcagccaatcggtaggccgttcctccttctactgcctggagtactttccttctcagatgctgagaacgggcaacaacttcacctttagctacaccttcgaggacgtgcctttccacagcagctacgcgcacagccagagtctggaccggctgatgaatcccctcatcgaccagtacctgtactacttggccagaacacagagcaacgcaggaggtactgctggcaatcgggaactgcagttttatcagggcggacctaccaccatggccgaacaagcaaagaactggctgcccggaccttgcttccggcaacagagagtatccaagacgctggatcaaaataacaacagcaactttgcctggactggtgccacaaaataccatttaaatgnaagaaattcattggttaatcccggtgtcgccatggcaacccacaaggacgacgaggaacgcttcttcccttcgagcggagttctaatttttggcaaaactggagcagctaataaaactacattagaaaacgtgctcatgacaaatgaagaagaaattcgtcctaccaacccggtagctaccgaggaatacgggattgtaagcagcaacttgcaggcggctagcaccgcagcccagacacaagttgttaacaaccagggagccttacctggcatggtctggcagaaccgggacgtgtacctgcaaggtcccatttgggccaagattcctcacacggacggcaactttcacccgtctcctctaatgggtggctttggactgaaacacccgcctccccagatcctgatcaaaaacacaccggtacctgctaatcctccagaagtgtttactcctgccaagtttgcttccttcatcacgcagtacagcaccgggcaagtcagcgttgagatcgagtgggagctgcagaaagagaacagcaagcgctggaacccagagattcagtacacctccaactttgacaaacagactggagtggactttgctgttgacagccagggtgtttactctgagcct

SEQ ID NO: 421 - protein, 733 aa, Artificial Sequence
  Description of Artificial Sequence: Synthetic polypeptide
MAADGYLPDWLEDNLSEGIREWWDLKPGAPKPKANQQKQDDGRGLVLPGYKYLGPFNGLDKGEPVNAADAAALEHDKAYDQQLKAGDNPYLRYNHADAEFQERLQEDTSFGGNLGRAVFQAKKRVLEPLGLVEEGAKTAPGKKRPLESPQEPDSSSGIGKKGKQPAKKRLNFEEDTGAGDGPPEGSDTSAMSSDIEMRAAPGGNAVDAGQGSDGVGNASGDWHCDSTWSEGKVTTTSTRTWVLPTYNNHLYLRLGTTSNSNTYNGFSTPWGYFDFNRFHCHFSPRDWQRLINNNWGLRPKAMRVKIFNIQVKEVTTSNGETTVANNLTSTVQIFADSSYELPYVMDAGQEGSLSPFPNDVFMVPQYGYCGIVTGENQNQTDRNAFYCLEYFPSQMLRTGNNFEMAYNFGKVPFHSMYAYSQSPDRLMNPLLDQYLWHLQSTTSGETLNQGNAATTFGKIRSGDFAFYRKNWLPGPCVKQQRLSKTASQNYKIPASGGNALLKYDTHYTLNNRWSNIAPGPPMATAGPSDGDFSNAQLIFPGPSVTGNTTTSANNLLFTSEEEIAATNPRDTDMFGQIADNNQNATTAPITGNVTAMGVLPGMVWQNRDIYYQGPIWAKIPHADGHFHPSPLIGGFGLKHPPPQIFIKNTPVPANPATTFTAARVDSFITQYSTGQVAVQIEWEIEKERSKRWNPEVQFTSNYGNQSSMLWAPDTTGKYTEPRVIGSRYLTNHL

SEQ ID NO: 422 - DNA, 3105 bp, Adeno-associated virus
gaattcgcccttgctgcgtcaactggaccaatgagaactttcccttcaacgattgcgtcgacaagatggtgatctggtgggaggagggcaagatgaccgccaaggtcgtggagtccgccaaggccattctgggcggaagcaaggtgcgcgtggaccaaaagtgcaagtcatcggcccagatcgaccccacgcccgtgatcgtcacctccaacaccaacatgtgcgccgtgatcgacgggaacagcaccaccttcgagcaccagcagccgctgcaggaccgcatgttcaagttcgagctcacccgccgtctggagcacgactttggcaaggtgaccaagcaggaagtcaaagagttcttccgctgggctcaggatcacgtgactgaggtggcgcatgagttctacgtcagaaagggcggagccaccaaaagacccgcccccagtgacgcggatataagcgagcccaagcgggcctgcccctcagttgcggagccatcgacgtcagacgcggaagcaccggtggactttgcggacaggtaccaaaacaaatgttctcgtcacgcgggcatgcttcagatgctgtttccctgcaagacatgcgagagaatgaatcagaatttcaacgtctgcttcacgcacggggtcagagactgctcagagtgcttccccggcgcgtcagaatctcaacccgtcgtcagaaaaaagacgtatcagaaactgtgcgcgattcatcatctgctggggcgggcacccgagattgcgtgttcggcccgcgatctcgtcaacgtggacttggatgactgtgtttctgagcaataaatgacttaaaccaggtatggctgctgacggttatcttccagattggctcgaggacaacctctctgagggcattcgcgagtggtgggacctgaaacctggagcccccaagcccaaggccaaccagcagaagcaggacgacggccggggtctggtgcttcctggctacaagtacctcggacccttcaacggactcgacaagggggagcccgtcaacgcggcggacgcagcggccctcgagcacgacaaggcctacgaccagcagctcaaagcgggtgacaatccgtacctgcggtataaccacgccgacgccgagtttcaggagcgtctgcaagaagatacgtcttttgggggcaacctcgggcgagcagtcttccaggccaagaagagggtactcgaacctctgggcctggttgaagaaggtgctaagacggctcctggaaagaagagaccgttagagtcaccacaagagcccgactcctcctcaggaatcggcaaaaaaggcaaacaaccagccaaaaagagactcaactttgaagaggacactggagccggagacggaccccctgaaggatcagataccagcgccatgtcttcagacattgaaatgcgtgcagcaccgggcggaaatgctgtcgatgcgggacaaggttccgatggagtgggtaatgcctcgggtgattggcattgcgattccacctggtctgagggcaaggtcacaacaacctcgaccagaacctgggtcttgcccacctacaacaaccacttgtacctgcggctcggaacaacatcaaacagcaacacctacaacggattctccaccccctggggatactttgactttaacagattccactgtcacttctcaccacgtgactggcaaagactcatcaacaacaactggggactacgaccaaaagccatgcgcgttaaaatcttcaatatccaagttaaggaggtcacaacgtcgaacggcgagactacggtcgctaataaccttaccagcacggttcagatatttgcggactcgtcgtatgagctcccgtacgtgatggacgctggacaagagggaagtctgtctcctttccccaatgacgtcttcatggtgcctcaatatggctactgtggcattgtgactggcgaaaatcagaaccagacggacagaaatgctttctactgcctggagtattttccttcacaaatgctgagaactggcaataactttgaaatggcttacaactttgggaaggtgccgttccactcaatgtatgcttacagccagagcccggacagactgatgaatcccctcctggaccagtacctgtggcacttacagtcgaccacctctggagagactctgaatcaaggcaatgcagcaaccacatttggaaaaatcaggagtggagactttgccttttacagaaagaactggctgcctgggccttgtgttaaacagcagagactctcaaaaactgccagtcaaaattacaagattcctgccagcgggggcaacgctctgttaaagtatgacacccactataccttaaacaaccgctggagcaacatagcgcctggacctccaatggcaacagctggaccttcagatggggacttcagcaacgcccagctcatcttccctggaccatcagtcaccggaaacacaacaacctcagcaaacaatctgttgtttacatcagaagaagaaattgctgccaccaacccaagagacacggacatgtttggtcagattgctgacaataatcagaatgctacaactgctcccataaccggcaacgtgactgctatgggagtgcttcctggcatggtgtggcaaaacagagacatttactaccaagggccaatttgggccaagatcccacacgcggacggacattttcatccttcaccgctaattggcggttttggactgaaacatccgcctccccagatatttatcaaaaacacccccgtacctgccaatcctgcgacaaccttcactgcagccagagtggactctttcatcacacaatacagcaccggccaggtcgctgttcagattgaatgggaaatcgaaaaggaacgctccaaacgctggaatcctgaagtgcagtttacttcaaactatgggaaccagtcttctatgttgtgggctcccgatacaactgggaagtatacagagccgcgggttattggctctcgttatttgactaatcatttgtaactgcctagttaatcaataaaccgtgtgattcgtttcagttgaactttggtctctgcgaagggcgaattc

SEQ ID NO: 423 - protein, 733 aa, Adeno-associated virus
MAADGYLPDWLEDNLSEGIREWWDLKPGAPKPKANQQKQDDGRGLVLPGYKYLGPFNGLDKGEPVNAADAAALEHDKAYDQQLKAGDNPYLRYNHADAEFQERLQEDTSFGGNLGRAVFQAKKRVLEPLGLVEEGAKTAPGKKRPLESPQEPDSSSGIGKKGKQPAKKRLNFEEDTGAGDGPPEGSDTSAMSSDIEMRAAPGGNAVDAGQGSDGVGNASGDWHCDSTWSEGKVTTTSTRTWVLPTYNNHLYLRLGTTSNSNTYNGFSTPWGYFDFNRFHCHFSPRDWQRLINNNWGLRPKAMRVKIFNIQVKEVTTSNGETTVANNLTSTVQIFADSSYELPYVMDAGQEGSLPPFPNDVFMVPQYGYCGIVTGENQNQTDRNAFYCLEYFPSQMLRTGNNFEMAYNFEKVPFHSMYAHSQSLDRLMNPLLDQYLWHLQSTTSGETLNQGNAATTFGKIRSGDFAFYRKNWLPGPCVKQQRFSKTASQNYKIPASGGNALLKYDTHYTLNNRWSNIAPGPPMATAGPSDGDFSNAQLIFPGPSVTGNTTTSANNLLFTSEEEIAATNPRDTDMFGQIADNNQNATTAPITGNVTAMGVLPGMVWQNRDIYYQGPIWAKIPHADGHFHPSPLIGGFGLKHPPPQIFIKNTPVPANPATTFTAARVDSFITQYSTGQVAVQIEWEIEKERSKRWNPEVQFTSNYGNQSSMLWAPDTTGKYTEPRVIGSRYLTNHL

SEQ ID NO: 424 - DNA, 3105 bp, Adeno-associated virus
gaattcgcccttgctgcgtcaactggaccaatgagaactttcccttcaacgattgcgtcgacaagatggtgatctggtgggaggagggcaagatgaccgccaaggtcgtggagtccgccaaggccattctgggcggaagcaaggtgcgcgtggaccaaaagtgcaagtcatcggcccagatcgaccccacgcccgtgatcgtcacctccaacaccaacatgtgcgccgtgatcgacgggaacagcaccaccttcgagcaccagcagccgctgcaggaccgcatgttcaagttcgagctcacccgccgtctggagcacgactttggcaaggtgaccaagcaggaagtcaaagagttcttccgctgggctcaggatcacgtgactgaggtggcgcatgagttctacgtcagaaagggcggagccaccaaaagacccgcccccagtgacgcggatataagcgagcccaagcgggcctgcccctcagttgcggagccatcgacgtcagacgcggaagcaccggtggactttgcggacaggtaccaaaacaaatgttctcgtcacgcgggcatgcttcagatgctgtttccctgcaagacatgcgagagaatgaatcagaatttcaacgtctgcttcacgcacggggtcagagactgctcagagtgcttccccggcgcgtcagaatctcaacccgtcgtcagaaaaaagacgtatcagaaactgtgcgcgattcatcatctgctggggcgggcacccgagattgcgtgttcggcctgcgatctcgtcaacgtggacttggatgactgtgtttctgagcaataaatgacttaaaccaggtatggctgctgacggttatcttccagattggctcgaggacaacctctctgagggcattcgcgagtggtgggacctgaaacctggagcccccaagctcaaggccaaccagcagaagcaggacgacggccggggtctggtgcttcctggctacaagtacctcggacccttccacggactcgacaagggggagcccgtcaacgcggcggacgcagcggccctcgagcacgacaaggcctacgaccagcagctcaaagcgggtgacaatccgtacctgcggtataaccacgccgacgccgagtttcaggagcgtctgcaagaagatacgtcttttgggggcaacctcgggcgagcagtcttccaggccaagaagagggtactcgaaccactgggcctggttgaagaaggtgctaagacggctcctggaaagaagagaccgttagagtcaccacaagagcccgactcctcctcaggaatcggcaaaaaaggcaaacaaccagccaaaaagagactcaactttgaagaggacactggagccggagacggaccccctgaaggatcagataccagcgccatgtcttcagacattgaaatgcgtgcagcaccgggcggaaatgctgtcgatgcgggacaaggttccgatggagtgggtaatgcctcgggtgattggcattgcgattccacctggtctgagggcaaggtcacaacaacctcgaccagaacctgggtcttgcccacctacaacaaccacttgtacctgcggctcggaacaacatcaaacagcaacacctacaacggattctccaccccctggggatactttgactttaacagattccactgtcacttctcaccacgtgactggcaaagactcatcaacaacaactggggactacgaccaaaagccatgcgcgttaaaatcttcaatatccaagttaaggaggtcacaacgtcgaacggcgagactacggtcgctaataaccttaccagcacggttcagatatttgcggactcgtcgtatgagctcccgtacgtgatggacgctggacaagagggaagtctgcctcctttccccaatgacgtcttcatggtgcctcaatatggctactgtggcattgtgactggcgaaaatcagaaccagacggacagaaatgctttctactgcctggagtattttccttcacaaatgctgagaactggcaataactttgaaatggcttacaactttgagaaggtgccgttccactcaatgtatgctcacagccagagcctggacagactgatgaatcccctcctggaccagtacctgtggcacttacagtcgaccacctctggagagactctgaatcaaggcaatgcagcaaccacatttggaaaaatcaggagtggagactttgccttttacagaaagaactggctgcctgggccttgtgttaaacagcagagattctcaaaaactgccagtcaaaattacaagattcctgccagcgggggcaacgctctgttaaagtatgacacccactataccttaaacaaccgctggagcaacatagcgcctggacctccaatggcaacagctggaccttcagatggggacttcagcaacgcccagctcatcttccctggaccatcagtcaccggaaacacaacaacctcagcaaacaatctgttgtttacatcagaaggagaaattgctgccaccaacccaagagacacggacatgtttggtcagattgctgacaataatcagaatgctacaactgctcccataaccggcaacgtgactgctatgggagtgcttcctggcatggtgtggcaaaacagagacatttactaccaagggccaatttgggccaagatcccacacgcggacggacattttcatccttcaccgctaattggcggttttggactgaaacatccgcctccccagatatttatcaaaaacacccccgtacctgccaatcctgcgacaaccttcactgcagccagagtggactctttcatcacacaatacagcaccggccaggtcgctgttcagattgaatgggaaatcgaaaaggaacgctccaaacgccggaatcctgaagtgcagtttacttcaaactatgggaaccagtcttctatgttgtgggctcccgatacaactgggaagtatacagagccgcgggttattggctctcgttatttgactaatcatttgtaactgcctagttaatcaataaaccgtgtgattcgtttcagttgaactttggtctctgcgaagggcgaattc

SEQ ID NO: 425 - protein, 733 aa, Artificial Sequence
  Description of Artificial Sequence: Synthetic polypeptide
MAADGYLPDWLEDNLSEGIREWWDLKPGAPKPKANQQKQDDGRGLVLPGYEYLGPFNGLDKGEPVNAADAAALEHDKAYDQQLKAGDNPYLRYNHADAEFQERLQEDTSFGGNLGRAVFQAKKRVLEPLGLVEEGAKTAPGKKRPLESPQEPDSSSGIGKKGKQPAKKRLNFEEDTGAGDGPPEGSDTSAMSSDIEMRAAPGGNAVDAGQGSDGVGNASGDWHCDSTWSEGKVTTTSTRTWVLPTYNNHLYLRLGTTSNSNTYNGFSTPWGYFDFNRFHCHFSPRDWQRLINNNWGLRPKAMRVKIFNIQVKEVTTSNGETTVANNLTSTVQIFADSSYELPYVMDAGQEGSLPPFPNDVFMVPQYGYCGIVTGENQNQTDRNAFYCLEYFPSQMLRTGNNFETAYNFEKVPFHSMYAHSQSLDGLMNPLLDQYLWHLQSTTSGETLNQGNAATTFGKIRSGDFAFYRKNWLPGPCVKQQRFSKTASQNYKIPASGGNALLKYDTHYTLNNRWSNIAPGPPMATAGPSDGDFSNAQLIFPGPSVTGNTTTSANNLLFTSEEEIAATNPRDTDMFGQIADNNQNATTAPITGNVTAMGVLPGMVWQNRDIYYQGPIWAKIPHADGHFHPSPLIGGFGLKHPPPQIFIKNTPVPAYPATTFTAARVDSFITQYSTGQVAVQIEWEIEKERSKRWNPEVQFTSNCGNQSSMLWAPDTTGKYTEPRVIGSRYLTNHL

SEQ ID NO: 426 - DNA, 3105 bp, Adeno-associated virus
gaattcgcccttcgcagagaccaaagttcaactgaaacgaatcacacggtttattgattaactaggcagttacaaatgattagtcaaataacgagagccaataacccgcggctctgtatacttcccagttgtatcgggagcccacaacatagaagactggttcccacagtttgaagtaaactgcacttcaggattccagcgtttggagcgttccttttcgatttcccattcaatctgaacagcgacctggccggtgctgtattgtgtgatgaaagagtccactctggctgcagtgaaggttgtcgcaggataggcaggtacgggggtgtttttgataaatatctggggaggcggatgtttcagtccaaaaccgccaattagcggtgaaggatgaaaatgtccgtccgcgtgtgggatcttggcccaaattggcccttggtagtaaatgtctctgttttgccacaccatgccaggaagcactcccatagcagtcacgttgccggttatgggagcagttgtagcattctgattattgtcagcaatctgaccaaacatgtccgtgtctcttgggttggtggcagcaatttcttcttctgatgtaaacaacagattgtttgctgaggttgttgtgtttccggtgactgatggtccagggaagatgagctgggcgttgctgaagtccccatctgaaggtccagctgttgccattggaggtccaggcgctatgttgctccagcggttgtttaaggtatagtgggtgtcatactttaacagagcgttgcccccgctggcaggaatcttgtaattttgactggcagtttttgagaatctctgctgtttaacacaaggcccaggcagccagttctttctgtaaaaggcaaagtctccactcctgatttttccaaatgtggttgctgcattgccttgattcagagtctctccagaggtggtcgactgtaagtgccacaggtactggtccaggaggggattcatcagtccgtccaggctctggctgtgagcatacattgagtggaacggcaccttctcaaagttgtaagccgtttcaaagttattgccagttctcagcatttgtgaaggaaaatactccaggcagtagaaagcatttctgtccgtctggttctgattttcgccagtcacaatgccacagtagccatattgaggcaccatgaagacgtcattggggaaaggaggcagacttccctcttgtccagcgtccatcacgtacgggagctcatacgacgagtccgcaaatatctgaaccgtgctggtaaggttattagcgaccgtagtctcgccgttcgacgttgtgacctccttaacttggatattgaagattttaacgcgcatggcttttggtcgtagtccccagttgttgttgatgagtctttgccagtcacgtggtgagaagtgacagtggaatctgttaaagtcaaagtatccccagggggtggagaatccgttgtaggtgttgctgtttgatgttgttccgagccgcaggtacaagtggttgttgtaggtgggcaagacccaggttctggtcgaggttgttgtgaccttgccctcagaccaggtggaatcgcaatgccaatcacccgaggcattacccactccatcggaaccttgtcccgcatcgacagcatttccgcccggtgctgcacgcatttcaatgtctgaagacatggcgctggtatctgatccttcagggggtccgtctccggctccagtgtcctcttcaaagttgagtctctttttggctggttgtttgccttttttgccgattcctgaggaggagtcgggctcttgtggtgactctaacggtctcttctttccaggagccgtcttagcaccttcttcaaccaggcccagaggttcgagtaccctcttcttggcctggaagactgctcgcccgaggttgcccccaaaagacgtatcttcttgcagacgctcctgaaactcggcgtcggcgtggttataccgcaggtacggattgtcacccgctttgagctgctggtcgtaggccttgtcgtgctcgagggccgctgcgtccgccgcgttgacgggctcccccttgtcgagtccgttgaagggtccgaggtactcgtagccaggaagcaccagaccccggccgtcgtcctgcttctgctggttggccttgggcttgggggctccaggtttcaggtcccaccactcgcgaatgccctcagagaggttgtcctcgagccaatctggaagataaccgtcagcagccatacctggtttaagtcatttattgctcagaaacacagtcatccaagtccacgttgacgagatcgcaggccgaacacgcaatctcgggtgcccgccccagcagatgatgaatcgcgcacagtttctgatacgtcttttttctgacgacgggttgagattctgacgcgccggggaagcactctgagcagtctctgaccccgtgcgtgaagcagacgttgaaattctgattcattctctcgcatgtcttgcagggaaacagcatctgaagcatgcccgcgtgacgagaacatttgttttggtacctgtccgcaaggtccaccggtgcttccgcgtctgacgtcgatggctccgcaactgaggggcaggcccgcttgggctcgcttatatccgcgtcactgggggcgggtcttttggtggctccgccctttctgacgtagaactcatgcgccacctcagtcacgtgatcctgagcccagcggaagaactctttgacttcctgcttggtcaccttgccaaagtcgtgctccagacggcgggtgagctcgaacttgaacatgcggtcctgcagcggctgctggtgctcgaaggtggtgctgttcccgtcgatcacggcgcacatgttggtgttggaggtgacgatcacgggcgtggggtcgatctgggccgatgacttgcacttttggtccacgcgcaccttgcttccgcccagaatggccttggcggactccacgaccttggcggtcatcttgccctcctcccaccagatcaccatcttgtcgacgcaatcgttgaagggaaagttctcattggtccagttgacgcagcaagggcgaattc

SEQ ID NO: 427 - protein, 729 aa, Artificial Sequence
  Description of Artificial Sequence: Synthetic polypeptide
MAADGYLPDWLEDNLSEGIREWWDLKPGAPKPKANQQKQDDGRGLVLPGYKYLGPFNGLDKGEPVNAADAAALEHDKAYDQQLKAGDNPYLRYNHADAEFQERLQEDTSFGGNLGRAVFQAKKRVLEPLGLVEEGAKTAPGKKRPIDSPDSSTGIGKKGQQPAKKKLNFGQTGDSESVPDPQPLGEPPAAPSSVGSGTMAAGGGAPMADNNEGADGVGNASGNWHCDSTWLGDRVITTSTRTWALPTYNNHLYKQISSSSSGATNDNHYFGYSTPWGYFDFNRFHCHFSPRDWQRLINNNWGFRPKKLRFKLFNIQVKEVTTNDGVTTIANNLTSTVQVFSDSEYQLPYVLGSAHQGCLPPFPADVFMIPQYGYLTLNNGSQSVGRSSFYCLEYFPSQMLRTGNNFEFSYSFEDVPFHSSYAHSQSLDRLMNPLIDQYLYYLARTQSTTGSTRELQFHQAGPNTMAEQSKNWLPGPCYRQQGLSKNLDFNNNSNFAWTAATKYHLNGRNSLTNPGIPMATNKDDEDQFFPINGVLVFGKTGAANKTTLENVLMTSEEEIKTTNPVATEEYGVVSSNLQPSTAGPQSQTINSQGALPGMVWQNRDVYLQGPIWAKIPHTDGNFHPSPLMGGFGLKHPPPQILIKNTPVPANPPEVFTPAKFASFITQYSTGQVSVEIEWELQKENSKRWNPEIQYTSNYAKSNNVEFAVNPDGVYTEPRPIGTRYLPRNL

SEQ ID NO: 428 - DNA, 3094 bp, Adeno-associated virus
gaattcgcccttgctgcgtcaactggaccaagagaactttcccttcaacgattgcgtcgacaagatggtgatctggtgggaggagggcaagatgacggccaaggtcgtggagtccgccaaagccattctgggcggaagcaaggtgcgcgtcgaccaaaagtgcaagtcctcggcccagatcgatcccacccccgtgatcgtcacctccaacaccaacatgtgcgccgtgatcgacgggaacagcaccaccttcgagcaccagcagccgttgcaggaccggatgttcaaatttgaactcacccgccgtctggaacacgactttggcaaggtgaccaagcaggaagtcaaagagttcttccgctgggctagtgatcacgtgactgaggtgacgcatgagttctacgtcagaaagggcggagccagcaaaagacccgcccccgatgacgcggatataagcgagcccaagcgggcctgtccctcagtcacggacccatcgacgtcagacgcggaaggagctccggtggactttgccgacaggtaccaaaacaaatgttctcgtcacgcgggcatgcttcagatgctgtttccctgcaaaacgtgcgagagaatgaatcagaatttcaacatttgcttcacgcacggggtcagagactgtttagaatgtttccccggcgtgtcagaatctcaaccggtcgtcagaaaaaagacgtatcggaagctgtgtgcgattcatcatctgctggggcgggcacccgagattgcttgctcggcctgcgacctggtcaacgtggacctggacgactgtgtttctgagcaataaatgacttaaaccgggtatggctgccgatggttatcttccagattggctcgaggacaacctctctgagggcattcgcgagtggtgggacctgaaacctggagccccgaaacccaaagccaaccagcaaaagcaggacgacggccggggtctggtgcttcctggctacaagtacctcggacccttcaacggactcgacaagggggagcccgtcaacgcggcggacgcagcggccctcgagcacgacaaggcctacgaccagcagctcaaagcgggtgacaatccgtacctgcggtataaccacgccgacgccgagtttcaggagcgtctgcaagaagatacgtcatttgggggcaacctcgggcgagcagtcttccaggccaagaagcgggttctcgaacctctcggtctggttgaggaaggcgctaagacggctcctggaaagaagagacccatagactctccagactcctccacgggcatcggcaaaaaaggccagcagcccgctaaaaagaagctcaattttggtcagactggcgactcagagtcagtccccgaccctcaacctcttggagaacctccagcagcgccctctagtgtgggatctggtacaatggctgcaggcggtggcgcaccaatggcagacaataacgaaggtgccgacggagtgggtaatgcctcaggaaattggcattgcgattccacatggctgggcgacagagtcatcaccaccagcaccagaacctgggccctccccacctacaacaaccacctctacaagcaaatctccagcagcagctcaggagccaccaatgacaaccactacttcggctacagcaccccctgggggtattttgactttaacagattccactgccacttctcaccacgtgactggcagcgactcatcaacaacaactggggattccggcccaagaagctgcggttcaagctcttcaacatccaggtcaaggaggtcacaacgaatgacggcgtcacgaccatcgctaataaccttaccagcacggttcaggtcttctcggactcggaataccagctgccgtacgtcctcggctctgcgcaccagggctgcctgcctccgttcccggcggacgtcttcatgattcctcagtacggctacctgactctgaacaacggcagccaatcggtgggccgttcctccttctactgcctggaatatttcccctctcaaatgctgagaacgggcaacaactttgagttcagttacagcttcgaggacgtgcctttccacagcagctacgcgcacagccagagcctagaccggctgatgaaccctctcatcgaccagtacctgtactacctggcccggacccagagcaccacgggttccaccagggaactgcaatttcatcaagctgggcccaatactatggccgagcagtcaaagaactggctgcctggaccctgctataggcaacagggactgtcaaagaacttggactttaacaacaacagcaattttgcctggactgctgccactaaatatcatctgaatggcagaaactctttgaccaatcctggcattcccatggcaaccaacaaggatgatgaggaccagttctttcccatcaacggggtactggtttttggcaagacgggagctgccaacaaaactacgctggaaaacgttctgatgaccagcgaggaggagatcaagaccactaaccctgtggctacagaagaatacggtgtggtctccagcaacctgcagccgtctacagccgggcctcaatcacagactatcaacagccagggagcactgcctggcatggtctggcagaaccgggacgtgtatctgcagggtcccatctgggccaaaattcctcacacggatggcaactttcacccgtctcctctgatgggcggttttggactcaaacacccgcctccacagatcctgatcaaaaacacacctgtacctgctaatcctccggaggtgtttactcctgccaagtttgcctccttcatcacgcagtacagcaccggacaagtcagcgtggaaatcgagtgggagctgcagaaagaaaacagcaagcgctggaacccagaaattcagtatacttccaattatgccaagtctaataatgttgaatttgctgtgaaccctgatggtgtttatactgagcctcgccccattggcactcgttacctcccccgtaatctgtaattgcttgttaatcaataaaccggttgattcgtttcagttgaactttggtctctgcgaagggcgaattc

SEQ ID NO: 429 - protein, 1458 aa, Artificial Sequence
  Description of Artificial Sequence: Synthetic polypeptide
MAADGYLPDWLEDNLSEGIREWWDLKPGAPKPKANQQKQDDGRGLVLPGYKYLGPFNGLDKGEPVNAADAAALEHDKAYDQQLKAGDNPYLRYNHADAEFQERLQEDTSFGGNLGRAVFQAKKRVLEPLGLVEEGAKTAPGKKRPIDSPDSSTGIGKKGQQPAKKKLNFGQTGDSESVPDPQPLGEPPAAPSSVGSGTMAAGGGAPTADNNEGADGVGNASGNWHCDSTWLGDRVITTSTRTWALPTYNNHLYKQISSSSSGATNDNHYFGYSTPWGYFDFNRFHCHFSPRDWQRLINNNWGFRPKKLRFKLFNIQVKEVTTNDGVTTIANNLTSTVQVFSDSEYQLPYVLGSAHQGCLPPFPADVFMIPQYGYLTLNNGSQSVGRSSFYCLEYFPSQMLRTGNNFEFSYSFEDVPFHSSYAHSQSLDRLMNPLIDQYLYYLARTQSTTGSTRELQFHQAGPNTMAEQSKNWLPGPCYRQQRLSKNLDFNNNSNFAWTAATKYHLNGRNSLTNPGIPMATNKDDEDQFFPINGVLVFGKTGAANKTTLENVLMTSEEEIKTTNPVATEEYGVVSSNLQSSTAGPQSQTINSQGALPGMVWQNRDVYLQGPIWAKIPHTDGNFHPSPLMGGFGLEHPPPQILIKNTPVPANPPEVFTPAKFASFITQYSTGQVSVEIEWELQKENSKRWNPEIQYTSNYAKSNNVEFAVNPDGVYTEPRPIGTRYLTRNLMAADGYLPDWLEDNLSEGIREWWDLKPGAPKPKANQQKQDDGRGLVLPGYKYLGPFNGLDKGEPVNAADAAALEHDKAYDQQLKAGDNPYLRYNHADAEFQERLQEDTSFGGNLGRAVFQAKKRVLEPLGLVEEGAKTAPGKKRPIGSPDSSTGIGKKGQQPAKKKLNFGQTGDSESVPDPQPLGEPPAAPSSVGSGTMAAGGGAPMADNNEGADGVGNASGNWHCDSTWLGDRVITTSTRTWALPTYNNHLYKQISSSSSGATNDNHYFGYSTPWGYFDFNRFHCHFSPRDWQRLINNNWGFRPKKLRFKLLNIQVKEVTTNDGVTTIANNLTSTVQVFSDSEYQLPYVLGSAHQGCLPPFPADVFMIPQYGYLTLDNGSQSVGRSSFYCLEYFPSQMLRTGNNFEFSYSFEDVPFHSSYAHSQSLDRLMNPLIDQYLYYLARTQSTTGSTRELQFHQAGPNTMAEQSKNWLPGPCYRQQRLSKNLDFNNNSNFAWTAATKYHLNGRNSLTNPGIPMATNKDDEDQFFPINGVLVFGKTGAANKTTLENVLMTSEEEIKTTNPVATEEYGVVSSNLQSSTAGPQSQTINSQGALPGMVWQNRDVYLQGPIWAKIPHTDGNFHPSPLMGGFGLKHPPPQILIKNTPVPANPPEVFTPAKFASFITQYSTGQVSVEIEWELQKENSKRWNPEIQYTSNYAKSNNVEFAVNPDGVYTEPRPIGTRYLTRNL

SEQ ID NO: 430 - DNA, 3095 bp, Adeno-associated virus
gaattcgcccttcgcagagaccaaagttcaactgaaacgaatcaaccggtttattgattaacaagcaattacagattacgggtgaggtaacgagtgccaatggggcgaggctcagtataaacaccatcagggttcacagcaaattcaacattattagacttggcataattggaagtatactgaatttctgggttccagcgcttgctgttttctttctgcagctcccactcgatttccacgctgacttgtccggtgctgtactgcgtgatgaaggaggcaaacttggcaggagtaaacacctccggaggattagcaggtacaggtgtgtttttgatcaggatctgtggaggcgggtgtttgagtccaaaaccgcccatcagaggagacgggtgaaagttgccatccgtgtgaggaattttggcccagatgggaccctgcagatacacgtcccggttctgccagaccatgccaggcagtgctccctggctgttgatagtctgtgattgaggcccggctgtagacgactgcaggttgctggagaccacaccgtattcttctgtagccacagggttagtggtcttgatctcctcctcgctggtcatcagaacgttttccagcgtagttttgttggcagctcccgtcttgccaaaaaccagtaccccgttgatgggaaagaactggtcctcatcatccttgttggttgccatgggaatgccaggattggtcaaagagtttctgccattcagatgatatttagtggcagcagtccaggcaaaattgctgttgttgttaaagtccaagttctttgacagtctctgttgcctatagcagggtccaggcagccagttctttgactgctcggccatagtattgggcccagcttgatgaaattgcagttccctggtggaacccgtggtgctctgggtccgggccaggtagtacaggtactggtcgatgagagggttcatcagccggtctaggctctggctgtgcgcgtagctgctgtggaaaggcacgtcctcgaagctgtaactgaactcaaagttgttgcccgttctcagcatttgagaggggaaatattccaggcagtagaaggaggaacggcccaccgattggctgccgttgtccagagtcaggtagccgtactgaggaatcatgaagacgtccgccgggaacggaggcaggcagccctggtgcgcagagccgaggacgtacggcagctggtattccgagtccgagaagacctgaaccgtgctggtaaggttattagcgatggtcgtgacgccgtcattcgttgtgacctccttgacctggatgttgaggagcttgaaccgcagcttcttgggccggaatccccagttgttgttgatgagtcgctgccagtcacgtggtgagaagtggcagtggaatctgttaaagtcaaaatacccccagggggtgctgtagccgaagtagtggttgtcattggtggctcctgagctgctgctggagatttgcttgtagaggtggttgttgtaggtggggagggcccaggttctggtgctggtggtgatgactctgtcgcccagccatgtggaatcgcaatgccaatttcctgaggcattacccactccgtcggcaccttcgttattgtctgccattggtgcgccaccgcctgcagccattgtaccagatcccacactagagggcgctgctggaggttctccaagaggttgagggtcggggactgactctgagtcgccagtctgaccaaaattgagcttctttttagcgggctgctggccttttttgccgatgcccgtggaggagtctggagagcctatgggtctcttctttccaggagccgtcttagcgccttcctcaaccagaccgagaggttcgagaacccgcttcttggcctggaagactgctcgcccgaggttgcccccaaatgacgtatcttcttgcagacgctcctgaaactcggcgtcggcgtggttataccgcaggtacggattgtcacccgctttgagctgctggtcgtaggccttgtcgtgctcgagggccgctgcgtccgccgcgttgacgggctcccccttgtcgagtccgttgaagggtccgaggtacttgtagccaggaagcaccagaccccggccgtcgtcctgcttttgctggttggctttgggtttcggggctccaggtttcaggtcccaccactcgcgaatgccctcagagaggttgtcctcgagccaatctggaagataaccatcggcagccatacctggtttaagtcatttattgctcagaaacacagtcgtccaggtccacgttgaccaggtcgcaggccgagcaagcaatctcgggtgcccgccccagcagatgatgaatcgcacacagcttccgatacgtcttttttctgacgaccggttgagattctgacacgccggggaaacattctaaacagtctctgaccccgtgcgtgaagcaaatgttgaaattctgattcattctctcgcacgttttgcagggaaacagcacctgaagcatgcccgcgtgacgagaacatttgttttggtacctgtcggcaaagtccaccggagctccttccgcgtctgacgtcgatgggtccgtgactgagggacgggcccgcttgggctcgcttatatccgcgtcatcgggggcgggtcttttgctggctccgccctttctgacgtagaactcatgcgtcacctcagtcacgtgatcactagcccagcggaagaactctttgacttcctgctttgtcaccttgccaaagtcgtgttccagacggcgggtgagttcaaatttgaacatccggtcctgcaacggttgctggtgctcgaaggtggtgctgttcccgtcgatcacggcgcacatgttggtgttggaggtgacgatcacgggggtgggatcgatctgggcggacgacttgcacttttggtccacgcgcaccttgctgccgccgagaatggccttggcggactccacgaccttggccgtcatcttgccctcctcccaccagatcaccatcttgtcgacgcaatcgttgaagggaaagttctcattggtccagttgacgcagcaagggcgaattc

SEQ ID NO: 431 - DNA, 3095 bp, Adeno-associated virus
gaattcgcccttcgcagagaccaaagttcaactgaaacgaatcaaccggtttattgattaacaagcaattacagattacgggtgaggtaacgagtgccaatggggcgaggctcagtataaacaccatcagggttcacagcaaattcaacattattagacttggcataattggaagtatactgaatttctgggttccagcgcttgctgttttctttctgcagctcccactcgatttccacgctgacttgtccggtgctgtactgcgtgatgaaggaggcaaacttggcaggagtaaacacctccggaggattagcaggtacaggtgtgtttttgatcaggatctgtggaggcgggtgttcgagtccaaaaccgcccatcagaggagacgggtgaaagttgccatccgtgtgaggaattttggcccagatgggaccctgcagatacacgtcccggttctgccagaccatgccaggcagtgctccctggctgttgatagtctgtgattgaggcccggctgtagacgactgcaggttgctggagaccacaccgtattcttctgtagccacagggttagtggtcttgatctcctcctcgctggtcatcagaacgttttccagcgtagttttgttggcagctcccgtcttgccaaaaaccagtaccccgttgatgggaaagaactggtcctcatcatccttgttggttgccatgggaatgccaggattggtcaaagagtttctgccattcagatgatatttagtggcagcagtccaggcaaaattgctgttgttgttaaagtccaagttctttgacagtctctgttgcctatagcagggtccaggcagccagttctttgactgctcggccatagtattgggcccagcttgatgaaattgcagttccctggtggaacccgtggtgctctgggtccgggccaggtagtacaggtactggtcgatgagagggttcatcagccggtctaggctctggctgtgcgcgtagctgctgtggaaaggcacgtcctcgaagctgtaactgaactcaaagttgttgcccgttctcagcatttgagaggggaaatattccaggcagtagaaggaggaacggcccaccgattggctgccgttgttcagagtcaggtagccgtactgaggaatcatgaagacgtccgccgggaacggaggcaggcagccctggtgcgcagagccgaggacgtacggcagctggtattccgagtccgagaagacctgaaccgtgctggtaaggttattagcgatggtcgtgacgccgtcattcgttgtgacctccttgacctggatgttgaagagcttgaaccgcagcttcttgggccggaatccccagttgttgttgatgagtcgctgccagtcacgtggtgagaagtggcagtggaatctgttaaagtcaaaatacccccagggggtgctgtagccgaagtagtggttgtcattggtggctcctgagctgctgctggagatttgcttgtagaggtggttgttgtaggtggggagggcccaggttctggtgctggtggtgatgactctgtcgcccagccatgtggaatcgcaatgccaatttcctgaggcattacccactccgtcggcaccttcgttattgtctgccgttggtgcgccaccgcctgcagccattgtaccagatcccacactagagggcgctgctggaggttctccaagaggttgagggtcggggactgactctgagtcgccagtctgaccaaaattgagcttctttttagcgggctgctggccttttttgccgatgcccgtggaggagtctggagagtctatgggtctcttctttccaggagccgtcttagcgccttcctcaaccagaccgagaggttcgagaacccgcttcttggcctggaagactgctcgcccgaggttgcccccaaatgacgtatcttcttgcaggcgctcctgaaactcggcgtcggcgtggttataccgcaggtacggattgtcacccgctttgagctgctggtcgtaggccttgtcgtgctcgagggccgctgcgtccgccgcgttgacgggctcccccttgtcgagtccgttgaagggtccgaggtacttgtagccaggaagcaccagaccccggccgtcgtcctgcttttgctggttggctttgggtttcggggctccaggtttcaggtcccaccactcgcgaatgccctcagagaggttgtcctcgagccaatctggaagataaccatcggcagccatacctggtttaagccatttattgctcagaaacacagtcgtccaggtccacgttgaccaggtcgcaggccgagcaggcaatctcgggtgcccgccccagcagatgatgaatcgcacacagcttccgatacgtcttttttctgacgaccggttgagattctgacacgccggggaaacattctaaacagtctctgaccccgtgcgtgaagcaaatgttgaaattctgattcattctctcgcacgttttgcagggaaacagcatctgaagcatgcccgcgtggcgagaacatttgttttggtacctgtcggcaaagtccaccggagctccttccgcgtctgacgtcgatgggtccgtgactgagggacaggcccgcttgggctcgcttatatccgcgtcatcgggggcgggtcttttgctggctccgccctttctgacgtagaactcatgcgtcacctcagtcacgtgatcactagcccagcggaagaactctttgacttcctgctttgtcaccttgccaaagtcgtgttccagacggcgggtgagttcaaatttgaacatccggtcctgcaacggctgctggtgctcgaaggtggtgctgttcccgtcgatcacggcgcgcatgttggtgttggaggtgacgatcacgggggtgggatcgatctgggcggacgacttgcacttttggtccacgcgcaccttgctgccgccgagaatggccttggcggactccacgaccttggccgtcatcttgccctcctcccaccagatcaccatcttgtcgacgcaatcgttgaagggaaagttctcattggtccagttgacgcagcaagggcgaattc

SEQ ID NO: 432 - protein, 729 aa, Adeno-associated virus; identical to SEQ ID NO: 160

SEQ ID NO: 433 - protein, 729 aa, Adeno-associated virus
MAADGYLPDWLEDNLSEGIREWWDLKPGAPKPKANQQKQDDGRGLVLPGYKYLGPFNGLDKGEPVNAADAAALEHDKAYDQQLKAGDNPYLRYNHADAEFQERLQEDTSFGGNLGRAVFQAKKRVLEPLGLVEEGAKTAPGKKRPIDSPDSSTGIGKKGQQPAKKKLNFGQTGDSESVPDPQPLGEPPAAPSSVGSGTMAAGGGAPTADNNEGADGVGNASGNWHCDSTWLGDRVITTSTRTWALPTYNNHLYKQISSSSSGATNDNHYFGYSTPWGYFDFNRFHCHFSPRDWQRLINNNWGFRPKKLRFKLFNIQVKEVTTNDGVTTIANNLTSTVQVFSDSEYQLPYVLGSAHQGCLPPFPADVFMIPQYGYLTLNNGSQSVGRSSFYCLEYFPSQMLRTGNNFEFSYSFEDVPFHSSYAHSQSLDRLMNPLIDQYLYYLARTQSTTGSTRELQFHQAGPNTMAEQSKNWLPGPCYRQQRLSKNLDFNNNSNFAWTAATKYHLNGRNSLTNPGIPMATNKDDEDQFFPINGVLVFGKTGAANKTTLENVLMTSEEEIKTTNPVATEEYGVVSSNLQSSTAGPQSQTINSQGALPGMVWQNRDVYLQGPIWAKIPHTDGNFHPSPLMGGFGLKHPPPQILIKNTPVPANPPEVFTPAKFASFITQYSTGQVSVEIEWELQKENSKRWNPEIQYTSNYAKSNNVEFAVNPDGVYTEPRPIGTRYLTRNL

SEQ ID NO: 434 - protein, 729 aa, Adeno-associated virus
MAADGYLPDWLEDNLSEGIREWWDLKPGAPKPKANQQKQDDGRGLVLPGYKYLGPFNGLDKGEPVNAADAAALEHDKAYDQQLKAGDNPYLRYNHADAEFQERLQEDTSFGGNLGRAVFQAKKRVLEPLGLVEEGAKTAPGKKRPIDSPDSSTGIGKKGQQPAKKKLNFGQTGDSESVPDPQPLGEPPAAPSSVGSGTMAAGGGAPMADNNEGADGVGNASGNWHCDSTWLGDRVITTSTRTWALPTYNNHLYKQISSSSSGATNDNHYFGYSTPWGYFDFNRFHCHFSPRDWQRLINNNWGFRPKKLRFKLFNIQVKEVTTNDGVTTIANNLTSTVQVFSDSEYQLPYVLGSAHQGCLPPFPADVFMIPQYGYLTLNNGSQSVGRSSFYCLEYFPSQMLRTGNNFEFSYSFEDVPFHSSYAHSQSLDRLMNPLIDQYLYYLARTQSTTGSTRELQFHQAGPNTMAEQSKNWLPGPCYRQQRLSKNLDFNNNSNFAWTAATKYHLNGRNSLTNPGIPMATNKDDEDQFFPINGVLVFGKTGAANKTTLENVLMTSEEEIKTTNPVATEEYGVVSSNLQSSTAGPQSQTINSQGALPGMVWQNRDVYLQGPIWAKIPHTDGNFHPSPLMGGFGLKHPPPQILIKNTPVPANPPEVFTPAKFASFITQYSTGQVSVEIEWELQKENSKRWNPEIQYTSNYAKSNNVEFAVNPDGVYTEPRPIGTRYLTRNL

SEQ ID NO: 435 - DNA, 2217 bp, Adeno-associated virus
atggctgctgacggttatcttccagattggctcgaggacaacctctctgagggcattcgcgagtggtgggacctgaaacctggagcccccaagcccaaggccaaccagcagaagcaggacgacggccggggtctggtgcttcctggctacaagtacctcggacccttcaacggactcgacaagggggagcccgtcaacgcggcggacgcagcggccctcgagcacgacaaggcctacgaccagcagctcaaagcgggtgacaatccgtacctgcggtataaccacgccgacgccgagtttcaggagcgtctacaagaagatacgtcttttgggggcaacctcgggcgagcagtcttccaggccaagaagcgggttctcgaacctctcggtctggttgaggaagctgctaagacggctcctggaaagaagagaccggtagaaccgtcacctcagcgttcccccgactcctccacgggcatcggcaagaaaggccagcggcccgctaaaaagagactgaactttggtcagactggcgactcagagtcagtccccgaccctcaaccaatcggagaaccaccagcaggcccctctggtctgggatctggtacaatggctgcaggcggtggcgctccaatggcagacaataacgaaggcgccgacggagtgggtagttcctcaggaaattggcattgcgattccacatggctgggcgacagagtcatcaccaccagcacccgaacctgggccctgcccacctacaacaaccacctctacaagcaaatatccaatgggacatcgggaggaagcaccaacgacaacacctacttcggctacagcaccccctgggggtattttgacttcaacagattccactgccacttctcaccacgtgactggcagcgactcatcaacaacaactggggattccggccaaaaagactcagcttcaagcccttcaacatccaggtcaaggaggtcacgcagaatgaaggcaccaagaccatcgccaataaccttaccagcacgattcaggtatttacggactcggaataccagctgccgtacgtcctcggctccgcgcaccagggctgcctgcctccgttcccggcggacgtcttcatgattccccagtacggctaccttacactgaacaatggaagtcaagccgtaggccgttcctccttctactgcctggaatattttccatctcaaatgctgcgaactggaaacaattttgaattcagctacaccttcgaggacgtgcctttccacagcagctacgcacacagccagagcttggaccgactgatgaatcctctcatcgaccagtacctgcactacttatccagaactcagtccacaggaggaactcaaggtacccagcaattgttattttctcaagctgggcctgcaaacatgtcggctcaggctaagaactggctacctggaccttgctaccggcagcagcgagtctctacgacactgtcgcaaaacaacaacagcaactttgcttggactggtgccaccaaatatcacctgaacggaagagactctttggtaaatcccggtgtcgccatggcaacccacaaggacgacgaggaacgcttcttcccgtcgagtggagtcctgatgtttggaaaacagggtgctggaagagacaatgtggactacagcagcgttatgctaaccagcgaagaagaaattaaaaccactaaccctgtagccacagaacaatacggtgtggtggctgacaacttgcagcaaaccaatacagggcctattgtgggaaatgtcaacagccaaggagccttacctggcatggtctggcagaaccgagacgtgtacctgcagggtcccatctgggccaagattcctcacacggacggcaacttccacccttcaccgctaatgggaggatttggactgaagcacccacctcctcagatcctgatcaagaacacgccggtacctgcggatcctccaacaacgttcagccaggcgaaattggcttccttcattacgcagtacagcaccggacaggtcagcgtggaaatcgagtgggagctgcagaaggagaacagcaaacgctggaacccagagattcagtacacttcaaactactacaaatctacaaatgtggactttgctgtcaatacagagggaacttattctgagcctcgccccattggtactcgctacctcacccgtaatctgtaa

SEQ ID NO: 436 - protein, 738 aa, Adeno-associated virus
MAADGYLPDWLEDNLSEGIREWWDLKPGAPKPKANQQKQDDGRGLVLPGYKYLGPFNGLDKGEPVNAADAAALEHDKAYDQQLKAGDNPYLRYNHADAEFQERLQEDTSFGGNLGRAVFQAKKRVLEPLGLVEEAAKTAPGKKRPVEPSPQRSPDSSTGIGKKGQRPAKKRLNFGQTGDSESVPDPQPIGEPPAGPSGLGSGTMAAGGGAPMADNNEGADGVGSSSGNWHCDSTWLGDRVITTSTRTWALPTYNNHLYKQISNGTSGGSTNDNTYFGYSTPWGYFDFNRFHCHFSPRDWQRLINNNWGFRPKRLSFKPFNIQVKEVTQNEGTKTIANNLTSTIQVFTDSEYQLPYVLGSAHQGCLPPFPADVFMIPQYGYLTLNNGSQAVGRSSFYCLEYFPSQMLRTGNNFEFSYTFEDVPFHSSYAHSQSLDRLMNPLIDQYLHYLSRTQSTGGTQGTQQLLFSQAGPANMSAQAKNWLPGPCYRQQRVSTTLSQNNNSNFAWTGATKYHLNGRDSLVNPGVAMATHKDDEERFFPSSGVLMFGKQGAGRDNVDYSSVMLTSEEEIKTTNPVATEQYGVVADNLQQTNTGPIVGNVNSQGALPGMVWQNRDVYLQGPIWAKIPHTDGNFHPSPLMGGFGLKHPPPQILIKNTPVPADPPTTFSQAKLASFITQYSTGQVSVEIEWELQKENSKRWNPEIQYTSNYYKSTNVDFAVNTEGTYSEPRPIGTRYLTRNL

SEQ ID NO: 437 - DNA, 2217 bp, Adeno-associated virus
atggctgctgacggttatcttccagattggctcgaggacaacctctctgagggcattcgcgagtggtgggacctgaaacctggagcccccaagcccaaggccaaccagcagaagcaggacgacggccggggtctggtgcttcctggctacaagtacctcggacccttcaacggactcgacaagggggagcccgtcaacgcggcggacgcagcggccctcgagcacgacaaggcctacgaccagcagctcaaagcgggtgacaatccgtacctgcggtataaccacgccgacgccgagtttcaggagcgtctgcaagaagatacgtcttttgggggcaacctcgggcgagcagtcttccaggccaagaagcgggttctcgaacctctcggtctggttgaggaagctgctaagacggctcctggaaagaagagaccggtagaaccgtcacctcagcgttcccccgactcctccacgggcatcggcaagaaaggccagcagcccgctaaaaagagactgaactttggtcagactggcgactcagagtcagtccccgaccctcaaccaatcggagaaccaccagcaggcccctctggtctgggatctggtacaatggctgcaggcggtggcgctccaatggcagacaataacgaaggcgccgacggagtgggtagttcctcaggaaattggcattgcgattccacatggctgggcgacagagtcatcaccaccagcacccgaacctgggccctgcccacctacaacaaccacctctacaagcaaatatccaatgggacatcgggaggaagcaccaacgacaacacctacttcggctacagcaccccctgggggtattttgacttcaacagattccactgccacttctcaccacgtgactggcagcgactcatcaacaacaactggggattccggccaaaaagactcagcttcaagctcttcaacatccaggtcaaggaggtcacgcagaatgaaggcaccaagaccatcgccaataaccttaccagcacgattcaggtatttacggactcggaataccagctgccgtacgtcctcggctccgcgcaccagggctgcctgcctccgttcccggcggacgtcttcatgattccccagtacggctaccttacactgaacaatggaagtcaagccgtaggccgttcctccttctactgcctggaatattttccatctcaaatgctgcgaactggaaacaattttgaattcagctacaccttcgaggacgtgcctttccacagcagctacgcacacagccagagcttggaccgactgatgaatcctctcatcgaccagtacctgtactacttatccagaactcagtccacaggaggaactcaaggtacccagcaattgttattttctcaagctgggcctgcaaacatgtcggctcaggctaagaactggctacctggaccttgctaccggcagcagcgagtctctacgacactgtcgcaaaacaacaacagcaactttgcttggactggtgccaccaaatatcacctgaacggaagagactctttggtaaatcccggtgtcgccatggcaacccacaaggacgacgaggaacgcttcttcccgtcgagtggagtcctgatgtttggaaaacagggtgctggaagagacaatgtggactacagcagcgttatgctaaccagcgaagaagaaattaaaaccactaaccctgtagccacagaacaatacggtgtggtggctgataacttgcagcaaaccaatacggggcctattgtgggaaatgtcaacagccaaggagccttacctggcatggtctggcagaaccgagacgtgtacctgcagggtcccatctgggccaagattcctcacacggacggcaacttccacccttcaccgctaatgggaggatttggactgaagcacccacctcctcagatcctgatcaagaacacgccggtacctgcggatcctccaacaacgttcagccaggcgaaattggcttccttcattacgcagtacagcaccggacaggtcagcgtggaaatcgagtgggagctgcagaaggagaacagcaaacgctggaacccagagattcagtacacttcaaactactacaaatctacaaatgtggactttgctgtcaatacagagggaacttattctgagcctcgccccattggtactcgttacctcacccgtaatctgtaa

SEQ ID NO: 438 - protein, 738 aa, Adeno-associated virus; identical to SEQ ID NO: 90

SEQ ID NO: 439 - protein, 738 aa, Adeno-associated virus
MAADGYLPDWLEDNLSEGIREWWDLKPGAPKPKANQQKQDDGRGLVLPGYKYLGPFNGLDKGEPVNAADAAALEHDKAYDQQLKAGDNPYLRYNHADAEFQERLQEDTSFGGNLGRAVFQAKKRVLEPLGLVEEAAKTAPGKKRPVEPSPQRSPDSSTGIGKKGQQPAKKRLNFGQTGDSESVPDPQPIGEPPAGPSGLGSGTMAAGGGAPMADNNEGADGVGSSSGNWHCDSTWLGDRVITTSTRTWALPTYNNHLYKQISNGTSGGSTNDNTYFGYSTPWGYFDFNRFHCHFSPRDWQRLINNNWGFRPKRLSFKLFNIQVKEVTQDEGTKTIANNLTSTIQVFTDSEYQLPYVLGSAHQGCLPPFPADVFMIPQYGYLTLNNGSQAVGRSSFYCLEYFPSQMLRTGNNFEFSYTFEDVPFHSSYAHSQSLDRLMNPLIDQYLYYLSRTQSTGGTQGTQQLLFSQAGPANMSARAKNWLPGPCYRQQRVSTTLSQNNNSNFAWTGATKYHLNGRDSLVNPGVAMATHKDDEERFFPSSGVLMFGKQGAGRDNVDYSSVMLTSEEEIKTTNPVATEQYGVVADNLQQANTGPIVGNVNSQGALPGMVWQNRDVYLQGPIWAKIPHTDGNFHPSPLMGGFGLKHPPPQILIKNTPVPADPPTTFSQAKLASFITQYSTGQVSVEIEWELQKENSKRWNPEIQYTSNYYKSTNVDFAVNSEGTYSEPRPIGTRYLTRNL

SEQ ID NO: 440 - DNA, 2217 bp, Adeno-associated virus
atggctgctgacggttatcttccagattggctcgaggacaacctctctgagggcattcgcgagtggtgggacctgaaacctggagcccccaagcccaaggccaaccagcagaagcaggacgacggccggggtctggtgcttcctggctacaagtacctcggacccttcaacggactcgacaagggggagcccgtcaacgcggcggacgcagcggccctcgagcacgacaaggcctacgaccagcagctcaaagcgggtgacaatccgtacctgcggtataaccacgccgacgccgagtttcaggagcgtctgcaagaagatacgtcttttgggggcaacctcgggcgagcagtcttccaggccaagaagcgggttctcgaacctctcggtctggttgaggaagctgctaagacggctcctggaaagaagagaccggtagaaccgtcacctcagcgttcccccgactcctccacgggcatcggcaagaaaggccagcagcccgctaaaaagagactgaactttggtcagactggcgactcagagtcagtccccgaccctcaaccaatcggagaaccaccagcaggcccctctggtctgggatctggtacaatggctgcaggcggtggcgctccaatggcagacaataacgaaggcgccgacggagtgggtagttcctcaggaaattggcattgcgattccacatggctgggcgacagagtcatcaccaccagcacccgaacctgggccctgcccacctacaacaaccacctctacaagcaaatatccaatgggacatcgggaggaagcaccaacgacaacacctacttcggctacagcaccccctgggggtattttgacttcaacagattccactgccacttctcaccacgtgactggcagcgactcatcaacaacaactggggattccggccaaaaagactcagcttcaagctcttcaacatccaggtcaaggaggtcacgcaggatgaaggcaccaagaccatcgccaataaccttaccagcacgattcaggtatttacggactcggaataccagctgccgtacgtcctcggctccgcgcaccagggctgcctgcctccgttcccggcggacgtcttcatgattccccagtacggctaccttacactgaacaatggaagtcaagccgtaggccgttcctccttctactgcctggaatattttccatctcaaatgctgcgaactggaaacaattttgaattcagctacaccttcgaggacgtgcctttccacagcagctacgcacacagccagagcttggaccgactgatgaatcctctcatcgaccagtacctgtactacttatccagaactcagtccacaggaggaactcaaggtacccagcaattgttattttctcaagctgggcctgcaaacatgtcggctcgggctaagaactggctacctggaccttgctaccggcagcagcgagtctctacgacactgtcgcaaaacaacaacagcaactttgcttggactggtgccaccaaatatcacctgaacggaagagactctttggtaaatcccggtgttgctatggcaacgcataaggacgacgaggaacgtttctttccatcgagcggagtcctgatgtttggaaaacagggtgctggaagagacaatgtggactatagcagcgttatgctaaccagcgaggaagaaattaaaaccactaaccctgtagccacagaacaatacggtgtggtggctgacaacttgcagcaagccaatacagggcctattgtgggaaatgtcaacagccaaggagccttacctggcatggtctggcagaaccgagacgtgtacctgcagggtcccatctgggccaaaattcctcacacggacggcaattttcacccgtctcctctgatgggcggctttggactgaagcacccacctccccagatcctgatcaagaatacgccggtacctgcggatcctccaacgacgttcagccaggcaaaattggcttccttcatcacgcagtacagcaccggccaggtcagcgtggagatcgagtgggagctgcagaaggagaacagcaagcgatggaacccagaaattcagtacacttccaactactacaaatctacaaatgtggactttgctgtcaattctgagggtacatattcagagcctcgccccattggtactcgttatctgacacgtaatctgtaa

SEQ ID NO: 441 - DNA, 2211 bp, Adeno-associated virus
atggctgccgatggttatcttccagattggctcgaggacaacctctctgagggcattcgcgagtggtgggacttgaaacctggagccccgaaacccaaagccaaccagcaaaagcaggacgacggccggggcctggtgcttcctggctacaagtacctcggacccttcaacggactcgacaagggggagcccgtcaacgcggcggacgcagcggccctcgagcacgacaaggcctacgaccagcagctcgaagcgggtgacaatccgtacctgcggtataaccacgccgacgccgagtttcaggagcgtctgcaagaagatacgtcttttgggggcaacctcgggcgagcagtcttccaggccaagaagcgggttctcgaacctctcggtctggttgaggaaggcgctaagacggctcctggaaagaagagaccagtagagcagtcaccccaagaaccagactcctcctcgggcatcggcaagaaaggccaacagcccgccagaaaaagactcaattttggccagactggcgactcagagtcagttccagaccctcaacctctcggagaacctccagcagcgccctctggtgtgggacctaatacaatggctgcaggcggtggcgcaccaatggcagacaataacgaaggcgccgacggagtgggtagttcctcgggaaattggcattgcgattccacatggctgggcgacagagtcatcaccaccagcacccgaacctgggccctgcccacctacaacaaccacctctacaagcaaatctccaacgggacatcgggaggagccaccaacgacaacacctacttcggctacagcaccccctgggggtattttgactttaacagattccactgccacttttcaccacgtgactggcagcgactcatcaacaacaactggggattccggcccaagagactcagcttcaagctcttcaacatccaggtcaaggaggtcacgcagaatgaaggcaccaagaccatcgccaataacctcaccagcaccatccaggtgtttacggactcggagtaccagctgccgtacgttctcggctctgcccaccagggctgcctgcctccgttcccggcggacgtgttcatgattccccagtacggctacctaacactcaacaacggtagtcaggccgtgggacgctcctccttctactgcctggaatactttccttcgcagatgctgagaaccggcaacaacttccagtttacttacaccttcgaggacgtgcctttccacagcagctacgcccacagccagagcttggaccggctgatgaatcctctgattgaccagtacctgtactacttgtctcggactcaaacaacaggaggcacggcaaatacgcagactctgggcttcagccaaggtgggcctaatacaatggccaatcaggcaaagaactggctgccaggaccctgttaccgccaacaacgcgtctcaacgacaaccgggcaaaacaacaatagcaactttgcctggactgctgggaccaaataccatctgaatggaagaaattcattggctaatcctggcatcgctatggcaacacacaaagacgacgaggagcgttttttcccagtaacgggatcctgtttttggcaacaaaatgctgccagagacaatgcggattacagcgatgtcatgctcaccagcgaggaagaaatcaaaaccactaaccctgtggctacagaggaatacggtatcgtggcagataacttgcagcagcaaaacacggctcctcaaattggaactgtcaacagccagggggccttacccggtatggtctggcagaaccgggacgtgtacctgcagggtcccatctgggccaagattcctcacacggacggcaacttccacccgtctccgctgatgggcggctttggcctgaaacatcctccgcctcagatcctgatcaagaacacgcctgtacctgcggatcctccgaccaccttcaaccagtcaaagctgaactctttcatcacgcaatacagcaccggacaggtcagcgtggaaattgaatgggagctacagaaggaaaacagcaagcgctggaaccccgagatccagtacacctccaactactacaaatctacaagtgtggactttgctgttaatacagaaggcgtgtactctgaaccccgccccattggcacccgttacctcacccgtaatctgtaa

SEQ ID NO: 442 - protein, 736 aa, Adeno-associated virus
MAADGYLPDWLEDNLSEGIREWWDLKPGAPKPKANQQKQDDGRGLVLPGYKYLGPFNGLDKGEPVNAADAAALEHDKAYDQQLEAGDNPYLRYNHADAEFQERLQEDTSFGGNLGRAVFQAKKRVLEPLGLVEEGAKTAPGKKRPVEQSPQEPDSSSGIGKKGQQPARKRLNFGQTGDSESVPDPQPLGEPPAAPSGVGPNTMAAGGGAPMADNNEGADGVGSSSGNWHCDSTWLGDRVITTSTRTWALPTYNNHLYKQISNGTSGGATNDNTYFGYSTPWGYFDFNRFHCHFSPRDWQRLINNNWGFRPKRLSFKLFNIQVKEVTQNEGTKTIANNLTSTIQVFTDSEYQLPYVLGSAHQGCLPPFPADVFMIPQYGYLTLNNGSQAVGRSSFYCLEYFPSQMLRTGNNFQFTYTFEDVPFHSSYAHSQSLDRLMNPLIDQYLYYLSRTQTTGGTANTQTLGFSQGGPNTMANQAKNWLPGPCYRQQRVSTTTGQNNNSNFAWTAGTKYHLNGRNSLANPGIAMATHKDDEERFFPVTGSCFWQQNAARDNADYSDVMLTSEEEIKTTNPVATEEYGIVADNLQQQNTAPQIGTVNSQGALPGMVWQNRDVYLQGPIWAKIPHTDGNFHPSPLMGGFGLKHPPPQILIKNTPVPADPPTTFNQSKLNSFITQYSTGQVSVEIEWELQKENSKRWNPEIQYTSNYYKSTSVDFAVNTEGVYSEPRPIGTRYLTRNL

SEQ ID NO: 443 - DNA, 2214 bp, Adeno-associated virus
atggctgctgacggttatcttccagattggctcgaggacaacctctctgagggcattcgcgagtggtgggacctgaaacctggagcccccaagcccaaggccaaccagcagaagcaggacgacggccggggtctggtgcttcctggctacaagtacctcggacccttcaacggactcgacaagggggagcccgtcagcgcggcggacgcagcggccctcgagcacgacaaggcctgcgaccagcggctcaaagcgggtgacaatccgtacctgcggtataaccacgccgacgccgagtttcaggagcgtctgcaagaagatacgtcttttgggggcaacctcgggcgagcagtcttccaggccaagaagcgggttctcgaacctctcggtctggttgaggaagctgctaagacggctcctggaaagaagggaccggtagaaccgtcacctcagcgttcccccgactcctccacgggcatcggcaagaaaggccagcagcccgctagaaagagactgaactttgggcagactggcgactcagagtcagtccccgaccctcaaccaatcggagaaccaccagcaggcccctctggtctgggatctggtacaatggctgcaggcggtggcgcaccaatggctgacaataacgagggcgccgacggagtgggtaatgcctcaggaaattggcattgcgattccacatggctgggcgacagagtcatcaccaccagcacccgaacctgggctttgcccacctacaacaatcacctctacaagcaaatctccagtcagtcagcaggtagcaccaacgacaacgtctacttcggctacagcaccccctgggggtattttgacttcaacagattccactgtcacttctcaccacgtgactggcagcggctcatcaacaacaactggggattccggcccaagaagctcaacttcaagctgttcaacatccaggtcaaggaggtcacaacgaatgacggcgtcacgaccatcgccaataaccttaccagcacggttcaggtcttttcggactcggaataccagctgccctacgtcctcggctccgcacaccagggctgcctgcctccgttcccggcggacgtcttcatgattccccagtacggctacctgactctgaacaatggcagccaatcggtgggtcgttcctctttctactgcctggaatatttcccttctcaaatgctgagaacgggcaacaacttcaccttcagctacaccttcgaggacgttcccttccacagcagctacgcacacagccagagcctggaccggctgatgaatcctcttatcgaccagtacctgtattacctggccagaacacagagcaacgcaggaggcacagctggcaatcgggaactgcagttttatcagggcgggcctaccaccatggccgaacaagccaaaaactggctgcctggaccttgcttccggcaacaaagagtctccaagacgctggatcaaaacaacaacagcaactttgcttggactggtgccaccaaataccatctaaatggaagaaattcattggttaatcccggtgtcgccatggcaacccacaaggacgacgaggaacgcttcttcccttcgagcggagtcctgatttttggaaaaactggagcagctaataagactacactggaaaatgtgttaatgacaaatgaagaggaaattcgtcctaccaacccggtagccaccgaggaatacgggactgttagcagcaacctgcaggcggctaacactgcagcccagacacaagttgtcaacaaccagggagccttacctggtatggtctggcagaaccgggacgtgtacctgcagggtcccatctgggccaagattcctcacacggacggcaactttcacccgtctccgctgatgggcggctttggactgaagcatccgcctcctcagatcctgatcaaaaacactcctgttcctgctaatcccccggaggtgtttacgcctgccaagtttgcttctttcatcacacagtacagcaccggccaggtcagcgtggagatcgagtgggagctgcagaaggagaacagcaagcgctggaacccagagattcagtatacctccaattttgacgaacagactggtgtggactttgccgttgacagccagggtgtttattctgagcctcgccccattggtactcgttacctcacccgtaatctgtaa

SEQ ID NO: 444 - protein, 737 aa, Adeno-associated virus
MAADGYLPDWLEDNLSEGIREWWDLKPGAPKPKANQQKQDDGRGLVLPGYKYLGPFNGLDKGEPVSAADAAALEHDKACDQRLKAGDNPYLRYNHADAEFQERLQEDTSFGGNLGRAVFQAKKRVLEPLGLVEEAAKTAPGKKGPVEPSPQRSPDSSTGIGKKGQQPARKRLNFGQTGDSESVPDPQPIGEPPAGPSGLGSGTMAAGGGAPMADNNEGADGVGNASGNWHCDSTWLGDRVITTSTRTWALPTYNNHLYKQISSQSAGSTNDNVYFGYSTPWGYFDFNRFHCHFSPRDWQRLINNNWGFRPKKLNFKLFNIQVKEVTTNDGVTTIANNLTSTVQVFSDSEYQLPYVLGSAHQGCLPPFPADVFMIPQYGYLTLNNGSQSVGRSSFYCLEYFPSQMLRTGNNFTFSYTFEDVPFHSSYAHSQSLDRLMNPLIDQYLYYLARTQSNAGGTAGNRELQFYQGGPTTMAEQAKNWLPGPCFRQQRVSKTLDQNNNSNFAWTGATKYHLNGRNSLVNPGVAMATHKDDEERFFPSSGVLIFGKTGAANKTTLENVLMTNEEEIRPTNPVATEEYGTVSSNLQAANTAAQTQVVNNQGALPGMVWQNRDVYLQGPIWAKIPHTDGNFHPSPLMGGFGLKHPPPQILIKNTPVPANPPEVFTPAKFASFITQYSTGQVSVEIEWELQKENSKRWNPEIQYTSNFDEQTGVDFAVDSQGVYSEPRPIGTRYLTRNL

SEQ ID NO: 445 - DNA, 2214 bp, Adeno-associated virus
atggctgccgatggttatcttccagattggctcgaggacaacctctctgagggcattcgcgagtggtgggacctgaaacctggagccccgaaacccaaagccaaccagcaaaagcaggacgacggccggggtctggtgcttcctggctacaagtacctcggacccttcaacggactcgacaagggggagcccgtcaacgcggcggacgcagcggccctcgagcacgacaaggcctacgaccagcagctcaaagcgggtgacaatccgtacctgcggtataaccacgccgacgccgagtttcaggagcgtctgcaagaagatacgtcttttgggggcaacctcgggcgagcagtcttccaggccaagaagcgggttctcgaacctctcggtctggttgaggaagctgctaagacggctcctggaaagaagagaccggtagaaccgtcacctcagcgttcccccgactcctccacgggcatcggcaagaaaggccagcagcccgctagaaagagactgaactttgggcagactggcgactcagagtcagtccccgaccctcaaccaatcggagaaccaccagcaggcccctctggtctgggatctggtacaatggctgcaggcggtggcgctccaatggcagacaataacgaaggcgccgacggagtgggtaatgcctcaggaaattggcattgcgattccacatggctgggcgacagagtcatcaccaccagcacccgaacctgggctttgcccacctacaacaaccacctctacaagcaaatctccagtcagtcagcaggtagcaccaacgacaacgtctacttcggctacagcaccccctgggggtattttgacttcaacagattccactgtcacttctcaccacgtgactggcagcggctcatcaacaacaactggggattccggcccaagaagctcaacttcaagctgttcaacatccaggtcaaggaggtcacaacgaatgacggcgtcacgaccatcgccaataaccttaccagcacggttcaggtcttttcggactcggaataccagctgccctacgtcctcggctccgcacaccagggctgcctgcctccgttcccggcggacgtcttcatgattcctcagtacggctacctgactctcaacaacggtagtcaggccgtgggacgttcctccttctactgcctggagtacttcccctctcagatgctgagaacgggcaacaacttttccttcagctacactttcgaggacgtgcctttccacagcagctacgcgcacagccagagtttggacaggctgatgaatcctctcatcgaccagtacctgtactacctgtcaagaacccagtctacgggaggcacagcgggaacccagcagttgctgttttctcaggccgggcctagcaacatgtcgactcaggccagaaactggctgcctggaccctgctacagacagcagcgcgtctccacgacactgtcgcaaaacaacaacagcaactttgcctggactggtgccaccaagtatcatctgaacggcagagactctctggtgaatccgggcgtcgccatggcaaccaacaaggacgacgaggaccgcttcttcccatccagcggcatcctcatgtttggcaagcagggagctggaaaagacaacgtggactatagcaacgtgatgctaaccagcgaggaagaaatcaagaccaccaaccccgtggccacagaacagtatggcgtggtggctgataacctacagcagcaaaacaccgctcctattgtgggggccgtcaacagccagggagccttacctggcatggtctggcagaaccgggacgtgtacctgcagggtcctatttgggccaagattcctcacacagatggcaactttcacccgtctcctttaatgggcggctttggacttaaacatccgcctcctcagatccttatcaaaaacactcctgttcctgcggatcctccaacagcgttcaaccaggccaagctgaattctttcatcacgcagtacagcaccggacaagtcagcgtggagatcgagtgggagctgcagaaggagaacagcaagcgctggaacccagagattcagtatacttccaactactacaaatctacaaatgtggactttgctgttaatactgagggtgcttactctgagcctcgccccattggcactcgttacctcacccgtaatctgtaa

SEQ ID NO: 446 - protein, 737 aa, Adeno-associated virus
MAADGYLPDWLEDNLSEGIREWWDLKPGAPKPKANQQKQDDGRGLVLPGYKYLGPFNGLDKGEPVNAADAAALEHDKAYDQQLKAGDNPYLRYNHADAEFQERLQEDTSFGGNLGRAVFQAKKRVLEPLGLVEEAAKTAPGKKRPVEPSPQRSPDSSTGIGKKGQQPARKRLNFGQTGDSESVPDPQPIGEPPAGPSGLGSGTMAAGGGAPMADNNEGADGVGNASGNWHCDSTWLGDRVITTSTRTWALPTYNNHLYKQISSQSAGSTNDNVYFGYSTPWGYFDFNRFHCHFSPRDWQRLINNNWGFRPKKLNFKLFNIQVKEVTTNDGVTTIANNLTSTVQVFSDSEYQLPYVLGSAHQGCLPPFPADVFMIPQYGYLTLNNGSQAVGRSSFYCLEYFPSQMLRTGNNFSFSYTFEDVPFHSSYAHSQSLDRLMNPLIDQYLYYLSRTQSTGGTAGTQQLLFSQAGPSNMSTQARNWLPGPCYRQQRVSTTLSQNNNSNFAWTGATKYHLNGRDSLVNPGVAMATNKDDEDRFFPSSGILMFGKQGAGKDNVDYSNVMLTSEEEIKTTNPVATEQYGVVADNLQQQNTAPIVGAVNSQGALPGMVWQNRDVYLQGPIWAKIPHTDGNFHPSPLMGGFGLKHPPPQILIKNTPVPADPPTAFNQAKLNSFITQYSTGQVSVEIEWELQKENSKRWNPEIQYTSNYYKSTNVDFAVNTEGAYSEPRPIGTRYLTRNL

SEQ ID NO: 447 - DNA, 2217 bp, Adeno-associated virus
atggctgccgatggttatcttccagattggctcgaggacaacctctctgagggcattcgcgagtggtgggacctgaaacctggagccccgaaacccaaagccaaccagcaaaagcaggacgacggccggggtctggtgcttcctggctacaagtacctcggacccttcaacggactcgacaagggggagcccgtcaacgcggcggacgcagcggccctcgagcacgacaaggcctacgaccagcagctcaaagcgggtgacaatccgtacctgcggtataatcacgccgacgccgagtttcaggagcgtctgcaagaagatacgtcttttgggggcaacctcgggcgagcagtcttccaggccaagaagcgggttctcgaacctctcggtctggttgaggaaggcgctaagacggctcctggaaagaagagaccggtagagccgtcaccacagcgttcccccgactcctccacgggcatcggcaagaaaggccagcagcccgccagaaagagactcaatttcggtcagactggcgactcagagtcagtccccgaccctcaacctatcggagaacctccagcagcgccctctagtgtgggatctggtacaatggctgcaggcggtggcgcaccaatggcagacaataacgaaggtgccgacggagtgggtagttcctcgggaaattggcattgcgattccacatggctgggcgacagagtcatcaccaccagcacccgaacctgggccctgcccacctacaacaaccacctctacaagcaaatctccaacgggacctcgggaggcagcaccaacgacaacacctactttggctacagcaccccctgggggtattttgactttaacagattccactgccacttctcaccacgtgactggcagcgactcatcaacaacaactggggattccggcccaagagactcagcttcaagctcttcaacatccaggtcaaagaggtcacgcagaatgaaggcaccaagaccatcgccaataacctcaccagcaccatccaggtgtttacggactcggaataccagctgccgtacgtcctcggctctgcccaccagggctgcctgcctccgttcccggcggacgtcttcatgattcctcagtacggctacctgactctcaacaacggtagtcaggccgtgggacgttcctccttctactgcctggagtacttcccctctcagatgctgagaacgggcaacaacttttccttcagctacactttcgaggacgtgcctttccacagcagctacgcgcacagccagagtttggacaggctgatgaatcctctcatcgaccagtacctgtactacctgtcaagaacccagtctacgggaggcacagcgggaacccagcagttgctgttttctcaggccgggcctagcaacatgtcggctcaggccagaaactggctgcctggaccctgctacagacagcagcgcgtctccacgacactgtcgcaaaacaacaacagcaactttgcctggactggtgccaccaagtatcatctgaacggcagagactctctggtgaatccgggcgtcgccatggcaaccaacaaggacgacgaggaccgcttcttcccatccagcggcatcctcatgtttggcaagcagggagctggaaaagacaacgtggactatagcaacgtgatgctaaccagcgaggaagaaatcaaggccaccaaccccgtggccacagaacagtatggcgtggtggctgataacctacagcagcaaaacaccgctcctattgtgggggccgtcaacagccagggagccttacctggcatggtctggcagaaccgggacgtgtacctgcagggtcctatttgggccaagattcctcacacagatggcaactttcacccgtctcctttaatgggcggctttggacttaaacatccgcctcctcagatcctcatcaaaaacactcctgttcctgcggatcctccaacagcgttcaaccaggccaagctgaattctttcatcacgcagtacagcaccggacaagtcagcgtggagatcgagtgggagctgcagaaggagaacagcaagcgctggaacccagagattcagtatacttccaactactacaaatctacaaatgtggactttgctgttaatactgagggtgtttactctgagcctcgccccattggcactcgttacctcacccgtaatctgtaa

SEQ ID NO: 448 - protein, 738 aa, Adeno-associated virus
MAADGYLPDWLEDNLSEGIREWWDLKPGAPKPKANQQKQDDGRGLVLPGYKYLGPFNGLDKGEPVNAADAAALEHDKAYDQQLKAGDNPYLRYNHADAEFQERLQEDTSFGGNLGRAVFQAKKRVLEPLGLVEEGAKTAPGKKRPVEPSPQRSPDSSTGIGKKGQQPARKRLNFGQTGDSESVPDPQPIGEPPAAPSSVGSGTMAAGGGAPMADNNEGADGVGSSSGNWHCDSTWLGDRVITTSTRTWALPTYNNHLYKQISNGTSGGSTNDNTYFGYSTPWGYFDFNRFHCHFSPRDWQRLINNNWGFRPKRLSFKLFNIQVKEVTQNEGTKTIANNLTSTIQVFTDSEYQLPYVLGSAHQGCLPPFPADVFMIPQYGYLTLNNGSQAVGRSSFYCLEYFPSQMLRTGNNFSFSYTFEDVPFHSSYAHSQSLDRLMNPLIDQYLYYLSRTQSTGGTAGTQQLLFSQAGPSNMSAQARNWLPGPCYRQQRVSTTLSQNNNSNFAWTGATKYHLNGRDSLVNPGVAMATNKDDEDRFFPSSGILMFGKQGAGKDNVDYSNVMLTSEEEIKATNPVATEQYGVVADNLQQQNTAPIVGAVNSQGALPGMVWQNRDVYLQGPIWAKIPHTDGNFHPSPLMGGFGLKHPPPQILIKNTPVPADPPTAFNQAKLNSFITQYSTGQVSVEIEWELQKENSKRWNPEIQYTSNYYKSTNVDFAVNTEGVYSEPRPIGTRYLTRNL

SEQ ID NO: 449 - DNA, 2217 bp, Adeno-associated virus
atggctgccgatggttatcttccagattggctcgaggacaacctctctgagggcattcgcgagtggtgggacctgaaacctggagccccgaaacccaaagccaaccagcaaaagcaggacgacggccggggtctggtgcttcctggctacaagcacctcggacccttcaacggactcgacaagggggagcccgtcaacgcggcggacgcagcggccctcgagcacgacaaggcctacgaccagcagctcaaagcgggtgacaatccgtacctgcggtataatcacgctgacgccgagtttcaggagcgtctgcaagaagatacgtcttttgggggcaacctcgggcgagcagtcttccaggccaagaagcgggttctcgaacctctcggtctggttgaggaaggcgctaagacggctcctggaaagaagagaccggtagagccgtcaccacagcgttcccccgactcctccacgggcatcggcaagaaaggccagcagcccgccagaaagagactcaatttcggtcagactggcgactcagagtcagtccccgaccctcaacctatcggagaacctccagcagcgccctctagtgtgggatctggtacaatggctgcaggcggtggcgcaccaatggcagacaataacgaaggtgccgacggagtgggtagttcctcgggaaattggcattgcgattccacatggctgggcgacagagtcatcaccaccagcacccgaacctgggccctgcccacctacaacaaccacctctacaagcaaatctccaacgggacctcgggaggcagcaccaacgacaacacctactttggctacagcaccccctgggggtattttgactttaacagattccactgccacttctcaccacgtgactggcagcgactcatcaacaacaactggggattccggcccaagagactcagcttcaagctcttcaacatccaggtcaaagaggtcacgcagaatgaaggcaccaagaccatcgccaataaccttaccagcacggttcaggtcttttcggactcggaataccagctgccctacgtcctcggctccgcacaccagggctgcctgcctccgttcccggcggacgtcttcatgattccccagtacggctacctgactctgaacaatggcagccaatcggtgggtcgttcctctttctactgcctggaatatttcccttctcaaatgctgagaacgggcaacaacttcaccttcagctacaccttcgaggacgttcccttccacagcagctacgcacacagccagagcctggaccggctgatgaatcctcttatcgaccagtacctgtattacctggccagaacacagagcaacgcaggaggcacagctggcaatcgggaactgcagttttatcagggcgggcctaccaccatggccgaacaagccaaaaactggctgcctggaccttgcttccggcaacaaagagtctccaagacgctggatcaaaacaacaacagcaactttgcttggactggtgccaccaaataccatctaaatggaagaaattcattggttaatcccggtgtcgccatggcaacccacaaggacgacgaggaacgcttcttcccttcgagcggagtcctgatttttggaaaaactggagcagctaataagactacactggaaaatgtgttaatgacaaatgaagaggaaattcgtcctaccaacccggtagccaccgaggaatacgggactgttagcagcaacctgcaggcggctaacactgcagcccagacacaagttgtcaacaaccagggagccttacctggtatggtctggcagaaccgggacgtgtacctgcagggtcccatctgggccaagattcctcacacggacggcaactttcacccgtctccgctgatgggcggctttggactgaagcatccgcctcctcagatcctgatcaaaaacactcctgttcctgctaatcccccggaggtgtttacgcctgccaagtttgcttctttcatcacacagtacagcaccggccaggtcagcgtggagatcgagtgggagctgcagaaggagaacagcaagcgctggaacccagagattcagtatacctccaattttgacaaacagactggtgtggactttgccgttgacagccagggtgtttattctgagcctcgccccattggtactcgttacctcacccgtaatctgtaa

SEQ ID NO: 450 - protein, 738 aa, Adeno-associated virus
MAADGYLPDWLEDNLSEGIREWWDLKPGAPKPKANQQKQDDGRGLVLPGYKHLGPFNGLDKGEPVNAADAAALEHDKAYDQQLKAGDNPYLRYNHADAEFQERLQEDTSFGGNLGRAVFQAKKRVLEPLGLVEEGAKTAPGKKRPVEPSPQRSPDSSTGIGKKGQQPARKRLNFGQTGDSESVPDPQPIGEPPAAPSSVGSGTMAAGGGAPMADNNEGADGVGSSSGNWHCDSTWLGDRVITTSTRTWALPTYNNHLYKQISNGTSGGSTNDNTYFGYSTPWGYFDFNRFHCHFSPRDWQRLINNNWGFRPKRLSFKLFNIQVKEVTQNEGTKTIANNLTSTVQVFSDSEYQLPYVLGSAHQGCLPPFPADVFMIPQYGYLTLNNGSQSVGRSSFYCLEYFPSQMLRTGNNFTFSYTFEDVPFHSSYAHSQSLDRLMNPLIDQYLYYLARTQSNAGGTAGNRELQFYQGGPTTMAEQAKNWLPGPCFRQQRVSKTLDQNNNSNFAWTGATKYHLNGRNSLVNPGVAMATHKDDEERFFPSSGVLIFGKTGAANKTTLENVLMTNEEEIRPTNPVATEEYGTVSSNLQAANTAAQTQVVNNQGALPGMVWQNRDVYLQGPIWAKIPHTDGNFHPSPLMGGFGLKHPPPQILIKNTPVPANPPEVFTPAKFASFITQYSTGQVSVEIEWELQKENSKRWNPEIQYTSNFDKQTGVDFAVDSQGVYSEPRPIGTRYLTRNL

SEQ ID NO: 451 - protein, 737 aa, Adeno-associated virus
MAADGYLPDWLEDNLSEGIREWWDLKPGAPKPKANQQKQDDGRGLVLPGYKYLGPFNGLDKGEPVNAADAAALEHDKAYDQQLKAGDNPYLRYNHADAEFQERLQEDTSFGGNLGRAVFQAKKRVLEPLGLVEEAAKTAPGKKRPVEPSPQRSPDSSTGIGKKGQQPARKRLNFGQTGDSESVPDPQPIGEPPAGPSGLGSGTMAAGGGAPMADNNKGADGVGNASGNWHCDSTWLGDRVITTSTRTWALPTYNNHLYKQISSQSAGSTNDNVYFGYSTPWGYFDFNRFHCHFSPRDWQRLINSNWGFRPKKLNFKLFNIQVKEVTTNDGVTTIANNLTSTVQVFSDSEYQLPYVLGSAHQGCLPPFPADVFMIPQYGYLTLNNGSQSVGRSSFYCLEYFPSQMLRTGNNFTFSYTFEDVPFHSSYAHSQSLDRLMNPLIDQYLYYLARTQSNAGGTAGNRELQFYQGGPTTMAEQAKNWLPGPCFRQQRVSKTLDQNNNSNFAWTGATKYHLNGRNSLVNPGVAMATHKDDEERFFPSSGVLIFGKTGAANKTTLENVLMTNEEEIRPTNPVATEEYGTVSSNLQAANTAAQTQVVNNQGALPGMVWQNRDVYLQGPIWAKIPHTDGNFHPSPLMGGFGLKHPPPQILIKNTPVPANPPEVFTPAKFASFITQYSTGQVSVEIEWELQKENSKRWNPEIQYTSNFDKQTGVDFAVDSQGVYSEPRPIGTRYLTRNL

SEQ ID NO: 452 - protein, 737 aa, Adeno-associated virus
MAADGYLPDWLEDNLSEGIREWWDLKPGAPKPKANQQKQDDGRGLVLPGYKYLGPFNGLDKGEPVNAADAAALEHDKAYDQQLKAGDNPYLRYNHADAEFQERLQEDTSFGGNLGRAVFQAKKRVLEPLGLVEEAAKTAPGKKRPVEPSPQRSPDSSTGIGKKGQQPARKRLNFGQTGDSESVPDPQPIGEPPAGPSGLGSGTMAAGGGAPMADNNEGADGVGNASGNWHCDSTWLGDRVITTSTRTWALPTYNNHLYKQISSQSAGSTNDNVYFGYSTPWGYFDFNRFHCHFSPRDWQRLINSNWGFRPKKLNFKLFNIQVKEVTTNDGVTTIANNLTSTVQVFSDSEYQLPYVLGSAHQGCLPPFPADVFMIPQYGYLTLNNGSQSVGRSSFYCLEYFPSQMLRTGNNFTFSYTFEDVPFHSSYAHSQSLDRLMNPLIDQYLYYLARTQSNAGGTAGNRELQFYQGGPTTMAEQAKNWLPGPCFRQQRVSKTLDQNNNSNFAWTGATKYHLNGRNSLVNPGVAMATHKDDEERFFPSSGVLIFGKTGAANKTTLENVLMTNEEEIRPTNPVATEEYGTVSSNLQAANTAAQTQVVNNQGALPGMVWQNRDVYLQGPIWAKIPHTDGNFHPSPLMGGFGLKHPPPQILIKNTPVPANPPEVFTPAKFASFITQYSTGQVSVEIEWELQKENSKRWNPEIQYTSNFDKQTGVDFAVDSQGVYSEPRPIGTRYLTRNL

SEQ ID NO: 453 - protein, 737 aa, Adeno-associated virus
MAADGYLPDWLEDNLSEGIREWWDLKPGAPKPKANQQKQDDGRGLVLPGYKYLGPFNGLDKGEPVNAADAAALEHDKAYDQQLKAGDNPYLRYNHADAEFQERLQEDTSFGGNLGRAVFQAKKRVLEPLGLVEEAAKTAPGKKRPVEPSPQRSPDSSTGIGKKGQQPARKRLNFGQTGDSESVPDPQPIGEPPAGPSGLGSGTMAAGGGAPMADNNEGADGVGNASGNWHCDSTWLGDRVITTSTRTWALPTYNNHLYKQISSQSAGSTNDNVYFGYSTPWGYFDFNRFHCHFSPRDWQRLINNNWGFRPKKLNFKLFNIQVKEVTTNDGVTTIANNLTSTVQVFSDSEYQLPYVLGSAHQGCLPPFPADVFMIPQYGYLTLNNGSQSVGRSSFYCLEYFPSQMLRTGNNFTFSYTFEDVPFHSSYAHSQSLDRLMNPLIDQYLYYLARTQSNAGGTAGNRELQFYQGGPTTMAEQAKNWLPGPCFRQQRVSKTLDQNNNSNFAWTGATKYHLNGRNSLVNPGVAMATHKDDEERFFPSSGVLIFGKTGAANKTTLENVLMTNEEEIRPTNPVATEEYGTVSSNLQAANTAAQTQVVNNQGALPGMVWQNRDVYLQGPIWAKIPHTDGNFHPSPLMGGFGLKHPPPQILIKNTPVPANPPEVFTPAKFASFITQYSTGQVSVEIEWELQKENSKRWNPEIQYTSNFDKQTGVDFAVDSQGVYSEPRPIGTRYLTRNL

SEQ ID NO: 454 - protein, 737 aa, Adeno-associated virus
MAADGYLPDWLEDNLSEGIREWWDLKPGAPKPKANQQKQDDGRGLVLPGYKYLGPFNGLDKGEPVNAADAAALEHDKAYDQQLKAGDNPYLRYNHADAEFQERLQEDTSFGGNLGRAVFQAKKRVLEPLGLVEEAAKTAPGKKRPVEPSPQRSPDSSTGIGKKGQQPARKRLNFGQTGDSESVPDPQPIGEPPAGPSGLGSGTMAAGGGAPMADNNKGADGVGNASGNWHCDSTWLGDRVITTSTRTWALPTYNNHLYKQISSQSAGSTNDNVYFGYSTPWGYFDFNRFHCHFSPRDWQRLINNNWGFRPKKLNFKLFNIQVKEVTTNDGVTTIANNLTSTVQVFSDSEYQLPYVLGSAHQGCLPPFPADVFMIPQYGYLTLNNGSQSVGRSSFYCLEYFPSQMLRTGNNFTFSYTFEDVPFHSSYAHSQSLDRLMNPLIDQYLYYLARTQSNAGGTAGNRELQFYQGGPTTMAEQAKNWLPGPCFRQQRVSKTLDQNNNSNFAWTGATKYHLNGRNSLVNPGVAMATHKDDEERFFPSSGVLIFGKTGAANKTTLENVLMTNEEEIRPTNPVATEEYGTVSSNLQAANTAAQTQVVNNQGALPGMVWQNRDVYLQGPIWAKIPHTDGNFHPSPLMGGFGLKHPPPQILIKNTPVPANPPEVFTPAKFASFITQYSTGQVSVEIEWELQKENSKRWNPEIQYTSNFDKQTGVDFAVDSQGVYSEPRPIGTRYLTRNL

SEQ ID NO: 455 - DNA, 2214 bp, Adeno-associated virus
atggctgctgacggttatcttccagattggctcgaggacaacctctctgagggcattcgcgagtggtgggacctgaaacctggagcccccaagcccaaggccaaccagcagaagcaggacgacggccggggtctggtgcttcctggctacaagtacctcggacccttcaacggactcgacaagggggagcccgtcaacgcggcggacgcagcggccctcgagcacgacaaggcctacgaccagcagctcaaagcgggtgacaatccgtacctgcggtataaccacgccgacgccgagtttcaggagcgtctgcaagaagatacgtcttttgggggcaacctcgggcgagcagtcttccaggccaagaagcgggttctcgaacctctcggtctggttgaggaagctgctaagacggctcctggaaagaagagaccggtagaaccgtcacctcagcgttcccccgactcctccacgggcatcggcaagaaaggccagcagcccgctagaaagagactgaactttgggcagactggcgactcagagtcagtccccgaccctcaaccaatcggagaaccaccagcaggcccctctggtctgggatctggtacaatggctgcaggcggtggcgcaccaatggctgacaataacaagggcgccgacggagtgggtaatgcctcaggaaattggcattgcgattccacatggctgggcgacagagtcatcaccaccagcacccgaacctgggctttgcccacctacaacaaccacctctacaagcaaatctccagtcagtcagcaggtagcaccaacgacaacgtctacttcggctacagcaccccctgggggtattttgacttcaacagattccactgtcacttctcaccacgtgactggcagcggctcatcaacagcaactggggattccggcccaagaagctcaacttcaagctgttcaacatccaggtcaaggaggtcacaacgaatgacggcgtcacgaccatcgccaataaccttaccagcacggttcaggtcttttcggactcggaataccagctgccctacgtcctcggctccgcacaccagggctgcctgcctccgttcccggcggacgtcttcatgattccccagtacggctacctgactctgaacaatggcagccaatcggtgggtcgttcctctttctactgcctggaatatttcccttctcaaatgctgagaacgggcaacaacttcaccttcagctacaccttcgaggacgttcccttccacagcagctacgcacacagccagagcctggaccggctgatgaatcctcttatcgaccagtacctgtattacctggccagaacacagagcaacgcaggaggcacagctggcaatcgggaactgcagttttatcagggcgggcctaccaccatggccgaacaagccaaaaactggctgcctggaccttgcttccggcaacaaagagtctccaagacgctggatcaaaacaacaacagcaactttgcttggactggtgccaccaaataccatctaaatggaagaaattcattggttaatcccggtgtcgccatggcaacccacaaggacgacgaggaacgcttcttcccttcgagcggagtcctgatttttggaaaaactggagcagctaataagactacactggaaaatgtgttaatgacaaatgaagaggaaattcgtcctaccaacccggtagccaccgaggaatacgggactgttagcagcaacctgcaggcggctaacactgcagcccagacacaagttgtcaacaaccagggagccttacctggtatggtctggcagaaccgggacgtgtacctgcagggtcccatctgggccaagattcctcacacggacggcaactttcacccgtctccgctgatgggcggctttggactgaagcatccgcctcctcagatcctgatcaaaaacactcctgttcctgctaatcccccggaggtgtttacgcctgccaagtttgcttctttcatcacacagtacagcaccggccaggtcagcgtggagatcgagtgggagctgcagaaggagaacagcaagcgctggaacccagagattcagtatacctccaattttgacaaacagactggtgtggactttgccgttgacagccagggtgtttattctgagcctcgccccattggtactcgttacctcacccgtaatctgtaa

SEQ ID NO: 456 - DNA, 2217 bp, Adeno-associated virus
atggctgccgatggttatcttccagattggctcgaggacaacctctctgagggcattcgcgagtggtgggacctgaaacctggagccccgaaacccaaagccaaccagcaaaagcaggacgacggccggggtctggtgcttcctggctacaagtacctcggacccttcaacggactcgacaagggggagcccgtcaacgcggcggacgcagcggccctcgagcacgacaaggcctacgaccagcagctcaaagcgggtgacaatccgcacctgcggtataatcacgccgacgccgagtttcaggagcgtctgcaagaagatacgtcttttgggggcaacctcgggcgagcagtcttccaggccaagaagcgggttctcgaacctctcggtctggttgaggaaggcgctaagacggctcctggaaagaagagaccggtagagccgtcaccacagcgttcccccgactcctccacgggcatcggcaagaaaggccagcagcccgccagaaagagactcaatttcggtcagactggcgactcagagtcagtccccgaccctcaacttatcggagaacctccagcagcgccctctagtgtgggatctggtacaatggctgcaggcggtggcgcaccaatggcagacaataacgaaggtgccgacggagtgggtagttcctcgggaaattggcattgcgattccacatggctgggcgacagagtcatcaccaccagcacccgaacctgggccctgcccacctacaacaaccacctctacaagcaaatctccaacgggacctcgggaggcagcaccaacgacaacacctactttggctacagcaccccctgggggtattttgactttaacagattccactgccacttctcaccacgtgactggcagcgactcatcaacaacaactggggattccggcccaagagactcagcttcaagctcttcaacatccaggtcaaagaggtcacgcagaatgaaggcaccaagaccatcgccaataacctcaccagcaccatccaggtgtttacggactcggagtaccagctgccgtacgtcctcggctctgcccaccagggctgcctgcctccgttcccggcggacgtcttcatgattcctcagtacggcaacctgactctcaacaacggtagtcaggccgtgggacgttcctccttctactgcctggagtacttcccctctcagatgctgagaacgggcaacaacttttccttcagctacactttcgaggacgtgcctttccacagcagctacgcgcacagccagagtttggacaggctgatgaatcctctcatcgaccagtacctgtactacctgtcaagaacccagtctacgggaggcacagcgggaacccagcagttgctgttttctcaggccgggcctagcaacatgtcggctcaggccagaaactggctgcctggaccctgctacagacagcagcgcgtctccacgacactgtcgcaaaacaacaacagcaactttgcctggactggtgccaccaagtatcatctgaacggcagagactctctggtgaatccgggcgtcgccatggcaaccaacaaggacgacgaggaccgcttcttcccatccagcggcatcctcatgtttggcaagcagggagctggaaaagacaacatgggctatagcaacgtgatgctaaccagcgaggaagaaatcaagaccaccaaccccgtggccacagaacagtatggcgtggtggctgataacctacagcagcaaaacaccgctcctattgtgggggccgtcaacagccagggagccttacctggcatggtctggcagaaccgggacgtgtacctgcagggtcctatttgggccaagattcctcacacagatggcaactttcacccgtctcctttaatgggcggctttggacttaaacatccgcctcctcagatcctcatcaaaaacactcctgttcctgcggatcctccaacagcgttcaaccaggccaagctgaattctttcatcacgcagtacggcaccggacaagtcagcgtggagatcgagtgggagctgcagaaggagaacagcaagcgctggaacccagagattcagtatacttccaactactacaaatctacaaatgtggactttgctgttaatactgagggtgtttactctgagcctcgccccattggcactcgttacctcacccgtaatctgtaa

SEQ ID NO: 457 - protein, 738 aa, Adeno-associated virus
MAADGYLPDWLEDNLSEGIREWWDLKPGAPKPKANQQKQDDGRGLVLPGYKYLGPFNGLDKGEPVNAADAAALEHDKAYDQQLKAGDNPHLRYNHADAEFQERLQEDTSFGGNLGRAVFQAKKRVLEPLGLVEEGAKTAPGKKRPVEPSPQRSPDSSTGIGKKGQQPARKRLNFGQTGDSESVPDPQLIGEPPAAPSSVGSGTMAAGGGAPMADNNEGADGVGSSSGNWHCDSTWLGDRVITTSTRTWALPTYNNHLYKQISNGTSGGSTNDNTYFGYSTPWGYFDFNRFHCHFSPRDWQRLINNNWGFRPKRLSFKLFNIQVKEVTQNEGTKTIANNLTSTIQVFTDSEYQLPYVLGSAHQGCLPPFPADVFMIPQYGNLTLNNGSQAVGRSSFYCLEYFPSQMLRTGNNFSFSYTFEDVPFHSSYAHSQSLDRLMNPLIDQYLYYLSRTQSTGGTAGTQQLLFSQAGPSNMSAQARNWLPGPCYRQQRVSTTLSQNNNSNFAWTGATKYHLNGRDSLVNPGVAMATNKDDEDRFFPSSGILMFGKQGAGKDNMGYSNVMLTSEEEIKTTNPVATEQYGVVADNLQQQNTAPIVGAVNSQGALPGMVWQNRDVYLQGPIWAKIPHTDGNFHPSPLMGGFGLKHPPPQILIKNTPVPADPPTAFNQAKLNSFITQYGTGQVSVEIEWELQKENSKRWNPEIQYTSNYYKSTNVDFAVNTEGVYSEPRPIGTRYLTRNL

SEQ ID NO: 458 - DNA, 2217 bp, Adeno-associated virus
atggctgccgatggttatcttccagattggctcgaggacaacctctctgagggcattcgcgagtggtgggacctgaaacctggagccccgaaacccaaagccaaccagcaaaagcaggacgacggccggggtctggtgcttcctggctacaagtacctcggacccttcaacggactcgacaagggggagcccgtcaacgcggcggacgcagcggccctcgagcacgacaaggcctacgaccagcagctcaaagcgggtgacaatccgtacctgcggtataatcacgccgacgccgagtttcaggagcgtctgcaagaagatacgtcttttgggggcaacctcgggcgagcagtcttccaggccaagaagcgggttctcgaacctctcggtctggttgaggaaggcgctaagacggctcctggaaagaagagaccggtagagccgtcaccacagcgttcccccgactcctccacgggcatcggcaagaaaggccagcagcccgccggaaagagactcaatttcggtcagactggcgactcagagtcagtccccgaccctcaacctatcggagaacctccagcagcgccctctagtgtgggatctggtacaatggctgcaggcggtggcgcaccaatggcagacaataacgaaggtgccgacggagtgggtagttcctcgggaaattggcattgcgattccacatggctgggcgacagagtcatcaccaccagcacccgaacctgggccctgcccacctacaacaaccacctctacaagcaaatctccaacgggacctcgggaggcagcaccaacgacaacacctactttggctacagcaccccctgggggtattttgactttaacagattccactgccacttctcaccacgtgactggcagcgactcatcaacaacaactggggattccggcccaagagactcagcttcaagctcttcaacatccaggtcaaagaggtcacgcagaatgaaggcaccaagaccatcgccaataacctcaccagcaccatccaggtgtttacggactcggaataccagctgccgtacgtcctcggctctgcccaccagggctgcctgcctccgttcccggcggacgtcttcatgattcctcagtacggctacctgactctcaacaacggtagtcaggccgtgggacgttcctccttctactgcctggagtacttcccctctcagatgctgagaacgggcaacaacttttccttcagctacactttcgaggacgtgcctttccacagcagctacgcgcacagccagagtttggacaggctgatgaatcctctcgtcgaccagtacctgtactacctgtcaagaacccagtctacgggaggcacagcgggaacccagcagttgctgttttctcaggccgggcctagcaacatgtcggctcaggccagaaactggctgcctggaccctgctacagacagcagcgcgtctccacgacactgtcgcaaaacaacaacagcaactttgcctggactggtgccaccaagtatcatctgaacggcagagactctctggtgaatccgggcgtcgccatggcaaccaacaaggacgacgaggaccgcttcttcccatccagcggcatcctcatgtttggcaagcagggagctggaaaagacaacgtggactatagcaacgtgatgctaaccagcgaggaagaaatcaagaccaccaaccccgtggccacagaacagtatggcgtggtggctgataacctacagcagcaaaacaccgctcctattgtgggggccgtcaacagccagggagccttacctggcatggtctggcagaaccgggacgtgtacctgcagggtcctatttgggccaagattcctcacacagatggcaactttcacccgtctcctttaatgggcggctttggacttaaacatccgcctcctcagatcctcatcaaaaacactcctgttcctgcggatcctccaacagcgttcaaccaggccaagctgaattctttcatcacgcagtacagcaccggacaagtcagcgtggagatcgagtgggagctgcagaaggagaacagcaagcgctggagcccagagattcagtatacttccaactactacaaatctacaaatgtggactttgctgttaatactgagggtgtttactctgagcctcgccccattggcactcgttacctcacccgtaatctgtaa

SEQ ID NO: 459 - protein, 738 aa, Adeno-associated virus
MAADGYLPDWLEDNLSEGIREWWDLKPGAPKPKANQQKQDDGRGLVLPGYKYLGPFNGLDKGEPVNAADAAALEHDKAYDQQLKAGDNPYLRYNHADAEFQERLQEDTSFGGNLGRAVFQAKKRVLEPLGLVEEGAKTAPGKKRPVEPSPQRSPDSSTGIGKKGQQPAGKRLNFGQTGDSESVPDPQPIGEPPAAPSSVGSGTMAAGGGAPMADNNEGADGVGSSSGNWHCDSTWLGDRVITTSTRTWALPTYNNHLYKQISNGTSGGSTNDNTYFGYSTPWGYFDFNRFHCHFSPRDWQRLINNNWGFRPKRLSFKLFNIQVKEVTQNEGTKTIANNLTSTIQVFTDSEYQLPYVLGSAHQGCLPPFPADVFMIPQYGYLTLNNGSQAVGRSSFYCLEYFPSQMLRTGNNFSFSYTFEDVPFHSSYAHSQSLDRLMNPLVDQYLYYLSRTQSTGGTAGTQQLLFSQAGPSNMSAQARNWLPGPCYRQQRVSTTLSQNNNSNFAWTGATKYHLNGRDSLVNPGVAMATNKDDEDRFFPSSGILMFGKQGAGKDNVDYSNVMLTSEEEIKTTNPVATEQYGVVADNLQQQNTAPIVGAVNSQGALPGMVWQNRDVYLQGPIWAKIPHTDGNFHPSPLMGGFGLKHPPPQILIKNTPVPADPPTAFNQAKLNSFITQYSTGQVSVEIEWELQKENSKRWSPEIQYTSNYYKSTNVDFAVNTEGVYSEPRPIGTRYLTRNL

SEQ ID NO: 460 - DNA, 2217 bp, Adeno-associated virus
atggttgccgatggttatcttccagattggctcgaggacaacctctctgagggcattcgcgagtggtgggacctgaaacctggagccccgaaacccaaagccaaccagcaaaagcagggcgacggccggggtctggtgcttcctggctacaagtacctcggacccttcaacggactcgacaagggggagcccgtcaacgcggcggacgcagcggccctcgagcacgacaaggcctacgaccagcagcttaaagcgggtgacaatccgtacctgcggtataatcacgccgacgccgagcttcaggagcgtctgcaagaagatacgtcttttgggggcaacctcgggcgagcagtcttccaggccaagaagcgggttctcgaacctctcggtctggttgaggaaggcgctaagacggctcctggaaagaagagaccggtagagccgtcaccacagcgttcccccgactcctccacgggcatcggcaagaaaggccagcagcccgccagaaagagactcaatttcggtcagactggcgactcagagtcagtccccgaccctcaacctatcggagaacctccagcagcgccctctagtgtgggatctggtacaatggctgcaggcggtggcgcgccaatggcagacaataacgaaggtgccgacggagtgggtagttcctcgggaaattggcattgcgattccacatggctgggcgacagagtcatcaccaccagcacccgaacctgggccctgcccacctacaacaaccacctctacaagcaaatctccaacgggacctcgggaggcagcaccaacgacaacacctactttggctacagcaccccctgggggtattttgactttaacagattccactgccacttctcaccacgtgactggcagcgactcatcaacaacaactggggattccggcccaagagactcagcttcaagctcttcaacatccaggtcaaagaggtcacgcagaatgaaggcaccaagaccatcgccaataacctcaccagcaccatccaggtgtttacggactcggaataccagctgccgtacgtcctcggctctgcccaccagggctgccagcctccgttcccggcggacgtcttcatgattcctcagtacggctacctgactctcaacaacggtagtcaggccgtgggacgttcctccttctactgcctggagtacttcccctctcagatgctgagaacgggcaacaacttttccttcagctacactttcgaggacgtgcctttccacagcagctacgcgcacagccagagtttggacaggctgatgaatcctctcatcgaccagtacctgtactacctgtcaagaacccagtctacgggaggcacagcgggaacccagcagttgctgttttctcaggccgggcctagcaacatgtcggctcaggccagaaactggctgcctggaccctgctacagacagcagcgcgtctccacgacactgtcgcaaaacaacaacagcaactttgcctggactggtgccaccaagtatcatctgaacggcagagactctctggtgaatccgggcgtcgccatggcaaccaacaaggacgacgaggaccgcttcttcccatccagcggcatcctcatgtttggcaagcagggagctggaaaagacaacgtggactatagcaacgtgatgctaaccagcgaggaagaaatcaagaccaccaaccccgtggccacagaacagtatggcgtggtggctgataacctacagcagcaaaacaccgctcctattgtgggggccgtcaacagccagggagccttacctggcatggtctggcagaaccgggacgtgtacctgcagggtcctatttgggccaagattcctcacacagatggcaactttcacccgtctcctttaatgggcggctttggacttaaacatccgcctcctcagatcctcatcaaaaacactcctgttcctgcggatcctccaacagcgttcaaccaggccaagctgaattctttcatcacgcagtacagcaccggacaagtcagcgtggagatcgagtgggagccgcagaaggagaacagcaagcgctggaacccagagattcagtatacttccaactactacaaatctacaaatgtggactttgctgttaatactgagggtgtttactctgagcctcgccccattggcactcgttacctcacccgtaatctgtaa

SEQ ID NO: 461 - protein, 738 aa, Adeno-associated virus
MVADGYLPDWLEDNLSEGIREWWDLKPGAPKPKANQQKQGDGRGLVLPGYKYLGPFNGLDKGEPVNAADAAALEHDKAYDQQLKAGDNPYLRYNHADAELQERLQEDTSFGGNLGRAVFQAKKRVLEPLGLVEEGAKTAPGKKRPVEPSPQRSPDSSTGIGKKGQQPARKRLNFGQTGDSESVPDPQPIGEPPAAPSSVGSGTMAAGGGAPMADNNEGADGVGSSSGNWHCDSTWLGDRVITTSTRTWALPTYNNHLYKQISNGTSGGSTNDNTYFGYSTPWGYFDFNRFHCHFSPRDWQRLINNNWGFRPKRLSFKLFNIQVKEVTQNEGTKTIANNLTSTIQVFTDSEYQLPYVLGSAHQGCQPPFPADVFMIPQYGYLTLNNGSQAVGRSSFYCLEYFPSQMLRTGNNFSFSYTFEDVPFHSSYAHSQSLDRLMNPLIDQYLYYLSRTQSTGGTAGTQQLLFSQAGPSNMSAQARNWLPGPCYRQQRVSTTLSQNNNSNFAWTGATKYHLNGRDSLVNPGVAMATNKDDEDRFFPSSGILMFGKQGAGKDNVDYSNVMLTSEEEIKTTNPVATEQYGVVADNLQQQNTAPIVGAVNSQGALPGMVWQNRDVYLQGPIWAKIPHTDGNFHPSPLMGGFGLKHPPPQILIKNTPVPADPPTAFNQAKLNSFITQYSTGQVSVEIEWEPQKENSKRWNPEIQYTSNYYKSTNVDFAVNTEGVYSEPRPIGTRYLTRNL

SEQ ID NO: 462 - DNA, 2217 bp, Adeno-associated virus
atggctgccgatggttatcttccagattggctcgaggacaacctctctgagggcattcgcgagtggtgggacctgaaacctggagccccgaaacccaaagccaaccagcaaaagcaggacgacggccggggtctggtgcttcctggctacaagtacctcggacccttcaacggactcgacaagggggagcccgtcaacgcggcggacgcagcggccctcgagcacgacaaggcctacgaccagcagctcaaagcgggtgacaatccgtacctgcggtataatcacgccgacgccgagtttcaggagcgtctgcaagaagatacgtcttttgggggcaacctcgggcgagcagtcttccaggccaagaagcgggttctcgaacctctcggtctggttgaggaaggcgctaagacggctcctggaaagaagagaccggtagagccgtcaccacagcgttcccccgactcctccacgggcatcggcaagaaaggccagcagcccgccagaaagagactcaatttcggtcagactggcgactcagagtcagtccccgaccctcaacctatcggagaacctccagcagcgccctctagtgtgggatctggtacaatggctgcaggcggtggcgcaccaatggcagacaataacgaaggtgccgacggagtgggtagttcctcgggaaattggcattgcgattccacatggctgggcgacagagtcatcaccaccagcacccgaacctgggccctgcccacctacaacaaccacctctacaagcaaatctccaacgggacctcgggaggcagcaccaacgacaacacctactttggctacagcaccccctgggggtattttgactttaacagattccactgccacttctcaccacgtgactggcagcgactcatcaacaacaactggggattccggcccaagagactcagcttcaagctcttcaacatccaggtcaaagaggtcacgcagaatgaaggcaccaagaccatcgccaatagcctcaccagcaccatccaggtgtttacggactcggaataccagctgccgtacgtcctcggctctgcccaccagggctgcctgcctccgttcccggcggacgtcttcatgattcctcagtacggctacctgactcccaacaacggtagtcaggccgtgggacgttcctccttctactgcctggagtacttcccctctcagatgctgagaacgggcaacaacttttccttcagctacactttcgaggacgtgcctttccacagcagctacgcgcacagccagagtttggacaggctgatgaatcctctcatcgaccagtacctgtactacctgtcaagaacccagtctacgggaggcacagcgggaacccagcagttgctgtcttctcaggccgggcctagcaacatgtcggctcaggccagaaactggctgcctggaccctgctacagacagcagcgcgtctccacgacactgtcgcaaaacaacaacagcaactttgcctggactggtgccaccaagtatcatctgaacggcagagactctctggtgaatccgggcgtcgccatggcaaccaacaaggacgacgaggaccgcttcttcccatccagcggcatcctcatgtttggcaagcagggagctggaaaagacaacgtggactatagcaacgtgatgctaaccagcgaggaagaaatcaagaccaccaaccccgtggccacagaacagtatggcgtggtggctgataacctacagcagcaaaacaccgctcctattgtgggggccgtcaacagccagggagccttacctggcatggtctggcagaaccgggacgtgtacttgcagggtcctatttgggccaagattcctcacacagatggcaactttcacccgtctcctttaatgggcggctttggacttaaacatccgcctcctcagatcctcatcaaaaacactcctgttcctgcggatcctccaacagcgttcaaccaggccaagctgaattctttcatcacgcagtacagcaccggacaagtcagcgtggagatcgagtgggagctgcagaaggagaacagcaagcgctggaacccagagattcagtatacttccaactactacaaatctacaaatgtggactttgctgttaatactgagggtgtttactctgagcctcgccccattggcactcgttacctcacccgtaatctgtaa

SEQ ID NO: 463 - protein, 738 aa, Adeno-associated virus
MAADGYLPDWLEDNLSEGIREWWDLKPGAPKPKANQQKQDDGRGLVLPGYKYLGPFNGLDKGEPVNAADAAALEHDKAYDQQLKAGDNPYLRYNHADAEFQERLQEDTSFGGNLGRAVFQAKKRVLEPLGLVEEGAKTAPGKKRPVEPSPQRSPDSSTGIGKKGQQPARKRLNFGQTGDSESVPDPQPIGEPPAAPSSVGSGTMAAGGGAPMADNNEGADGVGSSSGNWHCDSTWLGDRVITTSTRTWALPTYNNHLYKQISNGTSGGSTNDNTYFGYSTPWGYFDFNRFHCHFSPRDWQRLINNNWGFRPKRLSFKLFNIQVKEVTQNEGTKTIANSLTSTIQVFTDSEYQLPYVLGSAHQGCLPPFPADVFMIPQYGYLTPNNGSQAVGRSSFYCLEYFPSQMLRTGNNFSFSYTFEDVPFHSSYAHSQSLDRLMNPLIDQYLYYLSRTQSTGGTAGTQQLLSSQAGPSNMSAQARNWLPGPCYRQQRVSTTLSQNNNSNFAWTGATKYHLNGRDSLVNPGVAMATNKDDEDRFFPSSGILMFGKQGAGKDNVDYSNVMLTSEEEIKTTNPVATEQYGVVADNLQQQNTAPIVGAVNSQGALPGMVWQNRDVYLQGPIWAKIPHTDGNFHPSPLMGGFGLKHPPPQILIKNTPVPADPPTAFNQAKLNSFITQYSTGQVSVEIEWELQKENSKRWNPEIQYTSNYYKSTNVDFAVNTEGVYSEPRPIGTRYLTRNL

SEQ ID NO: 464 - protein, 738 aa, Adeno-associated virus
MAADGYLPDWLEDNLSEGIREWWDLKPGAPKPKANQQKQDDGRGLVLPGYKYLGPFNGLDKGEPVNAADAAALEHDKAYDQQLKAGDNPYLRYNHADAEFQERLQEDTSFGGNLGRAVFQAKKRVLEPLGLVEEGAKTAPGKKRPVEPSPQRSPDSSTGIGKKGQQPARKRLNFGQTGDSESVPDPQPIGEPPAAPSSVGSGTMAAGGGAPMADNNEGADGVGSSSGNWHCDSTWLGDRVITTSTRTWALPTYNNHLYKQISNGTSGGSTNDNTYFGYSTPWGYFDFNRFHCHFSPRDWQRLINNNWGFRPKRLSFKLFNIQVKEVTQNEGTKTIANNLTSTIQVFTDSEYQLPYVLGSAHQGCLPPFPADVFMIPQYGYLTLNNGSQAVGRSSFYCLEYFPSQMLRTGNNFSFSYTFEDVPFHSSYVHSQSLDRLMNPLIDQYLYYLSRTQSTGGTAGTQQLLFSQAGPSNMSAQARNWLPGPCYRQQRVSTTLSQNNNSNFAWTGATKYHLNGRDSLVNSGVAMATNKDDEDRFFPSSGILMFGKQGAGKDNVDYSNVMLTSEEEIKTTNPVATEQYGVVADNLQQQNTAPIVGAVNSQGALPGMVWQNRDVYLQGPIWAKIPHTDGNFHPSPLMGGFGLKHPPPQILIKNTPVPADPPTAFNQAKLNSFITQYSTGQVSVEIEWELQKENSKRWNPEIQYTSNYYKSTNVDFAVNTEGVYSEPRPIGTRYPTRNL

SEQ ID NO: 465 - DNA, 2217 bp, Adeno-associated virus
atggctgccgatggttatcttccagattggctcgaggacaacctctctgagggcattcgcgagtggtgggacctgaaacctggagccccgaaacccaaagccaaccagcaaaagcaggacgacggccggggtctggtgcttcctggctacaagtacctcggacccttcaacggactcgacaagggggagcccgtcaacgcggcggacgcagcggccctcgagcacgacaaggcctacgaccagcagctcaaagcgggtgacaatccgtacctgcggtataatcacgccgacgccgagtttcaggagcgtctgcaagaagatacgtcttttgggggcaacctcgggcgagcagtcttccaggccaagaagcgggttctcgaacctctcggtctggttgaggaaggcgctaagacggctcctggaaagaagagaccggtagagccgtcaccacagcgttcccccgactcctccacgggcatcggcaagaaaggccagcagcccgccagaaagagactcaatttcggtcagactggcgactcagagtcagtccccgaccctcaacctatcggagaacctccagcagcgccctctagtgtgggatctggtacaatggctgcaggcggtggcgcaccaatggcagacaataacgaaggtgccgacggagtgggtagttcctcgggaaattggcattgcgattccacatggctgggcgacagagtcatcaccaccagcacccgaacctgggccctgcccacctacaacaaccacctctacaagcaaatctccaacgggacctcgggaggcagcaccaacgacaacacctactttggctacagcaccccctgggggtattttgactttaacagattccactgccacttctcaccacgtgactggcagcgactcatcaacaacaactggggattccggcccaagagactcagcttcaagctcttcaacatccaggtcaaagaggtcacgcagaatgaaggcaccaagaccatcgccaataacctcaccagcaccatccaggtgtttacggactcggaataccagctgccgtacgtcctcggctctgcccaccagggctgcctgcctccgttcccggcggacgtcttcatgattcctcagtacggctacctgactctcaacaacggtagtcaggccgtgggacgttcctccttctactgcctggagtacttcccctctcagatgctgagaacgggcaacaacttttccttcagctacactttcgaggacgtgcctttccacagcagctacgtgcacagccagagtttggacaggctgatgaatcctctcatcgaccagtacctgtactacctgtcaagaacccagtctacgggaggcacagcgggaacccagcagttgctgttttctcaggccgggcctagcaacatgtcggctcaggccagaaactggctgcctggaccctgctacagacagcagcgcgtctccacgacactgtcgcaaaacaacaacagcaactttgcctggactggtgccaccaagtatcatctgaacggcagagactctctggtgaattcgggcgtcgccatggcaaccaacaaggacgacgaggaccgcttcttcccatccagcggcatcctcatgtttggcaagcagggagctggaaaagacaacgtggactatagcaacgtgatgctaaccagcgaggaagaaatcaagaccaccaaccccgtggccacagaacagtatggcgtggtggctgataacctacagcagcaaaacaccgctcctattgtgggggccgtcaacagccagggagccttacctggcatggtctggcagaaccgggacgtgtacctgcagggtcctatttgggccaagattcctcacacagatggcaactttcacccgtctcctttaatgggcggctttggacttaaacatccgcctcctcagatcctcatcaaaaacactcctgttcctgcggatcctccaacagcgttcaaccaggccaagctgaattctttcatcacgcagtacagcaccggacaagtcagcgtggagatcgagtgggagctgcagaaggagaacagcaagcgctggaacccagagattcagtatacttccaactactacaaatctacaaatgtggactttgctgttaatactgagggtgtttactctgagcctcgccccattggcactcgttaccccacccgtaatctgtaa

SEQ ID NO: 466 - protein, 734 aa, Adeno-associated virus; identical to SEQ ID NO: 291

SEQ ID NO: 467 - DNA, 2214 bp, Adeno-associated virus
atggctgctgacggttatcttccagattggctcgaggacaacctctctgagggcattcgcgagtggtgggacctgaaacctggagccccgaaacccaaagccaaccagcagaagcaggacgacggccggggtctggtgcttcctggctacaagtacctcggacccttcaacggactcgacaagggggagcccgtcaacgcggcggacgcagcggccctcgagcacgacaaggcctacgaccagcagctcaaagcgggtgacaatccgtacctgcggtataaccacgccgacgccgagtttcaggagcgtctgcaagaagatacgtcttttgggggcaacctcgggcgagcagtcttccaggccaagaagcgggttctcgaacctctcggtctggttgaggaagctgctaagacggctcctggaaagaagagaccggtagaaccgtcacctcagcgttcccccgactcctccacgggcatcggcaagaaaggccagcagcccgctagaaagagactgaactttgggcagactggcgactcagagtcagtccccgaccctcaacctctcggagaaccaccagcaggcccctctggtctgggatctggtacaatggctgcaggcggtggcgctccaatggcagacaataacgaaggcgccgacggagtgggtaatgcctcaggaaattggcattgcgattccacatggctgggcgacagagtcatcaccaccagcacccgaacctgggctttgcccacctacaacaaccacctctacaagcaaatctccagtcagtcagcaggtagcaccaacgacaacgtctacttcggctacagcaccccctgggggtattttgacttcaacagattccactgtcacttctcaccacgtgactggcagcgactcatcaacaacaactggggattccggcccaagaagctcaacttcaagctcttcaacatccaagtcaaggaggtcacgacgaatgacggcgtcacgaccatcgctaataaccttaccagcacggttcaggtcttttcggactcggagtaccagctgccgtacgtcctcggctctgcccaccagggctgcctgcctccgttcccggcggacgtcttcatgattcctcagtacggctacctgactctgaacaatggcagccaatcggtgggacgttcatccttctactgcctggaatacttcccttctcaggtgctgagaacgggtaacaacttcaccttcagttacaccttcgaggacgtgcctttccacagcagctacgcgcacagccagagcctagaccggctgatgaatcccctcatcgaccagtacctgtattacctggctagaacacagagtaacccaggaggcacatctggcaatcgggaactgcagttttaccagggcgggccttccaccatggccgaacaagccaagaactggttacctggaccttgcttccggcaacaaagagtttccaaaacactggatcaaaacaacaacagcaactttgcttggactggtgccaccaaatatcacctgaacggcagaaactcattggtgaatcctggtgtcgccatggcaactcacaaggacgacgaggaccgctttttcccatccagcggagtcctgatttttggaaaaactggagcaaccaacaagactacattggaaaacgtgttaatgacaaatgaagaagaaattcgtcctactaatcctgtggccacagaagaatacgggatagtcagcagcaatttacaagcggccaatactgcagcccagacacaagttgtcaacaaccagggagccttacctggcatggtctggcagaaccgggacgtgtacctgcagggtcccatctgggccaaaattcctcacacagacggcaactttcacccgtctccgctgatgggcggctttggactgaagcatccgcctcctcagatcctgatcaaaaacactcctgttcctgctaatcccccggaggtgtttacgcctgccaagtttgcttctttcatcacacagtacagcaccggccaggtcagcgtggagatcgagtgggagctgcagaaggagaacagcaagcgctggaacccagagattcagtatacctccaattttgacaaacagactggtgtggactttgccgttgacagccagggtgtttattctgagcctcgccccattggtactcgttacctcacccgtaatctgtaa

SEQ ID NO: 468 - protein, 737 aa, Adeno-associated virus
MAADGYLPDWLEDNLSEGIREWWDLKPGAPKPKANQQKQDDGRGLVLPGYKYLGPFNGLDKGEPVNAADAAALEHDKAYDQQLKAGDNPYLRYNHADAEFQERLQEDTSFGGNLGRAVFQAKKRVLEPLGLVEEAAKTAPGKKRPVEPSPQRSPDSSTGIGKKGQQPARKRLNFGQTGDSESVPDPQPLGEPPAGPSGLGSGTMAAGGGAPMADNNEGADGVGNASGNWHCDSTWLGDRVITTSTRTWALPTYNNHLYKQISSQSAGSTNDNVYFGYSTPWGYFDFNRFHCHFSPRDWQRLINNNWGFRPKKLNFKLFNIQVKEVTTNDGVTTIANNLTSTVQVFSDSEYQLPYVLGSAHQGCLPPFPADVFMIPQYGYLTLNNGSQSVGRSSFYCLEYFPSQVLRTGNNFTFSYTFEDVPFHSSYAHSQSLDRLMNPLIDQYLYYLARTQSNPGGTSGNRELQFYQGGPSTMAEQAKNWLPGPCFRQQRVSKTLDQNNNSNFAWTGATKYHLNGRNSLVNPGVAMATHKDDEDRFFPSSGVLIFGKTGATNKTTLENVLMTNEEEIRPTNPVATEEYGIVSSNLQAANTAAQTQVVNNQGALPGMVWQNRDVYLQGPIWAKIPHTDGNFHPSPLMGGFGLKHPPPQILIKNTPVPANPPEVFTPAKFASFITQYSTGQVSVEIEWELQKENSKRWNPEIQYTSNFDKQTGVDFAVDSQGVYSEPRPIGTRYLTRNL

SEQ ID NO: 469 - DNA, 2214 bp, Adeno-associated virus
atggctgccgatggttatcttccagattggctcgaggacaacctctctgagggcattcgcgagtggtgggacctgaaacctggagccccgaaacccaaagccaaccagcaaaagcaggacgacggccggggtctggtgcttcctggctacaagtacctcggacccttcaacggactcgacaagggggagcccgtcaacgcggcggacgcagcggccctcgagcacgacaaggcctacgaccagcagctcaaagcgggtgacaatccgtacctgcggtataatcacgccgacgccgagtttcaggagcgtctgcaagaagatacgtcttttgggggcaacctcgggcgagcagtcttccaggccaagaagcgggttctcgaacctctcggtctggttgaggaaggcgctaagacggctcctggaaagaagagaccggtagagccgtcaccacagcgttcccccgactcctccacgggcatcggcaagaaaggccagcagcccgccagaaagagactcaatttcggtcagactggcgactcagagtcagtccccgaccctcaacctatcggagaacctccagcagcgccctctagtgtgggatctggtacaatggctgcaggcggtggcgcaccaatggcagacaataacgaaggtgccgacggagtgggtagttcctcgggaaattggcattgcgattccacacggctgggcgacagagtcatcaccaccagcacccggacctgggctttgcccacctacaacaaccacctctacaagcaaatctccagtcagtcagcaggtagcaccaacgacaacgtctacttcggctacagcaccccctgggggtattttgacttcaacagattccactgtcacttctcaccacgtgactggcagcggctcatcaacaacaactggggattccggcccaagaagctcaacttcaagctgttcaacatccaggtcaaggaggtcacaacgaatgacggcgtcacgaccatcgccaataaccttaccagcacggttcaggtcttttcggactcggaataccagctgccctacgtcctcggctccgcacaccagggctgcctgcctccgttcccggcggacgtcttcatgattccccagtacggctacctgactctgaacaatggcagccaatcggtgggtcgttcctctttctactgcctggaatatttcccttctcaaatgctgagaacgggcaacaacttcaccttcagctacaccttcgaggacgttcccttccacagcagctacgcacacagccagagcctggaccggctgatgaatcctcttatcgaccagtacctgtattacctggccagaacacagagcaacgcaggaggcacagctggcaatcgggaactgcagttttatcagggcgggcctaccaccatggccgaacaagccaaaaactggctgcctggaccttgcttccggcaacgaagagtctccaagacgctggatcaaaacaacaacagcaactttgcttggactggtgccaccaaataccatctaaatggaagaaattcattggttaatcccggtgtcgccatggcaacccacaaggacgacgaggaacgcttcttcccttcgagcggagtcctgatttttggaaaaactggagcagctaataagactacactggaaaatgtgttaatgacaaatgaagaggaaattcgtcctaccaacccggtagccaccgaggaatacgggactgttagcagcaacctgcaggcggctaacactgcagcccagacacaagttgtcaacaaccagggagccttacctggtatggtctggcagaaccgggacgtgtacctgcagggtcccatctgggccaagattcctcacacggacggcaactttcacccgtctccgctgatgggcggctttggactgaagcatccgcctcctcagatcctgatcaaaaacactcctgttcctgctaatcccccggaggtgtttacgcctgccaagtttgcttctttcatcacacagtacagcaccggccaggtcagcgtggagatcgagtgggagctgcagaaggagaacagcaagcgctggaacccagagattcagtatacctccaattttgacaaacagactggtgtggactttgccgttgacagccagggtgtttattctgagcctcgccccattggtactcgttacctcacccgtaatctgtaa

SEQ ID NO: 470 - protein, 737 aa, Adeno-associated virus
MAADGYLPDWLEDNLSEGIREWWDLKPGAPKPKANQQKQDDGRGLVLPGYKYLGPFNGLDKGEPVNAADAAALEHDKAYDQQLKAGDNPYLRYNHADAEFQERLQEDTSFGGNLGRAVFQAKKRVLEPLGLVEEGAKTAPGKKRPVEPSPQRSPDSSTGIGKKGQQPARKRLNFGQTGDSESVPDPQPIGEPPAAPSSVGSGTMAAGGGAPMADNNEGADGVGSSSGNWHCDSTRLGDRVITTSTRTWALPTYNNHLYKQISSQSAGSTNDNVYFGYSTPWGYFDFNRFHCHFSPRDWQRLINNNWGFRPKKLNFKLFNIQVKEVTTNDGVTTIANNLTSTVQVFSDSEYQLPYVLGSAHQGCLPPFPADVFMIPQYGYLTLNNGSQSVGRSSFYCLEYFPSQMLRTGNNFTFSYTFEDVPFHSSYAHSQSLDRLMNPLIDQYLYYLARTQSNAGGTAGNRELQFYQGGPTTMAEQAKNWLPGPCFRQRRVSKTLDQNNNSNFAWTGATKYHLNGRNSLVNPGVAMATHKDDEERFFPSSGVLIFGKTGAANKTTLENVLMTNEEEIRPTNPVATEEYGTVSSNLQAANTAAQTQVVNNQGALPGMVWQNRDVYLQGPIWAKIPHTDGNFHPSPLMGGFGLKHPPPQILIKNTPVPANPPEVFTPAKFASFITQYSTGQVSVEIEWELQKENSKRWNPEIQYTSNFDKQTGVDFAVDSQGVYSEPRPIGTRYLTRNL

SEQ ID NO: 471 - DNA, 2208 bp, Adeno-associated virus
atggctgccgatggttatcttccagattggctcgaggacactctctctgaaggaataagacagtggtggaagctcaaacctggcccaccaccaccaaagcccgcagagcggcataaggacgacagcaggggtcttgtgcttcctgggtacaagtacctcggacccttcaacggactcgacaagggggagccggtcaacgaggcagacgccgcggccctcgagcacgacaaggcctacgaccggcagctcgacagcggagacaacccgtacctcaagtacaaccacgccgacgcggagtttcaggagcgtcttaaagaagatacgtcttttgggggcaacctcggacgagcagtcttccaggcgaaaaagagggttcttgaacctctgggcctggttgaggaacctgttaagacggctccgggaaaaaagaggccggtagagcactctcctgcggagccagactcctcctcgggaaccggaaaagcgggccagcagcctgcaagaaaaagattgaattttggtcagactggagacgcagactccgtacctgacccccagcctctcggacagccaccagcagccccctctggtttgggatctactacaatggctacaggcagtggcgcaccaatggcagacaataacgagggtgccgatggagtgggtaattcttcaggaaattggcattgcgattcccaatggctgggcgacagagtcatcaccaccagcacccgaacctgggcccagcccacctacaacaaccacctctacaagcaaatctcaagccaatcaggagcctcaaacgacaaccactactttggctacagcaccccttgggggtattttgacttcaacagattccactgccacttttcaccacgtgactggcaaagactcatcaacaacaactggggattccgacccaagagactcaacttcaagctctttaacattcaagtcaaagaggtcacgcagaatgacggtacgacgacgattgccaataaccttaccagcacggttcaggtgtttactgactcggagtaccagctcccgtacgtcctcgggtcggcgcatcaaggatgcctcccgccgtttccagcggacgtcttcatggtcccacagtatggatacctcaccctgaacaacgggagtcaggcggtaggacgctcttccttttactgcctggagtactttccttctcagatgcttcgtactggaaacaactttcagttcagctacacctttgaagacgttcctttccacagcagctacgctcacagccagagtctggatcggctgatgaatcctctgatcgaccagtacctgtattatctgaacaaaacacaatcaaatagtggagctcttcagcagtctcggctactgtttagtcaagctggacccaccagcatgtctcttcaagctaaaaactggctacctggaccttgctacagacagcagcgtctgtcaaagcaggcaaacgacaacaacaacagcaactttccctggactgcggctacaaagtaccacctaaatggccgggactcgttggttaatccaggaccagctatggccagtcacaaagacgatgaagaaaagtttttccccatgcatggaaccctgatatttggtaaacaaggaacaaatgctaacgacgcggatttggacaatgtcatgattacagatgaagaagaaatccgcaccaccaatcccgtggctacggagcagtacggatatgtgtcaaataatttgcaaaactcaaatactggtccaactactggaactgtcaatcaccgaggagcgttacctggcatggtgtggcaggatcgagacgtgtacctgcagggacccatttgggccaagattcctcacaccgatggacactttcatccttctccactgatgggaggttttgggctcaaacacccgcctcctcagatcatgatcaaaaacactcccgttccagccaatcctcccacaaacttcagttctgccaagtttgcttctttcatcacacagtattccacggggcaggtcagcgtggagatcgagtgggagctgcagaaagagaacagcaaacgctggaatcccgaaattcagtacacttccaactacaacaaatctgttaatgtggactttactgtggacactaatggcgtgtattcagagcctcgccccattggcaccagatacctgactcgtaatctgtaa

SEQ ID NO: 472 - protein, 735 aa, Adeno-associated virus
MAADGYLPDWLEDTLSEGIRQWWKLKPGPPPPKPAERHKDDSRGLVLPGYKYLGPFNGLDKGEPVNEADAAALEHDKAYDRQLDSGDNPYLKYNHADAEFQERLKEDTSFGGNLGRAVFQAKKRVLEPLGLVEEPVKTAPGKKRPVEHSPAEPDSSSGTGKAGQQPARKRLNFGQTGDADSVPDPQPLGQPPAAPSGLGSTTMATGSGAPMADNNEGADGVGNSSGNWHCDSQWLGDRVITTSTRTWAQPTYNNHLYKQISSQSGASNDNHYFGYSTPWGYFDFNRFHCHFSPRDWQRLINNNWGFRPKRLNFKLFNIQVKEVTQNDGTTTIANNLTSTVQVFTDSEYQLPYVLGSAHQGCLPPFPADVFMVPQYGYLTLNNGSQAVGRSSFYCLEYFPSQMLRTGNNFQFSYTFEDVPFHSSYAHSQSLDRLMNPLIDQYLYYLNKTQSNSGALQQSRLLFSQAGPTSMSLQAKNWLPGPCYRQQRLSKQANDNNNSNFPWTAATKYHLNGRDSLVNPGPAMASHKDDEEKFFPMHGTLIFGKQGTNANDADLDNVMITDEEEIRTTNPVATEQYGYVSNNLQNSNTGPTTGTVNHRGALPGMVWQDRDVYLQGPIWAKIPHTDGHFHPSPLMGGFGLKHPPPQIMIKNTPVPANPPTNFSSAKFASFITQYSTGQVSVEIEWELQKENSKRWNPEIQYTSNYNKSVNVDFTVDTNGVYSEPRPIGTRYLTRNL

SEQ ID NO: 473 - DNA, 2217 bp, Adeno-associated virus
atggctgccgatggttatcttccagattggctcgaggacaacctctctgagggcattcgcgagtggtgggcgctgaaacctggagccccgaagcccaaagccaaccagcaaaagcaggacgacggccggggtctggtgcttcctggctacaagtacctcggacccttcaacggactcgacaagggggagcccgtcaacgcggcggacgcagcggccctcgagcacgacaaggcctacgaccagcagctgcaggcgggtgacaatccgtacctgcggtataatcacgccgacgccgagtttcaggagcgtctgcaagaagatacgtcttttgggggcaacctcgggcgagcagtcttccaggccaagaagcgggttctcgaacctctcggtctggttgaggaaggcgctaagacggctcctggaaagaagagaccggtagagccgtcaccacagcgttcccccgactcctccacgggcatcggcaagaaaggccagcagcccgccagaaagagactcaatttcggtcagactggcgactcagagtcagtccccgaccctcaacctatcggagaacctccagcagcgccctctagtgtgggatctggtacaatggctgcaggcggtggcgcgccaatggcagacaataacgaaggtgccgacggagtgggtagttcctcgggaaattggcattgcgattccacatggctgggcgacagagtcatcaccaccagcacccgaacctgggccctgcccacctacaacaaccacctctacaagcaaacctccaacgggacctcgggaggcagcaccaacgacaacacctactttggctacagcaccccctgggggtattttgactttaacagattccactgccacttctcaccacgtgactggcagcgactcatcaacaacaactggggattccggcccaagagactcagcttcaagctcttcaacatccaggtcaaagaggtcacgcagaatgaaggcaccaagaccatcgccaataacctcaccagcaccatccaggtgtttacggactcggaataccagctgccgtacgtcctcggctctgcccaccagggctgcctgcctccgttcccggcggacgtcttcatgattcctcagtacggctacctgactctcaacaacggtagtcaggccgtgggacgttcctccttctactgcctggagtacttcccctctcagatgctgagaacgggcaacaacttttccttcagctacactttcgaggacgtgcctttccacagcagctacgcgcacagccagagtttggacaggctgatgaatcctctcatcgaccagtacctgtactacctgtcaagaacccagtctacgggaggcacagcgggaacccagcagttgctgttttctcaggccgggcctagcaacatgtcggctcaggccagaaactggctgcctggaccctgctacagacagcagcgcgtctccacgacactgtcgcaaaacaacaacagcaactttgcctggactggtgccaccaagtatcatctgaacggcagagactctctggtgaatccgggcgtcgccatggcaaccaacaaggacgacgaggaccgcttcttcccatccagcggcatcctcatgtttggcaagcagggagctggaaaagacaacgtggactatagcaacgtgatgctaaccagcgaggaagaaatcaagaccaccaaccccgtggccacagaacagtatggcgtggtggctgataacctacagcagcaaaacaccgctcctattgtgggggccgtcaacagccagggagccttacctggcatggtctggcagaaccgggacgtgtacctgcagggtcctatttgggccaagattcctcacacagatggcaactttcacccgtctcctttaatgggcggctttggacttaaacatccgcctcctcagatcctcatcaaaaacactcctgttcctgcggatcctccaacagcgttcaaccaggccaagctgaattctttcatcacgcagtacagcaccggacaagtcagcgcggagatcgagtgggagctgcagaaggagaacagcaagcgctggaacccagagattcagtatacttccaactactacaaatctacaaatgtggactttgctgttaatactgagggtgtttactctgagcctcgccccattggcactcgttacctcacccgtaatctgtaa

SEQ ID NO: 474 - protein, 738 aa, Adeno-associated virus
MAADGYLPDWLEDNLSEGIREWWALKPGAPKPKANQQKQDDGRGLVLPGYKYLGPFNGLDKGEPVNAADAAALEHDKAYDQQLQAGDNPYLRYNHADAEFQERLQEDTSFGGNLGRAVFQAKKRVLEPLGLVEEGAKTAPGKKRPVEPSPQRSPDSSTGIGKKGQQPARKRLNFGQTGDSESVPDPQPIGEPPAAPSSVGSGTMAAGGGAPMADNNEGADGVGSSSGNWHCDSTWLGDRVITTSTRTWALPTYNNHLYKQTSNGTSGGSTNDNTYFGYSTPWGYFDFNRFHCHFSPRDWQRLINNNWGFRPKRLSFKLFNIQVKEVTQNEGTKTIANNLTSTIQVFTDSEYQLPYVLGSAHQGCLPPFPADVFMIPQYGYLTLNNGSQAVGRSSFYCLEYFPSQMLRTGNNFSFSYTFEDVPFHSSYAHSQSLDRLMNPLIDQYLYYLSRTQSTGGTAGTQQLLFSQAGPSNMSAQARNWLPGPCYRQQRVSTTLSQNNNSNFAWTGATKYHLNGRDSLVNPGVAMATNKDDEDRFFPSSGILMFGKQGAGKDNVDYSNVMLTSEEEIKTTNPVATEQYGVVADNLQQQNTAPIVGAVNSQGALPGMVWQNRDVYLQGPIWAKIPHTDGNFHPSPLMGGFGLKHPPPQILIKNTPVPADPPTAFNQAKLNSFITQYSTGQVSAEIEWELQKENSKRWNPEIQYTSNYYKSTNVDFAVNTEGVYSEPRPIGTRYLTRNL

SEQ ID NO: 475 - DNA, 2217 bp, Adeno-associated virus
atggctgctgacggttatcttccagattggctcgaggacaacctctctgagggcattcgcgagtggtgggacctgaaacctggagcccccaagcccaaggccaaccagcagaagcaggacgacggccggggtctggtgcttcctggctacaagtacctcggacccttcaacggactcgacaagggggagcccgtcaacgcggcggacgcagcggccctcgagcacgacaaggcctacgaccagcagctcaaagcgggtgacaatccgtacctgcggtataatcacgccgacgccgagtttcaggagcgtctgcaagaagatacgtcttttgggggcaacctcgggcgagcagtcttccaggccaagaagcgggttctcgaacctctcggtctggttgaggaagctgctaagacggctcctggaaagaagagaccggtagaaccgtcacctcagcgttcccccgactcctccacgggcatcggcaagaaaggccagcagcccgctagaaagagactgaactttgggcagactggcgactcagagtcagtccccgaccctcaaccaatcggagaacctccagcagcgccctctagtgtgggatctggtacaatggccgcaggcggtggcgcaccaatggcagacaataacgaaggtgccgacggagtgggtagttcctcgggaaattggcattgcgattccacatggctgggcgacagagtcatcaccaccagcacccgaacctgggccctgcccacctacaacaaccacctctacaagcaaatctccaacgggacctcgggaggcagcaccaacgacaacacctactttggctacagcaccccctgggggtattttgactttaacagattccactgccacttctcaccacgtgactggcagcgactcatcaacaacaactggggattccggcccaagagactcagcttcaagctcttcaacatccaggtcaaagaggtcacgcagaatgaaggcaccaagaccatcgccaataacctcaccagcaccatccaggtgtttacggactcggaataccagctgccgtacgtcctcggctctgcccaccagggctgcctgcctccgttcccggcggacgtcttcatgattcctcagtacggctacctgactctcaacaacggtagtcaggccgtgggacgttcctccttctactgcctggagtacttcccctctcagatgctgagaacgggcaacaacttttccttcagctacactttcgaggacgtgcctttccacagcagctacgcgcacagccagagtttggacaggctgatgaatcctctcatcgaccagtacctgtactacctgtcaagaacccagtctacgggaggcacagcgggaacccagcagctgctgttttctcaggccgggcctagcaacatgtcggctcaggccagaaactggctgcctggaccctgctacagacagcagcgcgtctccacgacactgtcgcaaaacaacaacagcaactttgcctggactggtgccaccaagtatcatctgaacggcagagactctctggtgaatccgggcgtcgccatggcaaccaacaaggacgacgaggaccgcttcttcccatccagcggcatcctcatgtttggcaagcagggagctggaaaagacaacgtggactatagcaacgtgatgctaaccagcgaggaagaaatcaagaccaccaaccccgtggccacagaacagtatggcgtggtggctgataacctacagcagcaaaacaccgctcctattgtgggggccgtcaacagccagggagccttacctggcatggtctggcagaaccgggacgtgtacctgcagggtcctatttgggccaagattcctcacacagatggcaactttcacccgtctcctttaatgggcggctttggacttaaacatccgcctcctcagatcctcatcaaaagcactcctgttcctgcggatcctccaacagcgttcaaccaggccaagctgaattctttcatcacgcagtacagcaccggacaagtcagcgtggagatcgagtgggagctgcagaaggagaacagcaagtgctggaacccagagattcagtatacttccaactactacaaatctacaaatgtggactttgctgttaatactgagggtgtttactctgagcctcgccccattggcactcgttacctcacccgtaatctgtaa

SEQ ID NO: 476 - protein, 738 aa, Adeno-associated virus
MAADGYLPDWLEDNLSEGIREWWDLKPGAPKPKANQQKQDDGRGLVLPGYKYLGPFNGLDKGEPVNAADAAALEHDKAYDQQLKAGDNPYLRYNHADAEFQERLQEDTSFGGNLGRAVFQAKKRVLEPLGLVEEAAKTAPGKKRPVEPSPQRSPDSSTGIGKKGQQPARKRLNFGQTGDSESVPDPQPIGEPPAAPSSVGSGTMAAGGGAPMADNNEGADGVGSSSGNWHCDSTWLGDRVITTSTRTWALPTYNNHLYKQISNGTSGGSTNDNTYFGYSTPWGYFDFNRFHCHFSPRDWQRLINNNWGFRPKRLSFKLFNIQVKEVTQNEGTKTIANNLTSTIQVFTDSEYQLPYVLGSAHQGCLPPFPADVFMIPQYGYLTLNNGSQAVGRSSFYCLEYFPSQMLRTGNNFSFSYTFEDVPFHSSYAHSQSLDRLMNPLIDQYLYYLSRTQSTGGTAGTQQLLFSQAGPSNMSAQARNWLPGPCYRQQRVSTTLSQNNNSNFAWTGATKYHLNGRDSLVNPGVAMATNKDDEDRFFPSSGILMFGKQGAGKDNVDYSNVMLTSEEEIKTTNPVATEQYGVVADNLQQQNTAPIVGAVNSQGALPGMVWQNRDVYLQGPIWAKIPHTDGNFHPSPLMGGFGLKHPPPQILIKSTPVPADPPTAFNQAKLNSFITQYSTGQVSVEIEWELQKENSKCWNPEIQYTSNYYKSTNVDFAVNTEGVYSEPRPIGTRYLTRNL

SEQ ID NO: 477 - protein, 738 aa, Adeno-associated virus
MAADGYLPDWLEDNLSEGIREWWDLKPGAPKPKANQQKQDDGRGLVLPGYKYLGPFNGLDKGEPVNAADAAALEHDKAYDQQLKAGDNPYLRYNHADAEFQERLQEDTSFGGNLGRAVFQAKKRVLEPLGLVEEAAKTAPGKKRPVEPSPQRSPDSSTGIGKKGQQPARKRLNFGQTGDSESVPDPQPIGEPPAAPSSVGSGTMAAGGGAPMADNNEGADGVGSSSGNWHCDSTWLGDRVITTSTRTWALPTYNNHLYKQISNGTSGGSTNDNTYFGYSTPWGYFDFNRFHCHFSPRDWQRLINNNWGFRPKRLSFKLFNIQVKEVTQNEGTKTIANNLTSTIQVFTDSEYQLPYVLGSAHQGCLPPFPADVFMIPQYGYLTLNNGSQAVGRSSFYCLEYFPSQMLRTGNNFSFSYTFEDVPFHSSYAHSQSLDRLMNPLIDQYLYYLSRTQSTGGTAGTQQLLFSQAGPSNMSAQARNWLPGPCYRQQRVSTTLSQNNNSNFAWTGATKYHLNGRDSLVNPGVAMATNKDDEDRFFPSSGILMFGKQGAGKDNVDYSNVMLTSEEEIKTTNPVATEQYGVVADNLQQQNTAPIVGAVNSQGALPGMVWQNRDVYLQGPIWAKIPHTDGNFHPSPLMGGFGLKHPPPQILIKSTPVPADPPTAFNQAKLNSFITQYSTGQVSVEIEWELQKENSKRWNPEIQYTSNYYKSTNVDFAVNTEGVYSEPRPIGTRYLTRNL

SEQ ID NO: 478 - DNA, 2217 bp, Adeno-associated virus
atggctgctgacggttatcttccagattggctcgaggacaacctctctgagggcattcgcgagtggtgggacctgaaacctggagcccccaagcccaaggccaaccagcagaagcaggacgacggccggggtctggtgcttcctggctacaagtacctcggacccttcaacggactcgacaagggggagcccgtcaacgcggcggacgcagcggccctcgagcacgacaaggcctacgaccagcagctcaaagcgggtgacaatccgtacctgcggtataaccacgccgacgccgagtttcaggagcgtctgcaagaagatacgtcttttgggggcaacctcgggcgagcagtcttccaggccaagaagcgggttctcgaacctctcggtctggttgaggaagctgctaagacggctcctggaaagaagagaccggtagaaccgtcacctcagcgttcccccgactcctccacgggcatcggcaagaaaggccagcagcccgctagaaagagactgaactttgggcagactggcgactcagagtcagtccccgaccctcaaccaatcggagaaccaccagcaggcccctctggtctgggatctggtacaatggctgcaggcggtggcgcaccaatggctgacaataacgagggcgccgacggagtgggtaatgcctcaggaaattggcattgcgattccacatggctgggcgacagagtcatcaccaccagcacccgaacctgggctttgcccacctacaacaaccacctctacaagcaaatctccagtcagtcagcaggtagcaccaacgacaacgtctacttcggctacagcaccccctgggggtattttgacttcaacagattccactgtcacttctcaccacgtgactggcagcggctcatcaacaacaactggggattccggcccaagaagctcaacttcaagctgttcaacatccaggtcaaggaggtcacaacgaatgacggcgtcacgaccatcgccaataaccctaccagcacggttcaggtcttttcggactcggaataccagctgccctacgtcctcggctccgcacaccagggctgcctgcctccgttcccggcggacgtcttcatgattccccagtacggctacctgactctgaacaatggcagccaatcggtgggtcgttcctctttctactgcctggaatatttcccttctcaaatgctgagaacgggcaacaacttcaccttcagctacaccttcgaggacgttcccttccacagcagctacgcacacagccagagcctggaccggctgatgaatcctcttatcgaccagtacctgtattacctggccagaacacagagcaacgcaggaggcacagctggcaatcgggaactgcagttttatcagggcgggcctaccaccatggccgaacaagccaaaaactggctgcctggaccctgctacagacagcagcgcgtctccacgacactgtcgcaaaacaacaacagcaactttgcctggactggtgccaccaagtatcatctgaacggcagagactctctggtgaatccgggcgtcgccatggcaaccaacaaggacgacgaggaccgcttcttcccatccagcggcatcctcatgtttggcaagcagggagctggaaaagacaacgtggactatagcaacgtgatgctaaccagcgaggaagaaatcaagaccaccaaccccgtggccacagaacagtatggcgtggtggctgataacctacagcagcaaaacaccgctcctattgtgggggccgtcaacagccagggagccttacctggcatggtctggcagaaccgggacgtgtacctgcagggtcctatttgggccaagattcctcacacagatggcaactttcacccgtctcctttaatgggcggctttggacttaaacatccgcctcctcagatcctcatcaaaaacactcctgttcctgcggatcctccaacagcgttcaaccaggccaagctgaattctttcatcacgcagtacagcaccggacaagtcagcgtggagatcgagtgggagctgcagaaggagaacagcaagcgctggaacccagagattcagtatacttccaactactacaaatctacaaatgtggactttgctgttaatactgagggtgtttactctgagcctcgccccattggcactcgttacctcacccgtaatctgtaa

SEQ ID NO: 479 - protein, 738 aa, Adeno-associated virus
MAADGYLPDWLEDNLSEGIREWWDLKPGAPKPKANQQKQDDGRGLVLPGYKYLGPFNGLDKGEPVNAADAAALEHDKAYDQQLKAGDNPYLRYNHADAEFQERLQEDTSFGGNLGRAVFQAKKRVLEPLGLVEEAAKTAPGKKRPVEPSPQRSPDSSTGIGKKGQQPARKRLNFGQTGDSESVPDPQPIGEPPAGPSGLGSGTMAAGGGAPMADNNEGADGVGNASGNWHCDSTWLGDRVITTSTRTWALPTYNNHLYKQISSQSAGSTNDNVYFGYSTPWGYFDFNRFHCHFSPRDWQRLINNNWGFRPKKLNFKLFNIQVKEVTTNDGVTTIANNPTSTVQVFSDSEYQLPYVLGSAHQGCLPPFPADVFMIPQYGYLTLNNGSQSVGRSSFYCLEYFPSQMLRTGNNFTFSYTFEDVPFHSSYAHSQSLDRLMNPLIDQYLYYLARTQSNAGGTAGNRELQFYQGGPTTMAEQAKNWLPGPCYRQQRVSTTLSQNNNSNFAWTGATKYHLNGRDSLVNPGVAMATNKDDEDRFFPSSGILMFGKQGAGKDNVDYSNVMLTSEEEIKTTNPVATEQYGVVADNLQQQNTAPIVGAVNSQGALPGMVWQNRDVYLQGPIWAKIPHTDGNFHPSPLMGGFGLKHPPPQILIKNTPVPADPPTAFNQAKLNSFITQYSTGQVSVEIEWELQKENSKRWNPEIQYTSNYYKSTNVDFAVNTEGVYSEPRPIGTRYLTRNL

SEQ ID NO: 480 - DNA, 2208 bp, Adeno-associated virus
atggctgccgatggttatcttccagattggctcgaggacaacctctctgagggcattcacgagtggtgggacccgaaacctggagccccgaaacccaaagccaaccagcaaaagcaggacgacggccggggtctggtgcttcctggctacaagtacctcggacccttcaacggactcgacaagggggagcccgtcaacgcggcggacgcagcggccctcgagcacgacaaggcctacgaccagcagctcaaagcgggtgacaatccgtacctgcggtataatcacgccgacgccgagtttcaggagcgtctgcaagaagatacgtcttttgggggcaacctcgggcgagcagtcttccaggccaagaagcgggttctcgaacctctcggtctggttgaggaaggcgctaagacggctcctggaaagaagagaccggtagagccgtcaccacagcgttcccccgactcctccacgggcatcggcaagaaaggccagcagcccgccagaaagagactcaatttcggtcagactggcgactcagagtcagtccccgaccctcaacctatcggagaacctccagcagcgccctctagtgtgggatctggtacaatggctgcaggcggtggcgcaccaatggcagacaataacgaaggtgccgacggagtgggtagttcctcgggaaattggcattgcgattccacatggctgggcgacagagtcatcaccaccagcacccgaacctgggccctgcccacccacaacaaccacctctacaagcaaatctccaacgggacctcgggaggcagcaccaacgacaacgtctacttcggctacagcaccccctgggggtattttgacttcaacagattccactgtcacttctcaccacgtgaccggcagcgactcatcaacaacaactggggattccggcccaagagactcagcttcaagctcttcaacatccaggtcaaagaggtcacgcagaatgaaggcaccaagaccatcgccaataacctcaccagcaccatccaggtgtttacggactcggaataccagctgccgtacgtcctcggctctgcccaccagggctgcctgcctccgttcccggcggacgtcttcatgattcctcagtacggctacctgactctcaacaacggtagtcaggccgtgggacgttcctccttctactgcctggagtacttcccctctcagatgctgagaacgggcaacaacttttccttcagctacactttcgaggacgtgcctttccacagcagctacgcgcacagccagagtttggacaggctgatgaatcctctcatcgaccagtacctgtactacctgtcaagaacccagtctacggaaggcacagcgggaacccagcagttgctgttttctcaggccgggcctagcaacatgtcggctcaggccagaaactggctgcctggaccctgctacagacagcagcgcgtctccacgacactgtcgcaaaacaacaacagcaactttgcctggactggtgccaccaagtatcatctgaacggcagagactctctggtgaatccgggcgtcgccatggcaacccacaaggacgacgaggaacgcttcttcccttcgagcggagtcctgatttttggaaaaactggagcagctaataagactacactggaaaatgtgttaatgacaaatgaagaggaaattcgtcctaccaacccggtagccaccgaggaatacgggactgttagcagcaacctgcaggcggctaacactgcagcccagacacaagttgtcaacaaccagggagccttacctggtatggtctggcagaaccgggacgtgtacctgcagggtcccatctgggccaagattcctcacacggacggcaactttcacccgtctccgctgatgggcggctttggactgaagcatcctcagatcctgatcaaaaacactcctgttcctgctaatcccccggaggtgtttacgcctgccaagtttgcttctttcatcacacagtacagcaccggccaggtcagcgtggagatcgagtgggagctgcagaaggagaacagcaagcgctggaacccagagattcagtatacctccaattttgacaaacagactggtgtggactttgccgttgacagccagggtgtttattctgagcctcgccccattggtactcgttacctcacccgtaatctgtaa

SEQ ID NO: 481 - protein, 735 aa, Adeno-associated virus
MAADGYLPDWLEDNLSEGIHEWWDPKPGAPKPKANQQKQDDGRGLVLPGYKYLGPFNGLDKGEPVNAADAAALEHDKAYDQQLKAGDNPYLRYNHADAEFQERLQEDTSFGGNLGRAVFQAKKRVLEPLGLVEEGAKTAPGKKRPVEPSPQRSPDSSTGIGKKGQQPARKRLNFGQTGDSESVPDPQPIGEPPAAPSSVGSGTMAAGGGAPMADNNEGADGVGSSSGNWHCDSTWLGDRVITTSTRTWALPTHNNHLYKQISNGTSGGSTNDNVYFGYSTPWGYFDFNRFHCHFSPRDRQRLINNNWGFRPKRLSFKLFNIQVKEVTQNEGTKTIANNLTSTIQVFTDSEYQLPYVLGSAHQGCLPPFPADVFMIPQYGYLTLNNGSQAVGRSSFYCLEYFPSQMLRTGNNFSFSYTFEDVPFHSSYAHSQSLDRLMNPLIDQYLYYLSRTQSTEGTAGTQQLLFSQAGPSNMSAQARNWLPGPCYRQQRVSTTLSQNNNSNFAWTGATKYHLNGRDSLVNPGVAMATHKDDEERFFPSSGVLIFGKTGAANKTTLENVLMTNEEEIRPTNPVATEEYGTVSSNLQAANTAAQTQVVNNQGALPGMVWQNRDVYLQGPIWAKIPHTDGNFHPSPLMGGFGLKHPQILIKNTPVPANPPEVFTPAKFASFITQYSTGQVSVEIEWELQKENSKRWNPEIQYTSNFDKQTGVDFAVDSQGVYSEPRPIGTRYLTRNL

SEQ ID NO: 482 - protein, 738 aa, Adeno-associated virus
MAADGYLPDWLEDNLSEGIREWWDLKPGAPKPKANQQKQDDGRGLVLPGYKYLGPFNGLDKGEPVNAADAAALEHDKAYDQQLKAGDNPYLRYNHADAEFQERLQEDTSFGGNLGRAVFQAKKRVLEPLGLVEEGAKTAPGKKRPVEPSPQRSPDSSTGIGKKGQQPARKRLNFGQTGDSESVPDPQPIGEPPAAPSSVGSGTMAAGGGAPMADNNEGADGVGSSSGNWHCDSTWLGDRVITTSTRTWALPTYNNHLYKQISNGTSGGSTNDNTYFGYSTPWGYFDFNRFHCHFSPRDWQRPINNNWGFRPKRLSFKLFNIQVKEVTQNEGTKTIANNLTSTIQVFTDSEYQLPYVLGSAHQGCLPPFPADVFMIPQYGYLTLNNGSQAVGRSSFYCLEYFPSQMLRTGNNFSFSYPFEDVPFHSSYAHSQSLDRLMNPLIDQYLYYLSRTQSTGGTAGTQQLLFSQAGPSNMSAQARNWLPGPCYRQQRVSTTLSQNNNSNFAWTGATKYHLNGRDSLVNPGVAMATNKDDEDRFFPSSGILMFGKQGAGKDNVDYSNVMLTSEEEIKTTNPVATEQYGVVADNLQQQDTAPIVGAVNSQGALPGMVWQNRDVYLQGPIWAKIPHTDGNFHPSPLMGGFGLKHPPPQVLIKNTPVPADPPTAFNQAKLNSFITQYSTGQVSVEIEWELQKENSKRWNPEIQYTSNYYKSTNVDFAVNTEGVYSEPRPIGTRYLTRNL

SEQ ID NO: 483 - DNA, 2217 bp, Adeno-associated virus
atggctgccgatggttatcttccagattggctcgaggacaacctctctgagggcattcgcgagtggtgggacctgaaacctggagccccgaaacccaaggccaaccagcaaaagcaggacgacggccggggtctggtgcttcctggctacaagtacctcggacccttcaacggactcgacaagggggagcccgtcaacgcggcggacgcagcggccctcgagcacgacaaggcctacgaccagcagctcaaagcgggtgacaatccgtacctgcggtataatcacgccgacgccgagtttcaggagcgtctgcaagaagatacgtcttttgggggcaacctcgggcgagcagtcttccaggccaagaagcgggttctcgaacctctcggtctggttgaggaaggcgctaagacggctcctggaaagaagagaccggtagagccgtcaccacagcgttcccccgactcctccacgggcatcggcaagaaaggccagcagcccgccagaaagagactcaatttcggtcagactggcgactcagagtcagtccccgaccctcaacctatcggagaacctccagcagcgccctctagtgtgggatctggtacaatggctgcaggcggtggcgcaccaatggcagacaataacgaaggtgccgacggagtgggtagttcctcgggaaattggcattgcgattccacatggctgggcgacagagtcatcaccaccagcacccgaacctgggccctgcccacctacaacaaccacctctacaagcaaatctccaacgggacctcgggaggcagcaccaacgacaacacctactttggctacagcaccccctgggggtattttgactttaacagattccactgccacttctcaccacgtgactggcagcgacccatcaacaacaactggggattccggcccaagagactcagcttcaagctcttcaacatccaggtcaaagaggtcacgcagaatgaaggcaccaagaccatcgccaataacctcaccagcaccatccaggtgtttacggactcggaataccagctgccgtacgtcctcggctctgcccaccagggctgcctgcctccgttcccggcggacgtcttcatgattcctcagtacggctacctgactctcaacaacggtagtcaggccgtgggacgttcctccttctactgcctggagtacttcccctctcagatgctgagaacgggcaacaacttttccttcagctaccctttcgaggacgtgcctttccacagcagctacgcgcacagccagagtttggacaggctgatgaatcctctcatcgaccagtacctgtactacctgtcaagaacccagtctacgggaggcacagcgggaacccagcagttgctgttttctcaggccgggcctagcaacatgtcggctcaggccagaaactggctgcctggaccctgctacagacagcagcgcgtctccacgacactgtcgcaaaacaacaacagcaactttgcctggactggtgccaccaagtatcatctgaacggcagagactctctggtgaatccgggcgtcgccatggcaaccaacaaggacgacgaggaccgcttcttcccatccagcggcatcctcatgtttggcaagcagggagctggaaaagacaacgtggactatagcaacgtgatgctaaccagcgaggaagaaatcaagaccaccaaccccgtggccacagaacagtatggcgtggtggctgataacctacagcagcaagacaccgctcctattgtgggggccgtcaacagccagggagccttacctggcatggtctggcagaaccgggacgtgtacctgcagggtcctatttgggccaagattcctcacacagatggcaactttcacccgtctcctttaatgggcggctttggacttaaacatccgcctcctcaggtcctcatcaaaaacactcctgttcctgcggatcctccaacagcgttcaaccaggccaagctgaattctttcatcacgcagtacagcaccggacaagtcagcgtggagatcgagtgggagctgcagaaggagaacagcaagcgctggaacccagagattcagtatacttccaactactacaaatctacaaatgtggactttgctgttaatactgagggtgtttactctgagcctcgccccattggcactcgttacctcacccgtaatctgtaa

SEQ ID NO: 484 - DNA, 2214 bp, Adeno-associated virus
atggctgctgacggttatcttccagattggctcgaggacaacctctctgagggcattcgcgagtggtgggacctgaaacctggagcccccaagcccaaggccaaccagcagaagcaggacgacggccggggtctggtgcttcctggctacaagtacctcggacccttcaacggactcgacaagggggagcccgtcaacgcggcggacgcagcggccctcgagcacgacaaggcctacgaccagcagctcaaagcgggtgacaatccgtacctgcggtataaccacgccgacgccgagttccaggagcgtctgcaagaagatacgtcttttgggggcaacctcgggcgagcagtcttccaggccaagaagcgggttctcgaacctctcggtctggctgaggaagctgctaagacggctcctggaaagaagagaccggtagaaccgtcacctcagcgttcccccgactcctccacgggcatcggcaagaaaggccagcagcccgctagaaagagactgaactttgggcagactggcgactcagagtcagtccccgaccctcaaccaatcggagagccaccagcaggcccctctggtctgggatctggtacaatggctgcaggcggtggcgcaccaatggctgacaataacaagggcgccgacggagtgggtaatgcctcaggaaattggcattgcgattccacatggctgggcgacagagtcatcaccaccagcacccgaacctgggctttgcccacctacaacaaccacctctacaagcaaatctccagtcagtcagcaggtagcaccaacgacaacgtctacttcggctacagcaccccctgggggtattttgacttcaacagattccactgtcacttctcaccacgtgactggcagcggctcatcaacaacaactggggattccggcccaagaagctcaacttcaagctgttcaacatccaggtcaaggaggtcacaacgggtgacggcgtcacgaccatcgccaataaccttaccagcacggttcaggtcttttcggactcggaataccagctgccctacgtcctcggctccgcacaccagggctgcctgcctccgttcccggcggacgtcttcatgattccccagtacggctacctgactctgaacaatgacagccaatcggtgggtcgttcctctttctactgcctggaatatttcccttctcaaatgctgagaacgggcaacaacttcaccttcagctacaccttcgaggacgttcccttccacagcagctacgcacacagccagagcctggaccggctgatgaatcctcttatcgaccagtacctgtattacctggccagaacacagagcaacgcaggaggcacagctggcaatcgggaactgcagttttatcagggcgggcctaccaccatggccgaacaagccaaaaactggctgcctggaccttgcttccggcaacaaagagtctccaagacgctggatcaaaacaacaacagcaactttgcttggactggtgccaccaaataccatctaaatggaagaaattcattggttaatcccggtgtcgccatggcaacccacaaggacgacgaggaacgcttcttcccttcgagcggagtcctgatttttggaaaaactggagcagctaataagactacactggaaaatgtgttaatgacaaatgaagaggaaattcgtcctaccaacccggtagccaccgaggaatacgggactgttagcagcaacctgcaggcggctaacactgcagcccagacacaagttgtcaacaaccagggagccttacctggtatggtctggcagaaccgggacgtgtacctgcagggtcccatctgggccaagattcctcacacggacggcaactttcacccgtctccgctgatgggcggctttggactgaagcatccgcctcctcagatcctgatcaaaaacactcctgttcctgctaatcccccggaggtgtttacgcctgccaagtttgcttctttcatcacacagtacagcaccggccaggtcagcgtggagatcgagtgggagctgcagaaggagaacagcaagcgctggaacccagagattcagtatacctccaattttgacaaacagactggtgtggactttgccgttgacagccagggtgtttattctgagcctcgccccattggtactcgttacctcacccgtaatctgtaa

SEQ ID NO: 485 - protein, 737 aa, Adeno-associated virus
MAADGYLPDWLEDNLSEGIREWWDLKPGAPKPKANQQKQDDGRGLVLPGYKYLGPFNGLDKGEPVNAADAAALEHDKAYDQQLKAGDNPYLRYNHADAEFQERLQEDTSFGGNLGRAVFQAKKRVLEPLGLAEEAAKTAPGKKRPVEPSPQRSPDSSTGIGKKGQQPARKRLNFGQTGDSESVPDPQPIGEPPAGPSGLGSGTMAAGGGAPMADNNKGADGVGNASGNWHCDSTWLGDRVITTSTRTWALPTYNNHLYKQISSQSAGSTNDNVYFGYSTPWGYFDFNRFHCHFSPRDWQRLINNNWGFRPKKLNFKLFNIQVKEVTTGDGVTTIANNLTSTVQVFSDSEYQLPYVLGSAHQGCLPPFPADVFMIPQYGYLTLNNDSQSVGRSSFYCLEYFPSQMLRTGNNFTFSYTFEDVPFHSSYAHSQSLDRLMNPLIDQYLYYLARTQSNAGGTAGNRELQFYQGGPTTMAEQAKNWLPGPCFRQQRVSKTLDQNNNSNFAWTGATKYHLNGRNSLVNPGVAMATHKDDEERFFPSSGVLIFGKTGAANKTTLENVLMTNEEEIRPTNPVATEEYGTVSSNLQAANTAAQTQVVNNQGALPGMVWQNRDVYLQGPIWAKIPHTDGNFHPSPLMGGFGLKHPPPQILIKNTPVPANPPEVFTPAKFASFITQYSTGQVSVEIEWELQKENSKRWNPEIQYTSNFDKQTGVDFAVDSQGVYSEPRPIGTRYLTRNL

SEQ ID NO: 486 - DNA, 2217 bp, Adeno-associated virus
atggctgccgatggttatcttccagattggctcgaggacaacctctctgagggcattcgcgagtggtgggacctgaaacctggagccccgaaacccaaagccaaccagcaaaagcaggacgacggccggggtctggtgcttcctggctacaagtacctcggacccttcaacggactcgacaagggggagcccgtcaacgcggcggacgcagcggccctcgagcacgacaaggcctacgaccagcagctcaaagcgggtgacaatccgtacctgcggtataatcacgccgacgccgagtttcaggagcgtctgcaagaagatacgtcttttgggggcaacctcgggcgagcagtcttccaggccaagaagcgggttctcgaacctctcggtctggttgaggaaggcgctaagacggctcctggaaagaagagaccggtagagccgtcaccacagcgttcccccgactcctccacgggcatcggcaagaaaggccagcagcccgccagaaagagactcaatttcggtcagactggcgactcagagtcagtccccgaccctcaacctatcggagaacctccagcagcgccctctagtgtgggatctggtacaatggctgcaggcggtggcgcaccaatggcagacaataacgaaggtgccgacggagtgggtagttcctcgggaaattggcattgcgattccacatggctgggcgacagagtcatcaccaccagcacccgaacctgggccctgcccacctacaacaaccacctctacaagcaaatctccaacgggacctcgggaggcagcaccaacgacaacacctactttggctacagcaccccctgggggtattttgactttaacagattccactgccacttctcaccacgtgactggcagcgactcatcaacaacaactggggattccggcccaagagactcagcttcaagctcttcaacatccaggtcaaagaggtcacgcagaatgaaggcaccaagaccatcgccaataacctcaccagcaccatccaggtgtttacggactcggaataccagctgccgtacgtcctcggctctgcccaccagggctgcctgcctccgttcccggcggacgtcttcatgattcctcagtacggctacctgactctcaacaacggtagtcaggccgtgggacgttcctccttctactgcctggagtacttcccctctcagatgctgagaacgggcaacaacttttccttcagctacactttcgaggacgtgcctttccacagcagctacgcgcacagccagagtttggacaggctgatgaatcctctcatcgaccagtacctgtactacctgtcaagaacccagtctacgggaggcacagcgggaacccagcagttgctgttttctcaggccgggcctagcaacatgtcggctcaggccagaaactggctgcctggaccctgctacagacagcagcgcgtctccacgacactgtcgcaaaacaacaacagcaactttgcctggactggtgccaccaagtatcatctgaacggcagagactctctggtgaatccgggcgtcgccatggcaaccaacaaggacgacgaggaccgcttcttcccatccagcggcatcctcatgtttggcaagcagggagctggaaaagacaacgtggactatagcaacgtgatgctaaccagcgaggaagaaatcaagaccaccaaccccgtggccacagaacagtatggcgtggtggctgataacctacagcagcaaaacaccgctcctattgtgggggccgtcaacagccagggagccttacctggcatggtctggcagaaccgggacgtgtacctgcagggtcctatttgggccaagattcctcacacagatggcaactttcacccgtctcctttaatgggcggctttggacttaaacatccgcctcctcagatcctcatcaaaaacactcctgttcctgcggatcctccaacagcgttcaaccaggccaagctgaattctttcatcacgcagtacagcaccggacaagtcagcgtggagatcgtgtgggagctgcagaaggagaacagcaagcgcaggaacccagagattcagtatacttccaactactacaaatctacaaatgtggactttgctgttaatactgagggtgtttactctgagcctcgccccattggcactcgttacctcacccgtaatctgtaa

SEQ ID NO: 487 - protein, 738 aa, Adeno-associated virus
MAADGYLPDWLEDNLSEGIREWWDLKPGAPKPKANQQKQDDGRGLVLPGYKYLGPFNGLDKGEPVNAADAAALEHDKAYDQQLKAGDNPYLRYNHADAEFQERLQEDTSFGGNLGRAVFQAKKRVLEPLGLVEEGAKTAPGKKRPVEPSPQRSPDSSTGIGKKGQQPARKRLNFGQTGDSESVPDPQPIGEPPAAPSSVGSGTMAAGGGAPMADNNEGADGVGSSSGNWHCDSTWLGDRVITTSTRTWALPTYNNHLYKQISNGTSGGSTNDNTYFGYSTPWGYFDFNRFHCHFSPRDWQRLINNNWGFRPKRLSFKLFNIQVKEVTQNEGTKTIANNLTSTIQVFTDSEYQLPYVLGSAHQGCLPPFPADVFMIPQYGYLTLNNGSQAVGRSSFYCLEYFPSQMLRTGNNFSFSYTFEDVPFHSSYAHSQSLDRLMNPLIDQYLYYLSRTQSTGGTAGTQQLLFSQAGPSNMSAQARNWLPGPCYRQQRVSTTLSQNNNSNFAWTGATKYHLNGRDSLVNPGVAMATNKDDEDRFFPSSGILMFGKQGAGKDNVDYSNVMLTSEEEIKTTNPVATEQYGVVADNLQQQNTAPIVGAVNSQGALPGMVWQNRDVYLQGPIWAKIPHTDGNFHPSPLMGGFGLKHPPPQILIKNTPVPADPPTAFNQAKLNSFITQYSTGQVSVEIVWELQKENSKRRNPEIQYTSNYYKSTNVDFAVNTEGVYSEPRPIGTRYLTRNL

SEQ ID NO: 488 - protein, 738 aa, Adeno-associated virus
MAADGYLPDWLEDNLSEGIREWWDLKPGAPKPKANQQKQDDGRGLVLPGYKYLGPFNGLDKGEPVNAADAAALEHDKAYDQQLKAGDNPYLRYNHADAEFQERLQEDTSFGGNLGRAVFQAKKRVLEPLGLVEEGAKTAPGKKRPVEPSPQRSPDSSTGIGKKGQQPARKRLNFGQTGDSESVPDPQPIGEPPAAPSSVGSGTMAAGGGAPMADNNEGADGVGSSSGNWHCDSTWLGDRVITTSTRTWALPTYNNHLYKQISNGTSGGSTNDNTYFGYSTPWGYFDFNRFHCHFSPRDWQRLINNNWGFRPKRLSFKLFNIQVKEVTQNEGTKTIANNLTSTIQVFTDSEYQLPYVLGSAHQGCLPPFPADVFMIPQYGYLTLNNGSQAVGRSSFYCLEYFPSQMLRTGNNFSFSYTFEDVPFHSSYAHSQSLDRLMNPLIDQYLYYLSRTQSTGGTAGTQQLLFSQAGPSNMSAQARNWLPGPCYRQQRVSTTLSQNNNSNFAWTGATKYHLNGRDSLVNPGVAMATNKDDEDRFFPSSGILMFGKQGAGKDNVDYSNVMLTSEEEIKTTNPVATEQYGVVADNLQQQNTAPIVGAVNSQGALPGMVWQNRDVYLQGPIWAKIPHTDGNFHPSPLMGGFGLKHPPPQILIKNTPVPADPPTAFNQAKLNSFITQYSTGQVSVEIEWELQKENSKRWNPEIQYTSNYYKSTNVDFAVNTEGVYSEPRPIGTRYLTRNL

SEQ ID NO: 489 - protein, 738 aa, Adeno-associated virus
MAADGYLPDWLEDNLSEGIREWWDLKPGAPKPKANQQKQDDGRGLVLPGYKYLGPFNGLDKGEPVNAADAAALEHDKAYDQQLKAGDNPYLRYNHADAEFQERLQEDTSFGGNLGRAVFQAKKRVLEPLGLVEEGAKTAPGKKRPVEPSPQRSPDSSTGIGKKGQQPARKRLNFGQTGDSESVPDPQPIGEPPAAPSSVGSGTMAAGGGAPMADNNEGADGVGSSSGNWHCDSTWLGDRVITTSTRTWALPTYNNHLYKQISNGTSGGSTNDNTYFGYSTPWGYFDFNRFHCHFSPRDWQRLINNNWGFRPKRLSFKLFNIQVKEVTQNEGTKTIANNLTSTIQVFTDSEYQLPYVLGSAHQGCLPPFPADVFMIPQYGYLTLNNGSQAVGRSSFYCLEYFPSQMLRTGNNFSFSYTFEDVPFHSSYAHSQSLDRLMNPLIDQYLYYLSRTQSTGGTAGTQQLLFSQAGPSNMSAQARNWLPGPCYRQQRVSTTLSQNNNSNFAWTGATKYHLNGRDSLVNPGVAMATNKDDEDRFFPSSGILMFGKQGAGKDNVDYSNVMLTSEEEIKTTNPVATEQYGVVADNLQQQNTAPIVGAVNSQGALPGMVWQNRDVYLQGPIWAKIPHTDGNFHPSPLMGGFGLKHPPPQILIKNTPVPADPPTAFNQAKLNSFITQYSTGQVSVEIVWELQKENSKRWNPEIQYTSNYYKSTNVDFAVNTEGVYSEPRPIGTRYLTRNL

SEQ ID NO: 490 - protein, 738 aa, Adeno-associated virus; identical to SEQ ID NO: 488

SEQ ID NO: 491 - DNA, 2214 bp, Adeno-associated virus
atggctgctgacggttatcttccagattggctcgaggacaacctctctgagggcattcgcgagtggtgggacctgaaacctggagcccccaagcccaaggccaaccagcagaagcaggacgacggccggggtctggtgcttcctggctacaagtacctcggacccttcaacggactcgacaagggggagcccgtcaacgcggcggacgcagcggccctcgagcacgacaaggcctacgaccagcagctcaaagcgggtgacaatccgtacctgcggtataaccacgccgacgccgagtttcaggagcgtctgcaagaagatacgtcttttgggggcaacctcgggcgagcagtcttccaggccaagaagcgggttctcgaacctctcggtctggttgaggaagctgctaagacggctcctggaaagaagagaccggtagaaccgtcacctcagcgttcccccgactcctccacgggcatcggcaagaaaggccagcagcccgctagaaagagactgaactttgggcagactggcgactcagagtcagtccccgaccctcaaccaatcggagaaccaccagcaggcccctctggtctgggatctggtacaatggctgcaggcggtggcgctccaatggcagacaataacgaaggcgccgacggagtgggtaatgcctcaggaaattggcattgcgattccacatggctgggcgacagagtcatcaccaccagcacccgaacctgggctttgcccacctacaacaaccacctctacaagcaaatctccagtcagtcagcaggtagcaccaacgacaacgtctacttcggctacagcaccccctgggggtattttgacttcaacagattccactgtcacttctcaccacgtgactggcagcggctcatcaacaacaactggggattccggcccaagaagctcaacttcaagctgttcaacatccaggtcaaggaggtcacaacgaatgacggcgtcacgaccatcgccaataaccttaccagcacggttcaggtcttttcggactcggaataccagctgccctacgtcctcggctccgcacaccagggctgcctgcctccgttcccggcggacgtcttcatgattccccagtacggctacctgactctgaacaatggcagccaatcggtgggtcgttcctctttctactgcctggaatatttcccttctcaaatgctgagaacgggcaacaacttcaccttcagctacaccttcgaggacgttcccttccacagcagctacgcacacagccagagcctggaccggctgatgaatcctcttatcgaccagtacctgtattacctggccagaacacagagcaacgcaggaggcacagctggcaatcgggaactgcagttttatcagggcgggcctaccaccatggccgaacaagccaaaaactggctgcctagaccttgcttccggcaacaaagagtctccaagacgctggatcaaaacaacaacagcaactttgcttggactggtgccaccaaataccatctaaatggaagaaattcattggttaatcccggtgtcgccatggcaacccacaaggacgacgaggaacgcttcttcccttcgagcggagtcctgatttttggaaaaactggagcagctaataagactacactggaaaatgtgttaatgacaaatgaagaggaaattcgtcctaccaacccggtagccaccgaggaatacgggactgttagcagcaacctgcaggcggctaacactgcagcccagacacaagttgtcaacaaccagggagccttacctggtatggtctggcagaaccgggacgtgtacctgcagggtcccatctgggccaagattcctcacacggacggcaactttcacccgtctccgctgatgggcggctttggactgaagcatccgcctcctcagatcctgatcaaaaacactcctgttcctgctaatcccccggaggtgtttacgcctgccaagtttgcttctttcatcacacagtacagcaccggccaggtcagcgtggagatcgagtgggagctgcagaaggagaacagcaagcgctggaacccagagattcagtatacctccaattttgacaaacagactggtgtggactttgccgttgacagccagggtgtttattctgagcctcgccccattggtactcgttacctcacccgtaatctgtaa

SEQ ID NO: 492 - protein, 737 aa, Adeno-associated virus
MAADGYLPDWLEDNLSEGIREWWDLKPGAPKPKANQQKQDDGRGLVLPGYKYLGPFNGLDKGEPVNAADAAALEHDKAYDQQLKAGDNPYLRYNHADAEFQERLQEDTSFGGNLGRAVFQAKKRVLEPLGLVEEAAKTAPGKKRPVEPSPQRSPDSSTGIGKKGQQPARKRLNFGQTGDSESVPDPQPIGEPPAGPSGLGSGTMAAGGGAPMADNNEGADGVGNASGNWHCDSTWLGDRVITTSTRTWALPTYNNHLYKQISSQSAGSTNDNVYFGYSTPWGYFDFNRFHCHFSPRDWQRLINNNWGFRPKKLNFKLFNIQVKEVTTNDGVTTIANNLTSTVQVFSDSEYQLPYVLGSAHQGCLPPFPADVFMIPQYGYLTLNNGSQSVGRSSFYCLEYFPSQMLRTGNNFTFSYTFEDVPFHSSYAHSQSLDRLMNPLIDQYLYYLARTQSNAGGTAGNRELQFYQGGPTTMAEQAKNWLPRPCFRQQRVSKTLDQNNNSNFAWTGATKYHLNGRNSLVNPGVAMATHKDDEERFFPSSGVLIFGKTGAANKTTLENVLMTNEEEIRPTNPVATEEYGTVSSNLQAANTAAQTQVVNNQGALPGMVWQNRDVYLQGPIWAKIPHTDGNFHPSPLMGGFGLKHPPPQILIKNTPVPANPPEVFTPAKFASFITQYSTGQVSVEIEWELQKENSKRWNPEIQYTSNFDKQTGVDFAVDSQGVYSEPRPIGTRYLTRNL

SEQ ID NO: 493 - DNA, 2214 bp, Adeno-associated virus
atggctgctgacggttatcttccagattggctcgaggacaacctctctgagggcattcgcgagtggtgggacctgaaacctggagcccccaagcccaaggccaaccagcagaagcaggacgacggccggggtctggtgcttcctggctacaagtacctcggacccttcaacggactcgacaagggggagcccgtcaacgcggcggacgcagcggccctcgagcacgacaaggcctacgaccagcagctcaaagcgggtgacaatccgtacctgcggtataaccatgccgacgccgagtttcaggagcgtctgcaagaagatacgtcttttgggggcaacctcgggcgagcagtcctccaggccaagaagcgggttctcgaacctctcggtctggttgaggaagctgctaagacggctcctggaaagaagagaccggtagaaccgtcacctcagcgttcccccgactcctccacgggcatcggcaagaaaggccagcagcccgctagaaagagactgaactttgggcagactggcgactcagagtcagtccccgaccctcaaccaatcggagaaccaccagcaggcccctctggtctgggatctggtacaatggctgcaggcggtggcgctccaatggcagacaataacgaaggcgccgacggagtgggtaatgcctcaggaaattggcattgcgattccacatggctgggcgacagagtcatcaccaccagcacccgaacctgggctttgcccacctacaacaaccacctctacaagcaaatctccagtcagtcagcaggtagcaccaacgacaacgtctacttcggctacagcaccccctgggggtattttgacttcaacagattccactgtcacttctcaccacgtgactggcagcggctcatcaacaacaactggggattccggcccaagaagctcaacttcaagctgttcaacatccaggtcaaggaggtcacaacgaatgacggcgtcacgaccatcgccaataaccttaccagcacggttcaggtcttttcggactcggaataccagctgccctacgtcctcggctccgcacaccagggctgcctgcctccgttcccggcggacgtcttcatgattccccagtacggctacctgactctgaacaatggcagccaatcggtgggtcgttcctctttctactgcctggaatatttcccttctcaaatgctgagaacgggcaacaacttcaccttcagctacaccttcgaggacgttcccttccacagcagctacgcacacagccagagcctggaccggctgatgaatcctcttatcgaccagtacctgtattacctggccagaacacagagcaacgcaggaggcacagctggcaatcgggaactgcagttttatcagggcgggcctaccaccatggccgaacaagccaaaaactggctgcctggaccttgcttccggcaacaaagagtctccaagacgctggatcaaaacaacaacagcaactttgcttggactggtgccaccaaataccatctaaatggaagaaattcattggttaatcccggtgtcgccatggcaacccacaaggacgacgaggaacgcttcttcccttcgagcggagtcctgatttttggaaaaactggagcagctaataagactacactggaaaatgtgttaatgacaaatgaagaggaaattcgtcctaccaacccggtagccaccgaggaatacgggactgttagcagcaacctgcaggcggctaacactgcagcccagacacaagttgtcaacaaccagggagccttacctggtatggtctggcagaaccgggacgtgtacctgcagggtcccatctgggccaagattcctcacacggacggcaactttcacccgtctccgctgatgggcggctttggactgaagcatccgcctcctcagatcctgatcaaaaacactcctgttcctgctaatcccccggaggtgtttacgcctgccaagtttgcttctttcatcacacagtacagcaccggccaggtcagcgtggagatcgagtgggagctgcagaaggagaacagcaagcgctggaacccagagattcagtatacctccaattttgacaaacagactggtgtggactttgccgttgacagccagggtgtttattctgagcctcgccccattggtactcgttacctcacccgtaatctgtaa

SEQ ID NO: 494 - protein, 737 aa, Adeno-associated virus; identical to SEQ ID NO: 453

SEQ ID NO: 495 - protein, 737 aa, Adeno-associated virus
MAADGYLPDWLEDNLSEGIREWWDLKPGAPKPKANQQKQDDGRGLVLPGYKYLGPFNGLDKGEPVNAADAAALEHDKAYDQQLKAGDNPYLRYNHADAEFQERLQEDTSFGGNLGRAVLQAKKRVLEPLGLVEEAAKTAPGKKRPVEPSPQRSPDSSTGIGKKGQQPARKRLNFGQTGDSESVPDPQPIGEPPAGPSGLGSGTMAAGGGAPMADNNEGADGVGNASGNWHCDSTWLGDRVITTSTRTWALPTYNNHLYKQISSQSAGSTNDNVYFGYSTPWGYFDFNRFHCHFSPRDWQRLINNNWGFRPKKLNFKLFNIQVKEVTTNDGVTTIANNLTSTVQVFSDSEYQLPYVLGSAHQGCLPPFPADVFMIPQYGYLTLNNGSQSVGRSSFYCLEYFPSQMLRTGNNFTFSYTFEDVPFHSSYAHSQSLDRLMNPLIDQYLYYLARTQSNAGGTAGNRELQFYQGGPTTMAEQAKNWLPGPCFRQQRVSKTLDQNNNSNFAWTGATKYHLNGRNSLVNPGVAMATHKDDEERFFPSSGVLIFGKTGAANKTTLENVLMTNEEEIRPTNPVATEEYGTVSSNLQAANTAAQTQVVNNQGALPGMVWQNRDVYLQGPIWAKIPHTDGNFHPSPLMGGFGLKHPPPQILIKNTPVPANPPEVFTPAKFASFITQYSTGQVSVEIEWELQKENSKRWNPEIQYTSNFDKQTGVDFAVDSQGVYSEPRPIGTRYLTRNL

SEQ ID NO: 496 - DNA, 2217 bp, Adeno-associated virus
atggctgccgatggttatcttccagattggctcgaggacaacctctctgagggcattcgcgagtggtgggacctgaaacctggagccccgaaacccaaagccaaccagcaaaagcaggacgacggccggggtctggtgcttcctggctacaagtacctcggacccttcaacggactcgacaagggggagcccgtcaacgcggcggacgcagcggccctcgagcacgacaaggcctacgaccagcagctcaaagcgggtgacaatccgtacctgcggtataatcacgccgacgccgagtttcaggagcgtctgcaagaagatacgtcttttgggggcaacctcgggcgagcagtcttccaggccaagaagcgggttctcgaacctctcggtctggttgaggaaggcgctaagacggctcctggaaagaagagaccggtagagccgtcaccacagcgttcccccgactcctccacgggcatcggcaagaaaggccagcagcccgccagaaagagactcaatttcggtcagactggcgactcagagtcagtccccgaccctcaacctatcggagaacctccagcagcgccctctagtgtgggatctggtacaatggctgcaggcggtggcgcaccaatggcagacaataacgaaggtgccgacggagtgggtagttcctcgggaaattggcattgcgattccacatggctgggcgacagagtcatcaccaccagcacccgaacctgggccctgcccacctacaacaaccacctctacaagcaaatctccaacgggacctcgggaggcagcaccaacgacaacacctactttggctacagcaccccctgggggtattttgactttaacagattccactgccacttctcaccacgtgactggcagcgactcatcaacaacaactggggattccggcccaagagactcagcttcaagctcttcaacatccaggtcaaagaggtcacgcagaatgaaggcaccaagaccatcgccaataacctcaccagcaccatccaggtgtttacggactcggaataccagctgccgtacgtcctcggctctgcccaccagggctgcctgcctccgttcccggcggacgtcttcatgattcctcagtacggctacctgactctcaacaacggtagtcaggccgtgggacgttcctccttctactgcctggagtacttcccctctcagatgctgagaacgggcaacaacttttccttcagctacactttcgaggacgtgcctttccacagcagctacgcgcacagccagagtttggacaggctgatgaatcctctcatcgaccagtacctgtactacctgtcaagaacccagtctacgggaggcacagcgggaacccagcagttgctgttttctcaggccgggcctagcaacatgtcggctcaggccagaaactggctgcctggaccctgctacagacagcagcgcgtctccacgacactgtcgcaaaacaacaacagcaactttgcctggactggtgccaccaagtatcatctgaacggcagagactctctggtgaatccgggcgtcgccatggcaaccaacaaggacgacgaggaccgcttcttcccacccagcggcatcctcatgtttggcaagcagggagctggaaaagacaacgtggactatagcaacgtgatgctaaccagcgaggaagaaatcaagaccaccaaccccgtggccacagaacagtatggcgtggtggctgataacctacagcagcaaaacaccgctcctattgtgggggccgtcaacagccagggagccttacctggcatggtctggcagaaccgggacgtgtacctgcagggtcctatttgggccaagattcctcacacagatggcaactttcacccgtctcctttaatgggcggctttggacttaaacatccgcctcctcagatcctcatcaaaaacactcctgttcctgcggatcctccaacagcgttcaaccaggccaagctgaattctttcatcacgcagtacagcaccggacaagtcagcgtggtgatcgagtgggagctgcagaaggagaacagcaagcgctggaacccagagattcagtatacttccaactactacaaatctacaaatgtggactttgctgttaatactgagggtgtttactctgagcttcgccccattggcactcgttacctcacccgtaatctgtaa

SEQ ID NO: 497 - protein, 738 aa, Adeno-associated virus
MAADGYLPDWLEDNLSEGIREWWDLKPGAPKPKANQQKQDDGRGLVLPGYKYLGPFNGLDKGEPVNAADAAALEHDKAYDQQLKAGDNPYLRYNHADAEFQERLQEDTSFGGNLGRAVFQAKKRVLEPLGLVEEGAKTAPGKKRPVEPSPQRSPDSSTGIGKKGQQPARKRLNFGQTGDSESVPDPQPIGEPPAAPSSVGSGTMAAGGGAPMADNNEGADGVGSSSGNWHCDSTWLGDRVITTSTRTWALPTYNNHLYKQISNGTSGGSTNDNTYFGYSTPWGYFDFNRFHCHFSPRDWQRLINNNWGFRPKRLSFKLFNIQVKEVTQNEGTKTIANNLTSTIQVFTDSEYQLPYVLGSAHQGCLPPFPADVFMIPQYGYLTLNNGSQAVGRSSFYCLEYFPSQMLRTGNNFSFSYTFEDVPFHSSYAHSQSLDRLMNPLIDQYLYYLSRTQSTGGTAGTQQLLFSQAGPSNMSAQARNWLPGPCYRQQRVSTTLSQNNNSNFAWTGATKYHLNGRDSLVNPGVAMATNKDDEDRFFPPSGILMFGKQGAGKDNVDYSNVMLTSEEEIKTTNPVATEQYGVVADNLQQQNTAPIVGAVNSQGALPGMVWQNRDVYLQGPIWAKIPHTDGNFHPSPLMGGFGLKHPPPQILIKNTPVPADPPTAFNQAKLNSFITQYSTGQVSVVIEWELQKENSKRWNPEIQYTSNYYKSTNVDFAVNTEGVYSELRPIGTRYLTRNL

SEQ ID NO: 498 - DNA, 2214 bp, Adeno-associated virus
atggctgctgacggttatcttccagattggctcgaggacaacctctctgagggcattcgcgagtggtgggacctgaaacctggagcccccaagcccaaggccaaccagcagaagcaggacgacggccggggtctggtgcttcctggctacaagtacctcggacccttcaacggactcgacaagggggagcccgtcaacgcggcggacgcagcggccctcgagcacgacaaggcctacgaccagcagctcaaagcgggtgacaatccgtacctgcggtataaccacgccgacgccgagtttcaggagcgtctgcaagaagatacgtcttttgggggcaacctcgggcgagcagtcttccaggccaagaagcgggttctcgaacctctcggtctggttgaggaagctgctaagacggctcctggaaagaagagaccggtagaaccgtcacctcagcgttcccccgactcctccacgggcatcggcaagaaaggccagcagcccgctagaaagagactgaactttgggcagactggcgactcagagtcagtccccgaccctcaaccaatcggagaaccaccagcaggcccctctggtctgggatctggtacaatggctgcaggcggtggcgccccaatggcagacaataacgaaggcgccgacggagtgggtaatgcctcaggaaattggcattgcgattccacatggctgggcgacagagtcatcaccaccagcacccgaacctgggctttgcccacctacaacaaccacctctacaagcaaatctccagtcagtcagcaggtagcaccaacgacaacgtctacttcggctacagcaccccctgggggtattttgacttcaacagattccactgtcacttctcaccacgtgactggcagcggctcatcaacaacaactggggattccggcccaagaagctcaacttcaagctgttcaacatccaggtcaaggaggtcacaacgaatgacggcgtcacgaccatcgccaataaccttaccagcacggttcaggtcttttcggactcggaataccagctgccctacgtcctcggctccgcacaccagggctgcctgcctccgttcccggcggacgtcttcatgattccccagtacggctacctgactctgaacaatggcagccaatcggtgggtcgttcctctttctactgcctggaatatttcccttctcaaatgctgagaacgggcaacaacttcaccatcagctacaccttcgaggacgttcccttccacagcagctacgcacacagccagagcctggaccggctgatgaatcctcttatcgaccagtacctgtattacctggccagaacacagagcaacgcaggaggcacagctggcaatcaggaactgcagttttatcagggcgggcctaccaccatggccgaacaagccaaaaactggctgcctggaccttgcttccggcaacaaagagtctccaagacgctggatcaaaacaacaacagcaactttgcttggactggtgccaccaaataccatctaaatggaagaaattcattggttaatcccggtgtcgccatggcaacccacaaggacgacgaggaacgcttcttcccttcgagcggagtcctgatttttggaaaaactggagcagctaataagactacactggaaaatgtgttaatgacaaatgaagaggaaattcgtcctaccaacccggtagccaccgaggaatacgggactgttagcagcaacctgcaggcggctaacactgcagcccagacacaagttgtcaacaaccagggagccttacctggtatggtctggcagaaccgggacgtgtacctgcagggtcccatctgggccaagattcctcacacagatggcaactttcacccgtctcctttaatgggcggctttggacttaaacatccgcctcctcagatcctcatcaaaaacactcctgttcctgcggatcctccaacagcgttcaaccaggccaagctgaattctttcatcacgcagtacagcaccggacaagtcagcgtggagatcgagtgggagctgcagaaggagaacagcaagcgctggaacccagagattcagtatacttccaactactacaaatctacaaatgtggactttgctgttaatactgagggtgtttactctgagcctcgccccattggcactcgttacctcacccgtaatctgtaa

SEQ ID NO: 499 - protein, 737 aa, Adeno-associated virus
MAADGYLPDWLEDNLSEGIREWWDLKPGAPKPKANQQKQDDGRGLVLPGYKYLGPFNGLDKGEPVNAADAAALEHDKAYDQQLKAGDNPYLRYNHADAEFQERLQEDTSFGGNLGRAVFQAKKRVLEPLGLVEEAAKTAPGKKRPVEPSPQRSPDSSTGIGKKGQQPARKRLNFGQTGDSESVPDPQPIGEPPAGPSGLGSGTMAAGGGAPMADNNEGADGVGNASGNWHCDSTWLGDRVITTSTRTWALPTYNNHLYKQISSQSAGSTNDNVYFGYSTPWGYFDFNRFHCHFSPRDWQRLINNNWGFRPKKLNFKLFNIQVKEVTTNDGVTTIANNLTSTVQVFSDSEYQLPYVLGSAHQGCLPPFPADVFMIPQYGYLTLNNGSQSVGRSSFYCLEYFPSQMLRTGNNFTISYTFEDVPFHSSYAHSQSLDRLMNPLIDQYLYYLARTQSNAGGTAGNQELQFYQGGPTTMAEQAKNWLPGPCFRQQRVSKTLDQNNNSNFAWTGATKYHLNGRNSLVNPGVAMATHKDDEERFFPSSGVLIFGKTGAANKTTLENVLMTNEEEIRPTNPVATEEYGTVSSNLQAANTAAQTQVVNNQGALPGMVWQNRDVYLQGPIWAKIPHTDGNFHPSPLMGGFGLKHPPPQILIKNTPVPADPPTAFNQAKLNSFITQYSTGQVSVEIEWELQKENSKRWNPEIQYTSNYYKSTNVDFAVNTEGVYSEPRPIGTRYLTRNL

SEQ ID NO: 500 - DNA, 2217 bp, Adeno-associated virus
atggctgccgatggttatcttccagattggctcgaggacaacctctctgagggcattcgcgagtggtgggacctgaaacctggagccccgaaacccaaagccaaccagcaaaagcaggacgacggccggggtctggtgcttcctggctacaagtacctcggacccttcaacggactcgacaagggggagcccgtcaacgcggcggacgcagcggccctcgagcacgacaaggcctacgaccagcagctcaaagcgggtgacaatccgtacctgcggtataatcacgccgacgccgagtttcaggagcgtctgcaagaagatacgtcttttgggggcaacctcgggcgagcagtcttccaggccaagaagcgggttctcgaacctctcggtctggttgaggaaggcgctaagacggctcctggaaagaagagaccggtagagccgtcaccacagcgttcccccgactcctccacgggcatcggcaagaaaggccagcagcccgccagaaagagactcaatttcggtcagactggcgactcagagtcagtccccgaccctcaacctatcggagaacctccagcagcgccctctagtgtgggatctggtacaatggctgcaggcggtggcgcaccaatggcagacaataacgaaggtgccgacggagtgggtagttcctcgggaaattggcattgcgattccacatggctgggcgacagagtcatcaccaccagcacccgaacctgggccctgcccgcctacaacaaccacctctacaagcaaatctccaacgggacctcgggaggcagcaccaacgacaacacctactttggctacagcaccccctgggggtattttgactttaacagattccactgccacttctcaccacgtgactggcagcgactcatcaacaacaactggggattccggcccaagagactcagcttcaagctcttcaacatccaggtcaaagaggtcacgcagaatgaaggcaccaagaccatcgccaataacctcaccagcaccatccaggtgtttacggactcggaataccagctgccgtacgtcctcggctctgcccaccagggctgcctgcctccgttcccggcggatgtcttcatgattcctcagtacggctacctgactctcaacaacggtagtcaggccgtgggacgttcctccttctactgcctggagtacttcccctctcagatgctgagaacgggcaacaacttttccttcagctacactttcgaggacgtgcctttccacagcagctacgcgcacagccagagtttggacaggctgatgaatcctctcatcgaccagtacctgtactacctgtcaagaacccagtctacgggaggcacagcgggaacccagcagttgctgttttctcaggccgggcctagcaacatgtcggctcaggccagaaactggctgcctggaccctgctacagacagcagcgcgtctccacgacactgtcgcaaaacaacaacagcaactttgcctggactggtgccaccaagtatcatctgagcggcagagactctctggtgaatccgggcgtcgccatggcaaccaacaaggacgacgaggaccgcttcttcccatccagcggcatcctcatgtttggcaagcagggagctggaaaagacaacgtggactatagcaacgtgatgctaaccagcgaggaagaaatcaagaccaccaaccccgtggccacagaacagtatggcgtggtggctgataacctacagcagcaaaacaccgctcctattgtgggggccgtcaacagccagggagccttacctggcatggtctggcagaaccgggacgtgtacctgcagggtcctatttgggccaagattcctcacacagatggcaactttcacccgtctcctttaatgggcggctttggacttaaacatccgcctcctcagatcctcatcaaaaacactcctgttcctgcggatcctccaacagcgttcaaccaggccaagctgaattcttccatcacgcagtacagcaccggacaagtcagcgtggagatcgagtgggagctgcagaaggagaacagcaagcgctggaacccagagattcagtatacttccaactactacaaatctacaaatgtggactttgctgttaatactgagggtgtttactctgagcctcgccccattggcactcgttacctcacccgtaatttgtaa

SEQ ID NO: 501 - protein, 738 aa, Adeno-associated virus
MAADGYLPDWLEDNLSEGIREWWDLKPGAPKPKANQQKQDDGRGLVLPGYKYLGPFNGLDKGEPVNAADAAALEHDKAYDQQLKAGDNPYLRYNHADAEFQERLQEDTSFGGNLGRAVFQAKKRVLEPLGLVEEGAKTAPGKKRPVEPSPQRSPDSSTGIGKKGQQPARKRLNFGQTGDSESVPDPQPIGEPPAAPSSVGSGTMAAGGGAPMADNNEGADGVGSSSGNWHCDSTWLGDRVITTSTRTWALPAYNNHLYKQISNGTSGGSTNDNTYFGYSTPWGYFDFNRFHCHFSPRDWQRLINNNWGFRPKRLSFKLFNIQVKEVTQNEGTKTIANNLTSTIQVFTDSEYQLPYVLGSAHQGCLPPFPADVFMIPQYGYLTLNNGSQAVGRSSFYCLEYFPSQMLRTGNNFSFSYTFEDVPFHSSYAHSQSLDRLMNPLIDQYLYYLSRTQSTGGTAGTQQLLFSQAGPSNMSAQARNWLPGPCYRQQRVSTTLSQNNNSNFAWTGATKYHLSGRDSLVNPGVAMATNKDDEDRFFPSSGILMFGKQGAGKDNVDYSNVMLTSEEEIKTTNPVATEQYGVVADNLQQQNTAPIVGAVNSQGALPGMVWQNRDVYLQGPIWAKIPHTDGNFHPSPLMGGFGLKHPPPQILIKNTPVPADPPTAFNQAKLNSSITQYSTGQVSVEIEWELQKENSKRWNPEIQYTSNYYKSTNVDFAVNTEGVYSEPRPIGTRYLTRNL

SEQ ID NO: 502 - protein, 736 aa, Adeno-associated virus; identical to SEQ ID NO: 2

SEQ ID NO: 503 - DNA, 2217 bp, Adeno-associated virus
atggctgctgacggttatcttccagattggctcgaggacaacctctctgagggcattcgcgagtggtgggacctgaaacctggagcccccaagcccaaggccaaccagcagaagcaggacgacggccggggtctggtgcttcctggctacaagtacctcggacccttcaacggactcgacaagggggagcccgtcaacgcggcggacgcagcggccctcgagcacgacaaggcctacgaccagcagctcaaagcgggtgacaatccgtacctgcggtataaccacgccgacgccgagtttcaggagcgtctgcaagaagatacgtcttttgggggcaacctcgggcgagcagtcttccaggccaagaagcgggttctcgaacctctcggtctggttgaggaagctgctaagacggctcctggaaagaagagaccggtagaaccgtcacctcagcgttcccccgactcctccacgggcatcggcaagaaaggccagcagcccgctaaaaagagactgaactttggtcagactggcgactcagagtcagtccccgaccctcaaccaatcggagaaccaccagcaggcccctctggtctgggatctggtacaatggctgcaggcggtggcgctccaatggcagacaataacgaaggcgccgacggagtgggtagttcctcaggaaattggcattgcgattccacatggctgggcgacagagtcatcaccaccagcacccgaacctgggccctgcccacctacaacaaccacctctacaagcaaatatccaatgggacatcgggaggaagcaccaacgacaacacctacttcggctacagcaccccctgggggtattttgacttcaacagattccactgccacttctcaccacgtgactggcagcgactcatcaacaacaactggggattccggccaaaaagactcagcttcaagctcttcaacatccaggtcaaggaggtcacgcagaatgaaggcaccaagaccatcgccaataaccttaccagcacgattcaggtatttacggactcggaataccagctgccgtacgtcctcggctccgcgcaccagggctgcctgcctccgttcccggcggacgtcttcatgattccccagtacggctaccttacactgaacaatggaagtcaagccgtaggccgttcctccttctactgcctggaatattttccatctcaaatgctgcgaactggaaacaattttgaattcagctacaccttcgaggacgtgcctttccacagcagctacgcacacagccagagcttggaccgactgatgaatcctctcatcgaccagtacctgtactacttatccagaactcagtccacaggaggaactcaaggtacccagcaattgttattttctcaagctgggcctgcaaacatgtcggctcaggctaagaactggctacctggaccttgctaccggcagcagcgagtctctacgacactgtcgcaaaacaacaacagcaactttgcttggactggtgccaccaaatatcacctgaacggaagagactctttggtaaatcccggtgtcgccatggcaacccacaaggacgacgaggaacgcttcttcccgtcgagtggagtcctgatgtttggaaaacagggtgctggaagagacaatgtggactacagcagcgttatgctaaccagcgaagaagaaattaaaaccactaaccctgtagccacagaacaatacggtgtggtggctgacaacttgcagcaaaccaatacagggcctattgtgggaaatgtcaacagccaaggagccttacctggcatggtctggcagaaccgagacgtgtacctgcagggtcccatctgggccaagattcctcacacggacggcaacttccacccttcaccgctaatgggaggatttggactgaagcacccacctcctcagatcctgatcaagaacacgccggtacctgcggatcctccaacaacgttcagccaggcgaaattggcttccttcattacgcagtacagcaccggacaggtcagcgtggaaatcgagtgggagctgcagaaggagaacagcaaacgctggaacccagagattcagtacacttcaaactactacaaatctacaaatgtggactttgctgtcaatacagagggaacttattctgagcctcgccccattggtactcgttacctcacccgtaatctgtaa

SEQ ID NO: 504 - protein, 738 aa, Adeno-associated virus
MAADGYLPDWLEDNLSEGIREWWDLKPGAPKPKANQQKQDDGRGLVLPGYKYLGPFNGLDKGEPVNAADAAALEHDKAYDQQLKAGDNPYLRYNHADAEFQERLQEDTSFGGNLGRAVFQAKKRVLEPLGLVEEGAKTAPGKKRPVEPSPQRSPDSSTGIGKKGQQPARKRLNFGQTGDSESVPDPQPLGEPPAAPSSVGSGTMAAGGGAPMADNNEGADGVGSSSGNWHCDSTWLGDRVITTSTRTWALPTYNNHLYKQISNGTSGGSTNDNTYFGYSTPWGYFDFNRFHCHFSPRDWQRLINNNWGFRPKRLSFKLFNIQVKEVTQNEGTKTIANNLTSTIQVFTDSEYQLPYVLGSAHQGCLPPFPADVFMIPQYGYLTLNNGSQAVGRSSFYCLEYFPSQMLRTGNNFSFSYTFEDVPFHSSYAHSQSLDRLMNPLIDQYLYYLSRTQSTGGTAGTQQLLFSQAGPSNMSAQARNWLPGPCYRQQRVSTTLSQNNNSNFAWTGATKYHLNGRDSLVNPGVAMATNKDDEDRFFPSSGILMFGKQGAGKDNVDYSNVMLTSEEEIKTTNPVATEQYGVVADNLQRQNTAPIVGAVNSQGALPGMVWQNRDVYLQGPIWAKIPHTDGNFHPSPLMGGFGLKHPPPQILIKNTPVPADPPTAFNQAKLNSFITQYSTGQVSVEIEWELQKENSKRWNPEIQYTSNYYKSTNVDFAVNTEGVYSEPRPIGTRYLTRNL

SEQ ID NO: 505 - protein, 736 aa, Adeno-associated virus
MAADGYLPDWLEDNLSEGIREWLNLKPGAPQPKANQQKQDNARGLVLPGYKYLGPFNGLDKGDPVNEADAAALEHDKAYGQQLKAGDNPYLKYNHADAEFQERLQKDTSFGGNLGKAVFQAKKRILEPLGLVETPAKTAPGKKRPVDPSPQRSPDSSSGIGKKSPHPARKRLNFGQTGEAESVPDPQPIGEPPSDPSSVGSGTMAAGGGAPMADNNEGADGVGNSSGNWHCDSTWLGDRVITTSTRTWALPTYNNHLYKQISSQSGATNDNHYFGYSTPWGYFDFNRFHCHFSPRDWQRLINNNWGFRPKRLSFKLFNIQVKEVTQNDGTTTIANNLTSTVQVFTDSEYQLPYVLGSAHQGCLPPFPADVFMIPQYGYLTLNNGSQAVGRSSFYCLEYFPSQMLRTGNNFQFSYTFEDVPFHSSYAHSQSLDRLMNPLIDQYLYYLSKTQGTNATVQGAKLQFSQAGPSNMRDQARNWLPGPCYRQQRVSKTANDNNNSEYAWTGATKYHLNGRDSLVNPGPAMASHKDDEEKFFPMNGTLVFGKNGAGNSNVDIENVMITDEEEIRTTNPVATEQYGVVSDNLQSSNTRPITGDVDSQGVLPGMVWQDRDVYLQGPIWAKIPHTDGHFHPSPLMGGFGLKHPPPQILIKNTPVPANPATTFTPGKFASFITQYSTGQVSVQIEWELQKENSKRWNPEIQYTSNYNKSVNVDFTVDTNGVYSEPRPIGTRYLTRNL

SEQ ID NO: 506 - protein, 736 aa, Adeno-associated virus; identical to SEQ ID NO: 81

SEQ ID NO: 507 - protein, 736 aa, Adeno-associated virus
MAADGYLPDWLEDNLSEGIREWWDLKPGAPKPKANQQKQDDGRGLVLPGYKYLGPFNGLDKGEPVNAADAAALEHDKAYDQQLKAGDNPYLRYNHADAEFQERLQEDTSFGGNLGRAVFQAKKRVLEPLGLVEEGAKTAPGKKRPVEQSPQEPDSSSGIGKTGQQPAKKRLNFGQTGDSESVPDPQPLGEPPAAPSGLGPNTMASGGGAPMADNNEGADGVGNSSGNWHCDSTWLGDRVITTSTRTWALPTYNNHLYKQISNGTSGGSTNDNTYFGYSTPWGYFDFNRFHCHFSPRDWQRLINNNWGFRPKRLNFKLFNIQVKEVTTNEGTKTIANNLTSTVQVFTDSEYQLPYVLGSAHQGCLPPFPADVFMVPQYGYLTLNNGSQALGRSSFYCLEYFPSQMLRTGNNFQFSYTFEDVPFHSSYAHSQSLDRLMNPLIDQYLYYLVRTQTTGTGGTQTLAFSQAGPSSMANQARNWVPGPCYRQQRVSTTTNQNNNSNFAWTGAAKFKLNGRDSLMNPGVAMASHKDDEDRFFPSSGVLIFGKQGAGNDGVDYSQVLITDEEEIKATNPVATEEYGAVAINNQAANTQAQTGLVHNQGVIPGMVWQNRDVYLQGPIWAKIPHTDGNFHPSPLMGGFGLKHPPPQILIKNTPVPADPPLTFNQAKLNSFITQYSTGQVSVEIEWELQKENSKRWNPEIQYTSNYYKSTNVDFAVNTEGVYSEPRPIGTRYLTRNL

SEQ ID NO: 508 - protein, 736 aa, Artificial Sequence; identical to SEQ ID NO: 507
  Description of Artificial Sequence: Synthetic polypeptide

SEQ ID NO: 509 - protein, 736 aa, Artificial Sequence
  Description of Artificial Sequence: Synthetic polypeptide
MAADGYLPDWLEDNLSEGIREWWDLKPGAPKPKANQQKQDDGRGLVLPGYKYLGPFNGLDKGEPVNAADAAALEHDKAYDQQLKAGDNPYLRYNHADAEFQERLQEDTSFGGNLGRAVFQAKKRVLEPLGLVEEGAKTAPGKKRPVEQSPQEPDSSSGIGKTGQQPAKKRLNFGQTGDSESVPDPQPLGEPPAAPSGLGPNTMASGGGAPMADNNEGADGVGNSSGNWHCDSTWLGDRVITTSTRTWALPTYNNHLYKQISNGTSGGSTNDNTYFGYSTPWGYFDFNRFHCHFSPRDWQRLINNNWGFRPKRLNFKLFNIQVKEVTTNEGTKTIANNLTSTVQVFTDSEYQLPYVLGSAHQGCLPPFPADVFMVPQYGYLTLNNGSQALGRSSFYCLEYFPSQMLRTGNNFQFSYTFEDVPFHSSYAHSQSLDRLMNPLIDQYLYYLVRTQTTGTGGTQTLAFSQAGPSSMANQARNWVPGPCYRQQRVSTTTNQNNNSNFAWTGAAKFKLNGRDSLMNPGVAMASHKDDEDRFFPSSGVLIFGKQGAGNDGVDYSQVLITDEEEIKATNPVATEEYGAVAINNQRANTQAQTGLVHNQGVIPGMVWQNRDVYLQGPIWAKIPHTDGNFHPSPLMGGFGLKHPPPQILIKNTPVPADPPLTFNQAKLNSFITQYSTGQVSVEIEWELQKENSKRWNPEIQYTSNYYKSTNVDFAVNTEGVYSEPRPIGTRYLTRNL

SEQ ID NO: 510 - protein, 736 aa, Artificial Sequence
  Description of Artificial Sequence: Synthetic polypeptide
MAADGYLPDWLEDNLSEGIREWWDLKPGAPKPKANQQKQDDGRGLVLPGYKYLGPFNGLDKGEPVNAADAAALEHDKAYDQQLKAGDNPYLRYNHADAEFQERLQEDTSFGGNLGRAVFQAKKRVLEPLGLVEEGAKTAPGKKRPVEQSPQEPDSSSGIGKTGQQPAKKRLNFGQTGDSESVPDPQPLGEPPAAPSGLGPNTMASGGGAPMADNNEGADGVGNSSGNWHCDSTWLGDRVITTSTRTWALPTYNNHLYKQISNGTSGGSTNDNTYFGYSTPWGYFDFNRFHCHFSPRDWQRLINNNWGFRPKRLNFKLFNIQVKEVTTNEGTKTIANNLTSTVQVFTDSEYQLPYVLGSAHQGCLPPFPADVFMVPQYGYLTLNNGSQALGRSSFYCLEYFPSQMLRTGNNFQFSYTFEDVPFHSSYAHSQSLDRLMNPLIDQYLYYLVRTQTTGTGGTQTLAFSQAGPSSMANQARNWVPGPCYRQQRVSTTTNQNNNSNFAWTGAAKFKLNGRDSLMNPGVAMASHKDDEDAFFPSSGVLIFGKQGAGNDGVDYSQVLITDEEEIKATNPVATEEYGAVAINNQAANTQAQTGLVHNQGVIPGMVWQNRDVYLQGPIWAKIPHTDGNFHPSPLMGGFGLKHPPPQILIKNTPVPADPPLTFNQAKLNSFITQYSTGQVSVEIEWELQKENSKRWNPEIQYTSNYYKSTNVDFAVNTEGVYSEPRPIGTRYLTRNL

SEQ ID NO: 511 - DNA, 1803 bp, Bovine adeno-associated virus
acggcgcctgcggcaaaaaagaggcctctagagcagagtcctcaagagccagactcctcgagcggagttggcaagaaaggcaaacagcctgccagaaagagactcaactttgacgacgaacctggagccggagacgggcctcccccagaaggaccatcttccggagctatgtctactgagactgaaatgcgtgcagcagctggcggaaatggtggcgatgcgggacaaggtgccgagggagtgggtaatgcctccggtgattggcattgcgattccacttggtcagagagccacgtcaccaccacctcaacccgcacctgggtcctgccgacctacaacaaccacctgtacctgcggctcggctcgagcaacgccagcgacaccttcaacggattctccaccccctggggatactttgactttaaccgcttccactgccacttctcgccaagagactggcaaaggctcatcaacaaccactggggactgcgccccaaaagcatgcaagtccgcatcttcaacatccaagttaaggaggtcacgacgtctaacggggagacgaccgtatccaacaacctcaccagcacggtccagatctttgcggacagcacgtacgagctcccgtacgtgatggatgcaggtcaggagggcagcttgcctcctttccccaacgacgtgttcatggtgcctcagtacgggtactgcggactggtaaccggaggcagctctcaaaaccagacagacagaaatgccttctactgtctggagtactttcccagccagatgctgagaaccggaaacaactttgagatggtgtacaagtttgaaaacgtgcccttccactccatgtacgctcacagccagagcctggataggctgatgaacccgctgctggaccagtacctgtgggagctccagtctaccacctctggaggaactctcaaccagggcaattcagccaccaactttgccaagctgaccaaaacaaacttttctggctaccgcaaaaactggctcccggggcccatgatgaagcagcagagattctccaagactgccagtcaaaactacaagattccccagggaagaaacaacagtctgctccattatgagaccagaactaccctcgacggaagatggagcaattttgccccgggaacggccatggcaaccgcagccaacgacgccaccgacttctctcaggcccagctcatctttgcggggcccaacatcaccggcaacaccaccacagatgccaataacctgatgttcacttcagaagatgaacttagggccaccaacccccgggacactgacctgtttggccacctggcaaccaaccagcaaaacgccaccaccgttcctaccgtagacgacgtggacggagtcggcgtgtacccgggaatggtgtggcaggacagagacatttactaccaagggcccatttgggccaaaattccacacacggatggacactttcacccgtctcctctcattggcggatttggactgaaaagcccgcctccacaaatattcatcaaaaacactcctgtacccgccaatcccgcaacgaccttctctccggccagaatcaacagcttcatcacccagtacagcaccggacaggtggctgtcaaaatagaatgggaaatccagaaggagcggtccaagagatggaacccagaggtccagttcacgtccaactacggagcacaggactcgcttctctgggctcccgacaacgccggagcctacaaagagcccagggccattggatcccgatacctcaccaaccacctctag

SEQ ID NO: 512 - DNA, 1617 bp, Bovine adeno-associated virus
atgcgtgcagcagctggcggaaatggtggcgatgcgggacaaggtgccgagggagtgggtaatgcctccggtgattggcattgcgattccacttggtcagagagccacgtcaccaccacctcaacccgcacctgggtcctgccgacctacaacaaccacctgtacctgcggctcggctcgagcaacgccagcgacaccttcaacggattctccaccccctggggatactttgactttaaccgcttccactgccacttctcgccaagagactggcaaaggctcatcaacaaccactggggactgcgccccaaaagcatgcaagtccgcatcttcaacatccaagttaaggaggtcacgacgtctaacggggagacgaccgtatccaacaacctcaccagcacggtccagatctttgcggacagcacgtacgagctcccgtacgtgatggatgcaggtcaggagggcagcttgcctcctttccccaacgacgtgttcatggtgcctcagtacgggtactgcggactggtaaccggaggcagctctcaaaaccagacagacagaaatgccttctactgtctggagtactttcccagccagatgctgagaaccggaaacaactttgagatggtgtacaagtttgaaaacgtgcccttccactccatgtacgctcacagccagagcctggataggctgatgaacccgctgctggaccagtacctgtgggagctccagtctaccacctctggaggaactctcaaccagggcaattcagccaccaactttgccaagctgaccaaaacaaacttttctggctaccgcaaaaactggctcccggggcccatgatgaagcagcagagattctccaagactgccagtcaaaactacaagattccccagggaagaaacaacagtctgctccattatgagaccagaactaccctcgacggaagatggagcaattttgccccgggaacggccatggcaaccgcagccaacgacgccaccgacttctctcaggcccagctcatctttgcggggcccaacatcaccggcaacaccaccacagatgccaataacctgatgttcacttcagaagatgaacttagggccaccaacccccgggacactgacctgtttggccacctggcaaccaaccagcaaaacgccaccaccgttcctaccgtagacgacgtggacggagtcggcgtgtacccgggaatggtgtggcaggacagagacatttactaccaagggcccatttgggccaaaattccacacacggatggacactttcacccgtctcctctcattggcggatttggactgaaaagcccgcctccacaaatattcatcaaaaacactcctgtacccgccaatcccgcaacgaccttctctccggccagaatcaacagcttcatcacccagtacagcaccggacaggtggctgtcaaaatagaatgggaaatccagaaggagcggtccaagagatggaacccagaggtccagttcacgtccaactacggagcacaggactcgcttctctgggctcccgacaacgccggagcctacaaagagcccagggccattggatcccgatacctcaccaaccacctctag

SEQ ID NO: 513 - DNA, 1173 bp, Bovine adeno-associated virus
atggcgctggtaagctggctggtggaacatggcatcacttccgagaagcagtggattcaggagaatcaggagagctacctgtccttcaactccacgggaaactctcggagccagattaaagccgcgcttgacaacgcgtcaaaaattatgagtctgaccaaatctgcctcagactatctcgtgggacagactgttccagaggacatttctgaaaacagaatctggcagatttttgatctcaacggctacgacccggcatacgcgggctctgttctctacggctggtgcactcgcgcctttggaaagaggaacaccgtctggctgtatggacccgcgaccaccggaaagaccaacatcgcggaagccatctctcacaccgtgcccttttatggctgtgtgaactggactaatgagaactttccctttaatgactgtgtggaaaaaatgttgatctggtgggaggagggaaagatgaccagcaaggtggtggaacccgccaaggccatcttgggggggtctagagtacgagtggatcaaaaatgtaaatcctctgtacaagtagactctaccccggtgattatcacctccaatactaacatgtgtgtggtggtggatgggaactccacgacctttgaacaccagcagccgctggaagaccgcatgttcagatttgaactcatgcggcggctcccgccagattttggcaagattaccaagcaggaagtcaaagacttttttgcttgggcaaaggtcaaccaggtgccggtgactcacgagtttatggttcccaagaaagtggcgggaactgagagggcggagacttctagaaaacgcccactggatgacgtcaccaataccaactataaaagtccggagaagcgggcccggctctcagttgttcctgagacgcctcgcagttcagacgtgcctgtagagcccgctcctctgcgacctctcaactggtcttccaggtatgaatgcagatgtgactatcatgctaaatttgactctgtaacgggggaatgtgacgagtgtgaatatttgaatcggggcaaaaatggctgtatctttcataatgctacacattgtcaaatttgtcacgctgttcctccatgggaaaaggaaaatgtgtcagattttaatgattttgatgactgtaataaagagcagtaa

SEQ ID NO: 514 - DNA, 1833 bp, Bovine adeno-associated virus
atggctaccttctatgaagtcattgttcgcgttccatttgatgtggaagagcacctgcctggaatttctgacaactttgtagactgggtaactggtcaaatttgggagctgcctcccgagtcagatttgaatttgactctgattgagcagcctcagctgacggtggctgacagaattcgccgcgtgttcctgtacgagtggaacaaattttccaagcaggagagcaaattctttgtgcagtttgaaaagggatctgaatattttcatctgcacacgctcgtggagacctccggcatctcttctatggtccttggccgctacgtgagtcagattcgcgcccagctggtgaaggtggtgttccagaacattgagccgcggattaacgactgggtcgccatcaccaaggtaaagaagggcggagccaataaggtggtggattctgggtatattcccgcctacctgctgccgaaggtccaaccagagcttcagtgggcgtggactaacctcgaagagtataaattggccgccctcaatctggaggagcgcaaacggctcgtcgctcagtttcagcttgagtcctcgcagcgctcgcaagaggcatcttcccagagggacgtttcggctgacccggtcatcaagagcaagacttcccagaaatacatggcgctggtaagctggctggtggaacatggcatcacttccgagaagcagtggattcaggagaatcaggagagctacctgtccttcaactccacgggaaactctcggagccagattaaagccgcgcttgacaacgcgtcaaaaattatgagtctgaccaaatctgcctcagactatctcgtgggacagactgttccagaggacatttctgaaaacagaatctggcagatttttgatctcaacggctacgacccggcatacgcgggctctgttctctacggctggtgcactcgcgcctttggaaagaggaacaccgtctggctgtatggacccgcgaccaccggaaagaccaacatcgcggaagccatctctcacaccgtgcccttttatggctgtgtgaactggactaatgagaactttccctttaatgactgtgtggaaaaaatgttgatctggtgggaggagggaaagatgaccagcaaggtggtggaacccgccaaggccatcttgggggggtctagagtacgagtggatcaaaaatgtaaatcctctgtacaagtagactctaccccggtgattatcacctccaatactaacatgtgtgtggtggtggatgggaactccacgacctttgaacaccagcagccgctggaagaccgcatgttcagatttgaactcatgcggcggctcccgccagattttggcaagattaccaagcaggaagtcaaagacttttttgcttgggcaaaggtcaaccaggtgccggtgactcacgagtttatggttcccaagaaagtggcgggaactgagagggcggagacttctagaaaacgcccactggatgacgtcaccaataccaactataaaagtccggagaagcgggcccggctctcagttgttcctgagacgcctcgcagttcagacgtgcctgtagagcccgctcctctgcgacctctcaactggtcttccaggtatgaatgcagatgtgactatcatgctaaatttgactctgtaacgggggaatgtgacgagtgtgaatatttgaatcggggcaaaaatggctgtatctttcataatgctacacattgtcaaatttgtcacgctgttcctccatgggaaaaggaaaatgtgtcagattttaatgattttgatgactgtaataaagagcagtaa

SEQ ID NO: 515 - DNA, 2211 bp, Bovine adeno-associated virus
atgtcttttgttgaccaccctccagattggttggaatcgatcggcgacggctttcgtgaatttctcggccttgaggcgggtcccccgaaacccaaggccaatcaacagaagcaagataacgctcgaggtcttgtgcttcctgggtacaagtatcttggtcctgggaacggccttgataagggcgatcctgtcaattttgctgacgaggttgcccgagagcacgacctctcctaccagaaacagcttgaggcgggcgataacccttacctcaagtacaaccacgcggacgcagagtttcaggagaaactcgcttctgacacttcttttgggggaaaccttgggaaggctgttttccaggctaaaaagaggattctcgaacctcttggcctggttgagacgccggataaaacggcgcctgcggcaaaaaagaggcctctagagcagagtcctcaagagccagactcctcgagcggagttggcaagaaaggcaaacagcctgccagaaagagactcaactttgacgacgaacctggagccggagacgggcctcccccagaaggaccatcttccggagctatgtctactgagactgaaatgcgtgcagcagctggcggaaatggtggcgatgcgggacaaggtgccgagggagtgggtaatgcctccggtgattggcattgcgattccacttggtcagagagccacgtcaccaccacctcaacccgcacctgggtcctgccgacctacaacaaccacctgtacctgcggctcggctcgagcaacgccagcgacaccttcaacggattctccaccccctggggatactttgactttaaccgcttccactgccacttctcgccaagagactggcaaaggctcatcaacaaccactggggactgcgccccaaaagcatgcaagtccgcatcttcaacatccaagttaaggaggtcacgacgtctaacggggagacgaccgtatccaacaacctcaccagcacggtccagatctttgcggacagcacgtacgagctcccgtacgtgatggatgcaggtcaggagggcagcttgcctcctttccccaacgacgtgttcatggtgcctcagtacgggtactgcggactggtaaccggaggcagctctcaaaaccagacagacagaaatgccttctactgtctggagtactttcccagccagatgctgagaaccggaaacaactttgagatggtgtacaagtttgaaaacgtgcccttccactccatgtacgctcacagccagagcctggataggctgatgaacccgctgctggaccagtacctgtgggagctccagtctaccacctctggaggaactctcaaccagggcaattcagccaccaactttgccaagctgaccaaaacaaacttttctggctaccgcaaaaactggctcccggggcccatgatgaagcagcagagattctccaagactgccagtcaaaactacaagattccccagggaagaaacaacagtctgctccattatgagaccagaactaccctcgacggaagatggagcaattttgccccgggaacggccatggcaaccgcagccaacgacgccaccgacttctctcaggcccagctcatctttgcggggcccaacatcaccggcaacaccaccacagatgccaataacctgatgttcacttcagaagatgaacttagggccaccaacccccgggacactgacctgtttggccacctggcaaccaaccagcaaaacgccaccaccgttcctaccgtagacgacgtggacggagtcggcgtgtacccgggaatggtgtggcaggacagagacatttactaccaagggcccatttgggccaaaattccacacacggatggacactttcacccgtctcctctcattggcggatttggactgaaaagcccgcctccacaaatattcatcaaaaacactcctgtacccgccaatcccgcaacgaccttctctccggccagaatcaacagcttcatcacccagtacagcaccggacaggtggctgtcaaaatagaatgggaaatccagaaggagcggtccaagagatggaacccagaggtccagttcacgtccaactacggagcacaggactcgcttctctgggctcccgacaacgccggagcctacaaagagcccagggccattggatcccgatacctcaccaaccacctctag

SEQ ID NO: 516 - DNA, 4694 bp, Bovine adeno-associated virus
gtggcactcccccccctgtcgcgttcgctcgttcgctggctcgattgggggggtggcagctcaaagagctgccagacgacggccctctgggccgtcgcccccccaatcgagccagcgaacgagcgaacgcgacaggggggggagtgccacactctctagcaagggggttttgtaggtggtgatgtcattgttgatgtcattatagttgtcacgcgatagttaatgattaacagtcatgtgatgtgtgttatccaataggatgaaagcgcgcgaatgagatctcgcgagacttccggggtataaaaggggtgagtgaacgagcccgccgccattctctgctctggactgctagaggaccctcgctgccatggctaccttctatgaagtcattgttcgcgttccatttgatgtggaagagcacctgcctggaatttctgacaactttgtagactgggtaactggtcaaatttgggagctgcctcccgagtcagatttgaatttgactctgattgagcagcctcagctgacggtggctgacagaattcgccgcgtgttcctgtacgagtggaacaaattttccaagcaggagagcaaattctttgtgcagtttgaaaagggatctgaatattttcatctgcacacgctcgtggagacctccggcatctcttctatggtccttggccgctacgtgagtcagattcgcgcccagctggtgaaggtggtgttccagaacattgagccgcggattaacgactgggtcgccatcaccaaggtaaagaagggcggagccaataaggtggtggattctgggtatattcccgcctacctgctgccgaaggtccaaccagagcttcagtgggcgtggactaacctcgaagagtataaattggccgccctcaatctggaggagcgcaaacggctcgtcgctcagtttcagcttgagtcctcgcagcgctcgcaagaggcatcttcccagagggacgtttcggctgacccggtcatcaagagcaagacttcccagaaatacatggcgctggtaagctggctggtggaacatggcatcacttccgagaagcagtggattcaggagaatcaggagagctacctgtccttcaactccacgggaaactctcggagccagattaaagccgcgcttgacaacgcgtcaaaaattatgagtctgaccaaatctgcctcagactatctcgtgggacagactgttccagaggacatttctgaaaacagaatctggcagatttttgatctcaacggctacgacccggcatacgcgggctctgttctctacggctggtgcactcgcgcctttggaaagaggaacaccgtctggctgtatggacccgcgaccaccggaaagaccaacatcgcggaagccatctctcacaccgtgcccttttatggctgtgtgaactggactaatgagaactttccctttaatgactgtgtggaaaaaatgttgatctggtgggaggagggaaagatgaccagcaaggtggtggaacccgccaaggccatcttgggggggtctagagtacgagtggatcaaaaatgtaaatcctctgtacaagtagactctaccccggtgattatcacctccaatactaacatgtgtgtggtggtggatgggaactccacgacctttgaacaccagcagccgctggaagaccgcatgttcagatttgaactcatgcggcggctcccgccagattttggcaagattaccaagcaggaagtcaaagacttttttgcttgggcaaaggtcaaccaggtgccggtgactcacgagtttatggttcccaagaaagtggcgggaactgagagggcggagacttctagaaaacgcccactggatgacgtcaccaataccaactataaaagtccggagaagcgggcccggctctcagttgttcctgagacgcctcgcagttcagacgtgcctgtagagcccgctcctctgcgacctctcaactggtcttccaggtatgaatgcagatgtgactatcatgctaaatttgactctgtaacgggggaatgtgacgagtgtgaatatttgaatcggggcaaaaatggctgtatctttcataatgctacacattgtcaaatttgtcacgctgttcctccatgggaaaaggaaaatgtgtcagattttaatgattttgatgactgtaataaagagcagtaaataaagtgagtagtcatgtcttttgttgaccaccctccagattggttggaatcgatcggcgacggctttcgtgaatttctcggccttgaggcgggtcccccgaaacccaaggccaatcaacagaagcaagataacgctcgaggtcttgtgcttcctgggtacaagtatcttggtcctgggaacggccttgataagggcgatcctgtcaattttgctgacgaggttgcccgagagcacgacctctcctaccagaaacagcttgaggcgggcgataacccttacctcaagtacaaccacgcggacgcagagtttcaggagaaactcgcttctgacacttcttttgggggaaaccttgggaaggctgttttccaggctaaaaagaggattctcgaacctcttggcctggttgagacgccggataaaacggcgcctgcggcaaaaaagaggcctctagagcagagtcctcaagagccagactcctcgagcggagttggcaagaaaggcaaacagcctgccagaaagagactcaactttgacgacgaacctggagccggagacgggcctcccccagaaggaccatcttccggagctatgtctactgagactgaaatgcgtgcagcagctggcggaaatggtggcgatgcgggacaaggtgccgagggagtgggtaatgcctccggtgattggcattgcgattccacttggtcagagagccacgtcaccaccacctcaacccgcacctgggtcctgccgacctacaacaaccacctgtacctgcggctcggctcgagcaacgccagcgacaccttcaacggattctccaccccctggggatactttgactttaaccgcttccactgccacttctcgccaagagactggcaaaggctcatcaacaaccactggggactgcgccccaaaagcatgcaagtccgcatcttcaacatccaagttaaggaggtcacgacgtctaacggggagacgaccgtatccaacaacctcaccagcacggtccagatctttgcggacagcacgtacgagctcccgtacgtgatggatgcaggtcaggagggcagcttgcctcctttccccaacgacgtgttcatggtgcctcagtacgggtactgcggactggtaaccggaggcagctctcaaaaccagacagacagaaatgccttctactgtctggagtactttcccagccagatgctgagaaccggaaacaactttgagatggtgtacaagtttgaaaacgtgcccttccactccatgtacgctcacagccagagcctggataggctgatgaacccgctgctggaccagtacctgtgggagctccagtctaccacctctggaggaactctcaaccagggcaattcagccaccaactttgccaagctgaccaaaacaaacttttctggctaccgcaaaaactggctcccggggcccatgatgaagcagcagagattctccaagactgccagtcaaaactacaagattccccagggaagaaacaacagtctgctccattatgagaccagaactaccctcgacggaagatggagcaattttgccccgggaacggccatggcaaccgcagccaacgacgccaccgacttctctcaggcccagctcatctttgcggggcccaacatcaccggcaacaccaccacagatgccaataacctgatgttcacttcagaagatgaacttagggccaccaacccccgggacactgacctgtttggccacctggcaaccaaccagcaaaacgccaccaccgttcctaccgtagacgacgtggacggagtcggcgtgtacccgggaatggtgtggcaggacagagacatttactaccaagggcccatttgggccaaaattccacacacggatggacactttcacccgtctcctctcattggcggatttggactgaaaagcccgcctccacaaatattcatcaaaaacactcctgtacccgccaatcccgcaacgaccttctctccggccagaatcaacagcttcatcacccagtacagcaccggacaggtggctgtcaaaatagaatgggaaatccagaaggagcggtccaagagatggaacccagaggtccagttcacgtccaactacggagcacaggactcgcttctctgggctcccgacaacgccggagcctacaaagagcccagggccattggatcccgatacctcaccaaccacctctagcccaattctgttgcataccctcaataaaccgtgtattcgtttcagtaaaatactgcctcttgtggtcattcggcgtacaacagcttacaacaacaacaaaacccccttgctagagagtgtggcactcccccccctgtcgcgttcgctcgttcgctggctcgattgggggggtggcagctcaaagagctgccagacgacggccctctgggccgtcgcccccccaatcgagccagcgaacgagcgaacgcgacaggggggggagtgccac

SEQ ID NO: 517 - protein, 390 aa, Bovine adeno-associated virus
MALVSWLVEHGITSEKQWIQENQESYLSFNSTGNSRSQIKAALDNASKIMSLTKSASDYLVGQTVPEDISENRIWQIFDLNGYDPAYAGSVLYGWCTRAFGKRNTVWLYGPATTGKTNIAEAISHTVPFYGCVNWTNENFPFNDCVEKMLIWWEEGKMTSKVVEPAKAILGGSRVRVDQKCKSSVQVDSTPVIITSNTNMCVVVDGNSTTFEHQQPLEDRMFRFELMRRLPPDFGKITKQEVKDFFAWAKVNQVPVTHEFMVPKKVAGTERAETSRKRPLDDVTNTNYKSPEKRARLSVVPETPRSSDVPVEPAPLRPLNWSSRYECRCDYHAKFDSVTGECDECEYLNRGKNGCIFHNATHCQICHAVPPWEKENVSDFNDFDDCNKEQ

SEQ ID NO: 518 - protein, 610 aa, Bovine adeno-associated virus
MATFYEVIVRVPFDVEEHLPGISDNFVDWVTGQIWELPPESDLNLTLIEQPQLTVADRIRRVFLYEWNKFSKQESKFFVQFEKGSEYFHLHTLVETSGISSMVLGRYVSQIRAQLVKVVFQNIEPRINDWVAITKVKKGGANKVVDSGYIPAYLLPKVQPELQWAWTNLEEYKLAALNLEERKRLVAQFQLESSQRSQEASSQRDVSADPVIKSKTSQKYMALVSWLVEHGITSEKQWIQENQESYLSFNSTGNSRSQIKAALDNASKIMSLTKSASDYLVGQTVPEDISENRIWQIFDLNGYDPAYAGSVLYGWCTRAFGKRNTVWLYGPATTGKTNIAEAISHTVPFYGCVNWTNENFPFNDCVEKMLIWWEEGKMTSKVVEPAKAILGGSRVRVDQKCKSSVQVDSTPVIITSNTNMCVVVDGNSTTFEHQQPLEDRMFRFELMRRLPPDFGKITKQEVKDFFAWAKVNQVPVTHEFMVPKKVAGTERAETSRKRPLDDVTNTNYKSPEKRARLSVVPETPRSSDVPVEPAPLRPLNWSSRYECRCDYHAKFDSVTGECDECEYLNRGKNGCIFHNATHCQICHAVPPWEKENVSDFNDFDDCNKEQ

SEQ ID NO: 519 - protein, 538 aa, Bovine adeno-associated virus
MRAAAGGNGGDAGQGAEGVGNASGDWHCDSTWSESHVTTTSTRTWVLPTYNNHLYLRLGSSNASDTFNGFSTPWGYFDFNRFHCHFSPRDWQRLINNHWGLRPKSMQVRIFNIQVKEVTTSNGETTVSNNLTSTVQIFADSTYELPYVMDAGQEGSLPPFPNDVFMVPQYGYCGLVTGGSSQNQTDRNAFYCLEYFPSQMLRTGNNFEMVYKFENVPFHSMYAHSQSLDRLMNPLLDQYLWELQSTTSGGTLNQGNSATNFAKLTKTNFSGYRKNWLPGPMMKQQRFSKTASQNYKIPQGRNNSLLHYETRTTLDGRWSNFAPGTAMATAANDATDFSQAQLIFAGPNITGNTTTDANNLMFTSEDELRATNPRDTDLFGHLATNQQNATTVPTVDDVDGVGVYPGMVWQDRDIYYQGPIWAKIPHTDGHFHPSPLIGGFGLKSPPPQIFIKNTPVPANPATTFSPARINSFITQYSTGQVAVKIEWEIQKERSKRWNPEVQFTSNYGAQDSLLWAPDNAGAYKEPRAIGSRYLTNHL

SEQ ID NO: 520 - protein, 736 aa, Artificial Sequence
  Description of Artificial Sequence: Synthetic polypeptide
MSFVDHPPDWLESIGDGFREFLGLEAGPPKPKANQQKQDNARGLVLPGYKYLGPGNGLDKGDPVNFADEVAREHDLSYQKQLEAGDNPYLKYNHADAEFQEKLASDTSFGGNLGKAVFQAKKRILEPLGLVETPDKTAPAAKKRPLEQSPQEPDSSSGVGKKGKQPARKRLNFDDEPGAGDGPPPEGPSSGAMSTETEMRAAAGGNGGDAGQGAEGVGNASGDWHCDSTWSESHVTTTSTRTWVLPTYNNHLYLRLGSSNASDTFNGFSTPWGYFDFNRFHCHFSPRDWQRLINNHWGLRPKSMQVRIFNIQVKEVTTSNGETTVSNNLTSTVHIFADSTYELPYVMDAGQEGSLPPFPNDVFMVPQYGYCGLVTGGSSQNQTDRNAFYCLEYFPSQMLRTGNNFEMVYKFENVPFHSMYAHSQSLDRLMNPLLDQYLWELQSTTSGGTLNQGNSATNFAKLTNKNFSGYRKNWLPGPMMKQQRFSKTASQNYKIPQGGNNSLLHYETRTTLDRRWSNFAPGTAMATAANDATDFSQAQLIFAGPNITGNTTTDANNLMFTSEDELRATNPRDTDLFGHLATNQQNATTVPTVDDVDGVGVYPGMVWQDRDIYYQGPIWAKIPHTDGHFHPSPLIGGFGLKSPPPQIFIKNTPVPANPATTFSPARINSFITQYSTGQVAVKIEWEIQKERSKRWNPEVQFTSNYGAQDSLLWAPDNAGAYKEPRAIGSRYLTNHL

SEQ ID NO: 521 - protein, 736 aa, Artificial Sequence
  Description of Artificial Sequence: Synthetic polypeptide
MSFVDHPPDWLESIGDGFREFLGLEAGPPKPKANQQKQDNARGLVLPGYKYLGPGNGLDKGDPVNFADEVAREHDLSYQKQLEAGDNPYLKYNHADAEFQEKLASDTSFGGNLGKAVFQAKKRILEPLGLVETPDKTAPAAKKRPLEQSPQEPDSSSGVGKKGKQPARKRLNFDDEPGAGDGPPPEGPSSGAMSTETEMRAAAGGNGGDAGQGAEGVGNASGDWHCDSTWSESHVTTTSTRTWVLPTYNNHLYLRLGSSNASDTFNGFSTPWGYFDFNRFHCHFSPRDWQRLINNHWGLRPKSMQVRIFNIQVKEVTTSNGETTVSNNLTSTVQIFADSTYELPYVMDAGQEGSLPPFPNDVFMVPQYGYCGLVTGGSSQNQTDRNAFYCLEYFPSQMLRTGNNFEMVYKFENVPFHSMYAHSQSLDRLMNPLLDQYLWELQSTTSGGTLNQGNSATNFAKLTKTNFSGYRKNWLPGPMMKQQRFSKTASQNYKIPQGRNNSLLHYETRTTLDGRWSNFAPGTAMATAANDATDFSQAQLIFAGPNITGNTTTDANNLMFTSEDELRATNPRDTDLFGHLATNQQNATTVPTVDDVDGVGVYPGMVWQDRDIYYQGPIWAKIPHTDGHFHPSPLIGGFGLKSPPPQIFIKNTPVPANPATTFSPARINSFITQYSTGQVAVKIEWEIQKERSKRWNPEVQFTSNYGAQDSLLWAPDNAGAYKEPRAIGSRYLTNHL

SEQ ID NO: 522 - protein, 736 aa, Bovine adeno-associated virus; identical to SEQ ID NO: 521

SEQ ID NO: 523 - protein, 600 aa, Bovine adeno-associated virus
TAPAAKKRPLEQSPQEPDSSSGVGKKGKQPARKRLNFDDEPGAGDGPPPEGPSSGAMSTETEMRAAAGGNGGDAGQGAEGVGNASGDWHCDSTWSESHVTTTSTRTWVLPTYNNHLYLRLGSSNASDTFNGFSTPWGYFDFNRFHCHFSPRDWQRLINNHWGLRPKSMQVRIFNIQVKEVTTSNGETTVSNNLTSTVQIFADSTYELPYVMDAGQEGSLPPFPNDVFMVPQYGYCGLVTGGSSQNQTDRNAFYCLEYFPSQMLRTGNNFEMVYKFENVPFHSMYAHSQSLDRLMNPLLDQYLWELQSTTSGGTLNQGNSATNFAKLTKTNFSGYRKNWLPGPMMKQQRFSKTASQNYKIPQGRNNSLLHYETRTTLDGRWSNFAPGTAMATAANDATDFSQAQLIFAGPNITGNTTTDANNLMFTSEDELRATNPRDTDLFGHLATNQQNATTVPTVDDVDGVGVYPGMVWQDRDIYYQGPIWAKIPHTDGHFHPSPLIGGFGLKSPPPQIFIKNTPVPANPATTFSPARINSFITQYSTGQVAVKIEWEIQKERSKRWNPEVQFTSNYGAQDSLLWAPDNAGAYKEPRAIGSRYLTNHL

SEQ ID NO: 524 - DNA, 2214 bp, Artificial Sequence
  Description of Artificial Sequence: Synthetic polynucleotide
atggctgccgatggttatcttccagattggctcgaggacactctctctgaaggaataagacagtggtggaagctcaaacctggcccaccaccaccaaagcccgcagagcggcataaggacgacagcaggggtcttgtgcttcctgggtacaagtacctcggacccttcaacggactcgacaagggagagccggtcaacgaggcagacgccgcggccctcgagcacgacaaagcctacgaccggcagctcgacagcggagacaacccgtacctcaagtacaaccacgccgacgcggagtttcaggagcgccttaaagaagatacgtcttttgggggcaacctcgggcgagcagtcttccaggccaaaaagaggcttcttgaacctcttggtctggttgaggaagcggctaagacggctcctggaaagaagaggcctgtagagcagtctcctcaggaaccggactcctcctcgggcatcggcaagacaggccagcagcccgctaaaaagagactcaatttcggtcagactggcgacacagagtcagtcccagaccctcaaccaatcggagaacctcccgcagccccctcaggtgtgggatctcttacaatggcttcaggtggtggcgcaccagtggcagacaataacgaaggtgccgatggagtgggtagttcctcgggaaattggcattgcgattcccaatggctgggggacagagtcatcaccaccagcacccgaacctgggccctgcccacctacaacaatcacctctacaagcaaatctccaacgggacatcgggaggagccaccaacgacaacacctacttcggctacagcaccccctgggggtattttgactttaacagattccactgccacttttcaccacgtgactggcagcgactcatcaacaacaactggggattccggcccaagagactcagcttcaagctcttcaacatccaggtcaaggaggtcacgcagaatgaaggcaccaagaccatcgccaataaccttaccagcacggtccaggtcttcacggactcggagtaccagctgccgtacgttctcggctctgcccaccagggctgcctgcctccgttcccggcggacgtgttcatgattccccagtacggctacctaacactcaacaacggtagtcaggccgtgggacgctcctccttctactgcctggaatactttccttcgcagatgctgagaaccggcaacaacttccagtttacttacaccttcgaggacgtgcctttccacagcagctacgcccacagccagagcttggaccggctgatgaatcctctgattgaccagtacctgtactacttgtctcggactcaaacaacaggaggcacggcaaatacgcagactctgggcttcagccaaggtgggcctaatacaatggccaatcaggcaaagaactggctgccaggaccctgttaccgccaacaacgcgtctcaacgacaaccgggcaaaacaacaatagcaactttgcctggactgctgggaccaaataccatctgaatggaagaaattcattggctaatcctggcatcgctatggcaacacacaaagacgacaaggagcgtttttttcccagtaacgggatcctgatttttggcaaacaaaatgctgccagagacaatgcggattacagcgatgtcatgctcaccagcgaggaagaaatcaaaaccactaaccctgtggctacagaggaatacggtatcgtggcagataacttgcagcagcaaaacacggctcctcaaattggaactgtcaacagccagggggccttacccggtatggtttggcagaaccgggacgtgtacctgcagggtcccatctgggccaagattcctcacacggacggcaacttccacccgtctccgctgatgggcggctttggcctgaaacatcctccgcctcagatcctgatcaagaacacgcctgtacctgcggatcctccgaccaccttcaaccagtcaaagctgaactctttcatcacgcaatacagcaccggacaggtcagcgtggaaattgaatgggagctgcagaaggaaaacagcaagcgctggaaccccgagatccagtacacctccaactactacaaatctacaagtgtggactttgctgttaatacagaaggcgtgtactctgaaccccaccccattggcacccgttacctcacccgtcccctgtaa

SEQ ID NO: 525 - protein, 737 aa, Artificial Sequence
  Description of Artificial Sequence: Synthetic polypeptide
MAADGYLPDWLEDTLSEGIRQWWKLKPGPPPPKPAERHKDDSRGLVLPGYKYLGPFNGLDKGEPVNEADAAALEHDKAYDRQLDSGDNPYLKYNHADAEFQERLKEDTSFGGNLGRAVFQAKKRLLEPLGLVEEAAKTAPGKKRPVEQSPQEPDSSSGIGKTGQQPAKKRLNFGQTGDTESVPDPQPIGEPPAAPSGVGSLTMASGGGAPVADNNEGADGVGSSSGNWHCDSQWLGDRVITTSTRTWALPTYNNHLYKQISNGTSGGATNDNTYFGYSTPWGYFDFNRFHCHFSPRDWQRLINNNWGFRPKRLSFKLFNIQVKEVTQNEGTKTIANNLTSTVQVFTDSEYQLPYVLGSAHQGCLPPFPADVFMIPQYGYLTLNNGSQAVGRSSFYCLEYFPSQMLRTGNNFQFTYTFEDVPFHSSYAHSQSLDRLMNPLIDQYLYYLSRTQTTGGTANTQTLGFSQGGPNTMANQAKNWLPGPCYRQQRVSTTTGQNNNSNFAWTAGTKYHLNGRNSLANPGIAMATHKDDKERFFPSNGILIFGKQNAARDNADYSDVMLTSEEEIKTTNPVATEEYGIVADNLQQQNTAPQIGTVNSQGALPGMVWQNRDVYLQGPIWAKIPHTDGNFHPSPLMGGFGLKHPPPQILIKNTPVPADPPTTFNQSKLNSFITQYSTGQVSVEIEWELQKENSKRWNPEIQYTSNYYKSTSVDFAVNTEGVYSEPHPIGTRYLTRPL

SEQ ID NO: 526 - protein, 736 aa, Artificial Sequence
  Description of Artificial Sequence: Synthetic polypeptide
MAADGYLPDWLEDNLSEGIREWWDLKPGAPKPKANQQKQDDGRGLVLPGYKYLGPFNGLDKGEPVNAADAAALEHDKAYDQQLKAGDNPYLRYNHADAEFQERLQEDTSFGGNLGRAVFQAKKRVLEPLGLVEEGAKTAPGKKRPVEQSPQEPDSSSGIGKTGQQPAKKRLNFGQTGDTESVPDPQPIGEPPAAPSGVGSLTMASGGGAPVADNNEGADGVGSSSGNWHCDSQWLGDRVITTSTRTWALPTYNNHLYKQISSASTGASNDNHYFGYSTPWGYFDFNRFHCHFSPRDWQRLINNNWGFRPKRLNFKLFNIQVKEVTDNNGVKTIANNLTSTVQVFTDSDYQLPYVLGSAHQGCLPPFPADVFMIPQYGYLTLNNGSQAVGRSSFYCLEYFPSQMLRTGNNFQFTYTFEDVPFHSSYAHSQSLDRLMNPLIDQYLYYLSRTQTTGGTANTQTLGFSQGGPNTMANQAKNWLPGPCYRQQRVSTTTGQNNNSNFAWTAGTKYHLNGRNSLANPGIAMATHKDDKERFFPSNGILIFGKQNAARDNADYSDVMLTSEEEIKTTNPVATEEYGIVADNLQQQNTAPQIGTVNSQGALPGMVWQNRDVYLQGPIWAKIPHTDGNFHPSPLMGGFGLKHPPPQILIKNTPVPADPPTTFNQSKLNSFITQYSTGQVSVEIEWELQKENSKRWNPEIQYTSNYYKSTSVDFAVNTEGVYSEPHPIGTRYLTRPL

SEQ ID NO: 527 - protein, 736 aa, Artificial Sequence
  Description of Artificial Sequence: Synthetic polypeptide
MAADGYLPDWLEDTLSEGIRQWWKLKPGPPPPKPAERHKDDSRGLVLPGYKYLGPFNGLDKGEPVNEADAAALEHDKAYDRQLDSGDNPYLKYNHADAEFQERLQGDTSFGGNLGRAVFQAKKRVLEPLGLVEEGAKTAPGKKRPVEQSPQEPDSSSGIGETGQQPAKKRLNFGQTGDSESVPDPQPLGEPPATPAAVGPTTMASGGGAPMADNNEGADGVGSSSGNWHCDSQWLGDRVITTSTRTWALPTYNNHLYKQISSASTGASNDNHYFGYSTPWGYFDFNRFHCHFSPRDWQRLINNNWGFRPKRLSFKLFNIQVKEVTDNNGVKTIANNLTSTVQVFTDSEYQLPYVLGSAHQGCLPPFPADVFMIPQYGYLTLNNGSQAVGRSSFYCLEYFPSQMLRTGNNFTFSYTFEDVPFHSSYAHSQSLDRLMNPLIDQYLYYLSRTQTTGGTANTQTLGFSQGGPNTMANQAKNWLPGPCYRQQRVSTTTGQNNNSNFAWTAGTKYHLNGRNSLANPGIAMATHKDDKERFFPSNGILIFGKQNAARDNADYSDVMLTSEEEIKTTNPVATEEYGIVADNLQQQNTAPQIGTVNSQGALPGMVWQNRDVYLQGPIWAKIPHTDGNFHPSPLMGGFGLKHPPPQILIKNTPVPADPPTTFNQSKLNSFITQYSTGQVSVEIEWELQKENSKRWNPEIQYTSNYYKSTSVDFAVNTEGVYSEPHPIGTRYLTRPL

SEQ ID NO: 528 - DNA, 2181 bp, Artificial Sequence
  Description of Artificial Sequence: Synthetic polynucleotide
atgtcttttgttgatcaccctccagattggttggaagaagttggtgaaggtcttcgcgagtttttgggccttgaagcgggcccaccgaaaccaaaacccaatcagcagcatcaagatcaagcccgtggtcttgtgctgcctggttataactatctcggacccggaaacggtctcgatcgaggagagcctgtcaacagggcagacgaggtcgcgcgagagcacgacatctcgtacaacgagcagcttgaggcgggagacaacccctacctcaagtacaaccacgcggacgccgagtttcaggagaagctcgccgacgacacatccttcgggggaaacctcggaaaggcagtctttcaggccaagaaaagggttctcgaaccttttggcctggttgaagagggtgctaagacggcccctaccggaaagcggatagacgaccactttccaaaaagaaagaaggctcggaccgaagaggactccaagccttccacctcgtcagacgccgaagctggacccagcggatcccagcagctgcaaatcccagcacaaccagcctcaagtttgggagctgatacaatgtctgcgggaggtggcggcccattgggcgacaataaccaaggtgccgatggagtgggcaatgcctcgggagattggcattgcgattccacgtggatgggggacagagtcgtcaccaagtccacccgcacctgggtgctgcccagctacaacaaccaccagtaccgagagatcaaaagcggctccgtcgacggaagcaacgccaacgcctactttggatacagcaccccctgggggtactttgactttaaccgcttccacagccactggagcccccgagactggcaaagactcatcaacaactattggggcttcagaccccggtctctcagagtcaaaatcttcaacatccaagtcaaagaggtcacggtgcaggactccaccaccaccatcgccaacaacctcacctccaccgtccaagtgtttacggacgacgactaccaactcccgtacgtcgtcggcaacgggaccgagggatgcctgccggccttccccccgcaggtctttacgctgccgcagtacggctacgcgacgctgaaccgagacaacggagacaacccgacagagcggagcagcttcttttgcctagagtactttcccagcaagatgctgaggacgggcaacaactttgagtttacctacagctttgaagaggtgcccttccactgcagcttcgccccgagccagaacctctttaagctggccaacccgctggtggaccagtacctgtaccgcttcgtgagcacctcggccacgggcgccatccagttccaaaagaacctggcgggcagatacgccaacacctacaaaaactggttcccggggcccatgggccgaacccagggctggaacacgagctctggggtcagcagcaccaacagagtcagcgtcaacaacttttccgtctcaaaccggatgaacctggagggggccagctaccaagtgaacccccagcccaacgggatgacaaacacgctccaaggcagcaaccgctacgcgctggaaaacaccatgatcttcaacgctcaaaacgccacgccgggaactacctcggtgtacccagaggacaatctactgctgaccagcgagagcgagactcagcccgtcaaccgggtggcttacaacacgggcggtcagatggccaccaacgcccagaacgccaccacggctcccacggtcgggacctacaacctccaggaagtgcttcctggcagcgtatggatggagagggacgtgtacctccaaggacccatctgggccaagatcccagagacgggggcgcactttcacccctctccggccatgggcggattcggactcaaacacccgccgcccatgatgctcatcaaaaacacgccggtgcccggcaacatcaccagcttctcggacgtgcccgtcagcagcttcatcacccagtacagcaccgggcaggtcaccgtggagatggaatgggagctcaaaaaggaaaactccaagaggtggaacccagagatccagtacaccaacaactacaacgacccccagtttgtggactttgctccagacggctccggcgaatacagaaccaccagagccatcggaacccgatacctcacccgacccctt

SEQ ID NO: 529 - protein, 726 aa, Artificial Sequence
  Description of Artificial Sequence: Synthetic polypeptide
MSFVDHPPDWLEEVGEGLREFLGLEAGPPKPKPNQQHQDQARGLVLPGYNYLGPGNGLDRGEPVNRADEVAREHDISYNEQLEAGDNPYLKYNHADAEFQEKLADDTSFGGNLGKAVFQAKKRVLEPFGLVEEGAKTAPTGKRIDDHFPKRKKARTEEDSKPSTSSDAEAGPSGSQQLQIPAQPASSLGADTMSAGGGGPLGDNNQGADGVGNASGDWHCDSTWMGDRVVTKSTRTWVLPSYNNHQYREIKSGSVDGSNANAYFGYSTPWGYFDFNRFHSHWSPRDWQRLINNYWGFRPRSLRVKIFNIQVKEVTVQDSTTTIANNLTSTVQVFTDDDYQLPYVVGNGTEGCLPAFPPQVFTLPQYGYATLNRDNGDNPTERSSFFCLEYFPSKMLRTGNNFEFTYSFEEVPFHCSFAPSQNLFKLANPLVDQYLYRFVSTSATGAIQFQKNLAGRYANTYKNWFPGPMGRTQGWNTSSGSSTNRVSVNNFSVSNRMNLEGASYQVNPQPNGMTNTLQGSNRYALENTMIFNAQNATPGTTSVYPEDNLLLTSESETQPVNRVAYNTGGQMATNAQNATTAPTVGTYNLQEVLPGSVWMERDVYLQGPIWAKIPETGAHFHPSPAMGGFGLKHPPPMMLIKNTPVPGNITSFSDVPVSSFITQYSTGQVTVEMEWELKKENSKRWNPEIQYTNNYNDPQFVDFAPDGSGEYRTTRAIGTRYLTRPL

SEQ ID NO: 530 - protein, 735 aa, Artificial Sequence
  Description of Artificial Sequence: Synthetic polypeptide
MAADGYLPDWLEDTLSEGIRQWWKLKPGPPPPKPAERHKDDSRGLVLPGYKYLGPFNGLDKGEPVNEADAAALEHDKAYDRQLDSGDNPYLKYNHADAEFQERLKEDTSFGGNLGRAVFQAKKRILEPLGLVEEPVKTAPGKKRPVEHSPAEPDSSSGTGKSGQQPARKRLNFGQTGDADSVPDPQPLGQPPAAPSGLGTNTMASGSGAPMADNNEGADGVGNSSGNWHCDSTWMGDRVITTSTRTWALPTYNNHLYKQISSQSGASNDNHYFGYSTPWGYFDFNRFHCHFSPRDWQRLINNNWGFRPKRLSFKLFNIQVKEVTQNDGTTTIANNLTSTVQVFTDSEYQLPYVLGSAHQGCLPPFPADVFMVPQYGYLTLNNGSQAVGRSSFYCLEYFPSQMLRTGNNFTFSYTFEDVPFHSSYAHSQSLDRLMNPLIDQYLYYLSRTNTPSGTTTMSRLQFSQAGASDIRDQSRNWLPGPCYRQQRVSKTAADNNNSDYSWTGATKYHLNGRDSLVNPGPAMASHKDDEEKYFPQSGVLIFGKQDSGKTNVDIEKVMITDEEEIRTTNPVATEQYGSVSTNLQSGNTQAATSDVNTQGVLPGMVWQDRDVYLQGPIWAKIPHTDGHFHPSPLMGGFGLKHPPPQILIKNTPVPANPSTTFSAAKFASFITQYSTGQVSVEIEWELQKENSKRWNPEIQYTSNYNKSVNVDFTVDTNGVYSEPRPIGTRYLTRNL

SEQ ID NO: 531 - DNA, 1797 bp, Artificial Sequence
  Description of Artificial Sequence: Synthetic polynucleotide
acggctccgaccggagacaagcggaaaggcgaagacgaacctcgtttgcccgacacttcttcacagactcccaagaaaaacaagaagcctcgcaaggaaagaccttccggcggggcagaagatccgggcgaaggcacctcttccaacgctggagcagcagcacccgcctctagtgtgggatcatctatcatggctgaaggaggtggcggcccagtgggcgatgcaggccagggtgccgatggagtgggcaattcctccggaaattggcattgcgattcccaatggctggaaaacggagtcgtcactcgaaccacccgaacctgggtcttgcccagctacaacaaccacctgtacaaacgaatccaaggacccagcggaggcgacaacaacaacaaattctttggattcagcaccccctggggatactttgactacaatcgattccactgccacttttccccgcgagactggcaacgactcatcaacaacaactggggcatccgtcccaaagcgatgcgctttagactctttaacatccaggttaaagaggtcacggtccaagacttcaacaccaccatcggcaacaacctcaccagtacggtccaggtctttgcggacaaggactaccaactgccgtacgtcctcggatcggctaccgaaggcaccttcccgccgttcccagcggatatctacacgatcccgcagtacgggtactgcacgctaaactacaacaacgaggcggtggatcgttcggccttctactgtctggactactttccctcagacatgctgcggacaggaaataactttgagtttacttacaccttcgaggacgttcctttccatagcatgtttgcccacaaccagacgctagaccggctgatgaatcccctcgtggatcagtacctctgggctttcagctccgtcagccaagcaggctcatctggacgagctcttcattactcgcgggcgactaaaaccaacatggcggctcaatataggaactggttacctgggcctttcttccgtgatcagcaaatctttacgggcgctagcaacatcactaaaaataacgtctttagcgtttgggaaaaaggcaagcaatgggaactcgacaatcggaccaacctaatgcagcccggtcctgcggcagcgaccacctttagcggagaacctgaccgtcaagccatgcaaaacacgctggcttttagcaggaccgtctacgatcaaacgaccgccacgaccgatcgtaaccagatactcatcaccaacgaagacgaaatcagacccaccaactcggtcggtatcgacgcgtggggagcagttcccaccaacaaccagtcgatcgtgacccccggcactcgcgcggccgtcaacaatcaaggggcgcttcccgggatggtgtggcaaaacagagacatttaccctacagggacccatttggccaaaattcccgacactgacaatcacttccatccgtccccgcttattgggcggtttggctgcaagcatccccctccccagattttcattaaaaacacacccgtccctgccaacccttcggaaacgttccagacggccaaagtggcctccttcatcaaccagtactcgaccggacagtgcaccgtcgaaatcttttgggaactcaagaaggaaacctccaagcgctggaaccccgaaatccagttcacctccaactttggcaacgcggccgacatccagtttgccgtctccgacacgggatcctattccgaacctcgtcccatcggtacccgttaccttaccaaacctctgtaa

SEQ ID NO: 532 - DNA, 1989 bp, Artificial Sequence
  Description of Artificial Sequence: Synthetic polynucleotide
atgaggtcgtactacgaggtcatcgttcagctgcccaacgacgtcgagagtcaggtacctggaatctccgattcgttcgtcaactggattacgtcgcgagaatggacgttgcctgaggacgccgattgggatttggaccaggtcgatcaagttcaactgacgctcggcgacaaaatccaacgggagattcgaactcattgggggacgatggccaaagaaccggactttcactattttatccaactggaacaaggtgaggtgttctttcatttacacgtcctgctggaaacgtgttccgtaaagccgatggtactcggaagatatatccgacatattcaacaaaaaattgtgagtaaagtctactgcgccacgagcctacgatggaaggatggatgcgtggtgaccaagaccaaaaatttcgggggcgcgaacaaggtccgggccgagtcgtatattcccgcctacctgatcccgaaacagcaaccggaagtgcagtgggcgtggactaacgtgcccgagtatataaaagcgtgcttgcaccgagaactgcgtgccagtctcgcgcgacttcacttcgaggaggcgggcgtctcgcaatccaaggaaaatctcgcgagaactgcagacggcgctcccgtgatgccgacccgcgtcagcaaacgctacatggagctcgtggattggctcgtggagaaggggatcaccaccgagaaggaatggctgctggaaaacagagaaagctttcggagctttcaggcctcgagcaactcggcgcgtcagatcaagacggccctgcaaggcgccattcaggagatgcttctgaccaagacggcggaggactacctcgtcggaaaggatcccgtctcggacgacgacatccgtcagaaccgcatctacaagattctggaactgaaccactacgacccagcgtacgtggggagtattttggtcgggtggtgccagaagaaatggggcaagcgaaacacgctgtggctgttcggacatgcgaccaccggcaagaccaacatcgcggaggctattgcccatgctgtgccgttctatggatgcgttaactggaccaacgagaactttccgttcaacgactgcgtcgaaaaaatgattatctggtgggaggagggcaaaatgaccgccaaagtggtggaaacagccaaggcgattctgggaggatctcgggtgagagtggaccaaaaatgcaaagcttcggttccgatcgaaccgacgccggtcattattaccagtaacaccaacatgtgttatgtcatcgacgggaacacgaccacgttcgagcataagcagccgttggaggacaggatgtttaagctcgaattgctgactcggttgcctgatgactttggtaaggtgaccaaacaggaggtgcgtcaattcttcaggtggtctcaggatcacctgacccctgtgatcccagaattcctagtgcggaaggcggagtctcgcaaaagacccgccccttccggggaaggctatataagcccgacaaagcggcccgcgctcgcagagcagcagcaggcgtcggagagcgcggacccggttcccaccaggtatcgtatcaaatgctcgaaacattgcggtatggataaaatgttgtttccttgccaaatttgtgaatcgatgaacagagatattaatatttgtgctattcataaaacgaccgactgtaaagagtgtttccccgactacggggataaagatgatgtagaactacccccctgtacagaacacaacgtgtctcgttgttatcaatgtcattcgggcgaattgtatcgcgtgacttcggactctgacgagaaacctgcccccgagagtgatgaaggcaccgagccatcctatgctccctgcacgattcaccacctgatgggcaagagtcacgggttagtcacttgcgcggcgtgtcggttgaaaaatagtacgttgcatgatgacttggatgacggtgatctcgaacaataa

SEQ ID NO: 533 - DNA, 1626 bp, Artificial Sequence
  Description of Artificial Sequence: Synthetic polynucleotide
atgaggtcgtactacgaggtcatcgttcagctgcccaacgacgtcgagagtcaggtacctggaatctccgattcgttcgtcaactggattacgtcgcgagaatggacgttgcctgaggacgccgattgggatttggaccaggtcgatcaagttcaactgacgctcggcgacaaaatccaacgggagattcgaactcattgggggacgatggccaaagaaccggactttcactattttatccaactggaacaaggtgaggtgttctttcatttacacgtcctgctggaaacgtgttccgtaaagccgatggtactcggaagatatatccgacatattcaacaaaaaattgtgagtaaagtctactgcgccacgagcctacgatggaaggatggatgcgtggtgaccaagaccaaaaatttcgggggcgcgaacaaggtccgggccgagtcgtatattcccgcctacctgatcccgaaacagcaaccggaagtgcagtgggcgtggactaacgtgcccgagtatataaaagcgtgcttgcaccgagaactgcgtgccagtctcgcgcgacttcacttcgaggaggcgggcgtctcgcaatccaaggaaaatctcgcgagaactgcagacggcgctcccgtgatgccgacccgcgtcagcaaacgctacatggagctcgtggattggctcgtggagaaggggatcaccaccgagaaggaatggctgctggaaaacagagaaagctttcggagctttcaggcctcgagcaactcggcgcgtcagatcaagacggccctgcaaggcgccattcaggagatgcttctgaccaagacggcggaggactacctcgtcggaaaggatcccgtctcggacgacgacatccgtcagaaccgcatctacaagattctggaactgaaccactacgacccagcgtacgtggggagtattttggtcgggtggtgccagaagaaatggggcaagcgaaacacgctgtggctgttcggacatgcgaccaccggcaagaccaacatcgcggaggctattgcccatgctgtgccgttctatggatgcgttaactggaccaacgagaactttccgttcaacgactgcgtcgaaaaaatgattatctggtgggaggagggcaaaatgaccgccaaagtggtggaaacagccaaggcgattctgggaggatctcgggtgagagtggaccaaaaatgcaaagcttcggttccgatcgaaccgacgccggtcattattaccagtaacaccaacatgtgttatgtcatcgacgggaacacgaccacgttcgagcataagcagccgttggaggacaggatgtttaagctcgaattgctgactcggttgcctgatgactttggtaaggtgaccaaacaggaggtgcgtcaattcttcaggtggtctcaggatcacctgacccctgtgatcccagaattcctagtgcggaaggcggagtctcgcaaaagacccgccccttccggggaaggctatataagcccgacaaagcggcccgcgctcgcagagcagcagcaggcgtcggagagcgcggacccggttcccaccagattggttggagcggttggtcaaaaagggagtgaatgctgcagctga

SEQ ID NO: 534 - DNA, 1323 bp, Artificial Sequence
  Description of Artificial Sequence: Synthetic polynucleotide
atggagctcgtggattggctcgtggagaaggggatcaccaccgagaaggaatggctgctggaaaacagagaaagctttcggagctttcaggcctcgagcaactcggcgcgtcagatcaagacggccctgcaaggcgccattcaggagatgcttctgaccaagacggcggaggactacctcgtcggaaaggatcccgtctcggacgacgacatccgtcagaaccgcatctacaagattctggaactgaaccactacgacccagcgtacgtggggagtattttggtcgggtggtgccagaagaaatggggcaagcgaaacacgctgtggctgttcggacatgcgaccaccggcaagaccaacatcgcggaggctattgcccatgctgtgccgttctatggatgcgttaactggaccaacgagaactttccgttcaacgactgcgtcgaaaaaatgattatctggtgggaggagggcaaaatgaccgccaaagtggtggaaacagccaaggcgattctgggaggatctcgggtgagagtggaccaaaaatgcaaagcttcggttccgatcgaaccgacgccggtcattattaccagtaacaccaacatgtgttatgtcatcgacgggaacacgaccacgttcgagcataagcagccgttggaggacaggatgtttaagctcgaattgctgactcggttgcctgatgactttggtaaggtgaccaaacaggaggtgcgtcaattcttcaggtggtctcaggatcacctgacccctgtgatcccagaattcctagtgcggaaggcggagtctcgcaaaagacccgccccttccggggaaggctatataagcccgacaaagcggcccgcgctcgcagagcagcagcaggcgtcggagagcgcggacccggttcccaccaggtatcgtatcaaatgctcgaaacattgcggtatggataaaatgttgtttccttgccaaatttgtgaatcgatgaacagagatattaatatttgtgctattcataaaacgaccgactgtaaagagtgtttccccgactacggggataaagatgatgtagaactacccccctgtacagaacacaacgtgtctcgttgttatcaatgtcattcgggcgaattgtatcgcgtgacttcggactctgacgagaaacctgcccccgagagtgatgaaggcaccgagccatcctatgctccctgcacgattcaccacctgatgggcaagagtcacgggttagtcacttgcgcggcgtgtcggttgaaaaatagtacgttgcatgatgacttggatgacggtgatctcgaacaataa

SEQ ID NO: 535 - DNA, 960 bp, Artificial Sequence
  Description of Artificial Sequence: Synthetic polynucleotide
atggagctcgtggattggctcgtggagaaggggatcaccaccgagaaggaatggctgctggaaaacagagaaagctttcggagctttcaggcctcgagcaactcggcgcgtcagatcaagacggccctgcaaggcgccattcaggagatgcttctgaccaagacggcggaggactacctcgtcggaaaggatcccgtctcggacgacgacatccgtcagaaccgcatctacaagattctggaactgaaccactacgacccagcgtacgtggggagtattttggtcgggtggtgccagaagaaatggggcaagcgaaacacgctgtggctgttcggacatgcgaccaccggcaagaccaacatcgcggaggctattgcccatgctgtgccgttctatggatgcgttaactggaccaacgagaactttccgttcaacgactgcgtcgaaaaaatgattatctggtgggaggagggcaaaatgaccgccaaagtggtggaaacagccaaggcgattctgggaggatctcgggtgagagtggaccaaaaatgcaaagcttcggttccgatcgaaccgacgccggtcattattaccagtaacaccaacatgtgttatgtcatcgacgggaacacgaccacgttcgagcataagcagccgttggaggacaggatgtttaagctcgaattgctgactcggttgcctgatgactttggtaaggtgaccaaacaggaggtgcgtcaattcttcaggtggtctcaggatcacctgacccctgtgatcccagaattcctagtgcggaaggcggagtctcgcaaaagacccgccccttccggggaaggctatataagcccgacaaagcggcccgcgctcgcagagcagcagcaggcgtcggagagcgcggacccggttcccaccagattggttggagcggttggtcaaaaagggagtgaatgctgcagctga

SEQ ID NO: 536 - DNA, 1608 bp, Artificial Sequence
  Description of Artificial Sequence: Synthetic polynucleotide
atggctgaaggaggtggcggcccagtgggcgatgcaggccagggtgccgatggagtgggcaattcctccggaaattggcattgcgattcccaatggctggaaaacggagtcgtcactcgaaccacccgaacctgggtcttgcccagctacaacaaccacctgtacaaacgaatccaaggacccagcggaggcgacaacaacaacaaattctttggattcagcaccccctggggatactttgactacaatcgattccactgccacttttccccgcgagactggcaacgactcatcaacaacaactggggcatccgtcccaaagcgatgcgctttagactctttaacatccaggttaaagaggtcacggtccaagacttcaacaccaccatcggcaacaacctcaccagtacggtccaggtctttgcggacaaggactaccaactgccgtacgtcctcggatcggctaccgaaggcaccttcccgccgttcccagcggatatctacacgatcccgcagtacgggtactgcacgctaaactacaacaacgaggcggtggatcgttcggccttctactgtctggactactttccctcagacatgctgcggacaggaaataactttgagtttacttacaccttcgaggacgttcctttccatagcatgtttgcccacaaccagacgctagaccggctgatgaatcccctcgtggatcagtacctctgggctttcagctccgtcagccaagcaggctcatctggacgagctcttcattactcgcgggcgactaaaaccaacatggcggctcaatataggaactggttacctgggcctttcttccgtgatcagcaaatctttacgggcgctagcaacatcactaaaaataacgtctttagcgtttgggaaaaaggcaagcaatgggaactcgacaatcggaccaacctaatgcagcccggtcctgcggcagcgaccacctttagcggagaacctgaccgtcaagccatgcaaaacacgctggcttttagcaggaccgtctacgatcaaacgaccgccacgaccgatcgtaaccagatactcatcaccaacgaagacgaaatcagacccaccaactcggtcggtatcgacgcgtggggagcagttcccaccaacaaccagtcgatcgtgacccccggcactcgcgcggccgtcaacaatcaaggggcgcttcccgggatggtgtggcaaaacagagacatttaccctacagggacccatttggccaaaattcccgacactgacaatcacttccatccgtccccgcttattgggcggtttggctgcaagcatccccctccccagattttcattaaaaacacacccgtccctgccaacccttcggaaacgttccagacggccaaagtggcctccttcatcaaccagtactcgaccggacagtgcaccgtcgaaatcttttgggaactcaagaaggaaacctccaagcgctggaaccccgaaatccagttcacctccaactttggcaacgcggccgacatccagtttgccgtctccgacacgggatcctattccgaacctcgtcccatcggtacccgttaccttaccaaacctctgtaa

SEQ ID NO: 537 - DNA, 2232 bp, Artificial Sequence
  Description of Artificial Sequence: Synthetic polynucleotide
atgtctctcatttctgatgcgattccagattggttggagcggttggtcaaaaagggagtgaatgctgcagctgatttctaccatttggaaagcggtcctcctcgtcctaaggcaaatcagcaaactcaagaatctcttgaaaaggacgattcgagaggtctcgtgttcccaggctacaattatctaggccctttcaacggtctagataaaggagaacccgtcaacgaggcagacgctgccgccttagaacacgacaaggcttacgacctcgaaatcaaggacgggcacaacccgtactttgagtacaacgaggccgacagacgtttccaggaacgtctcaaagacgatacctcctttggaggcaatttaggtaaagccatcttccaggccaaaaagagggttctcgaaccctttggtctggtggaagactcaaagacggctccgaccggagacaagcggaaaggcgaagacgaacctcgtttgcccgacacttcttcacagactcccaagaaaaacaagaagcctcgcaaggaaagaccttccggcggggcagaagatccgggcgaaggcacctcttccaacgctggagcagcagcacccgcctctagtgtgggatcatctatcatggctgaaggaggtggcggcccagtgggcgatgcaggccagggtgccgatggagtgggcaattcctccggaaattggcattgcgattcccaatggctggaaaacggagtcgtcactcgaaccacccgaacctgggtcttgcccagctacaacaaccacctgtacaaacgaatccaaggacccagcggaggcgacaacaacaacaaattctttggattcagcaccccctggggatactttgactacaatcgattccactgccacttttccccgcgagactggcaacgactcatcaacaacaactggggcatccgtcccaaagcgatgcgctttagactctttaacatccaggttaaagaggtcacggtccaagacttcaacaccaccatcggcaacaacctcaccagtacggtccaggtctttgcggacaaggactaccaactgccgtacgtcctcggatcggctaccgaaggcaccttcccgccgttcccagcggatatctacacgatcccgcagtacgggtactgcacgctaaactacaacaacgaggcggtggatcgttcggccttctactgtctggactactttccctcagacatgctgcggacaggaaataactttgagtttacttacaccttcgaggacgttcctttccatagcatgtttgcccacaaccagacgctagaccggctgatgaatcccctcgtggatcagtacctctgggctttcagctccgtcagccaagcaggctcatctggacgagctcttcattactcgcgggcgactaaaaccaacatggcggctcaatataggaactggttacctgggcctttcttccgtgatcagcaaatctttacgggcgctagcaacatcactaaaaataacgtctttagcgtttgggaaaaaggcaagcaatgggaactcgacaatcggaccaacctaatgcagcccggtcctgcggcagcgaccacctttagcggagaacctgaccgtcaagccatgcaaaacacgctggcttttagcaggaccgtctacgatcaaacgaccgccacgaccgatcgtaaccagatactcatcaccaacgaagacgaaatcagacccaccaactcggtcggtatcgacgcgtggggagcagttcccaccaacaaccagtcgatcgtgacccccggcactcgcgcggccgtcaacaatcaaggggcgcttcccgggatggtgtggcaaaacagagacatttaccctacagggacccatttggccaaaattcccgacactgacaatcacttccatccgtccccgcttattgggcggtttggctgcaagcatccccctccccagattttcattaaaaacacacccgtccctgccaacccttcggaaacgttccagacggccaaagtggcctccttcatcaaccagtactcgaccggacagtgcaccgtcgaaatcttttgggaactcaagaaggaaacctccaagcgctggaaccccgaaatccagttcacctccaactttggcaacgcggccgacatccagtttgccgtctccgacacgggatcctattccgaacctcgtcccatcggtacccgttaccttaccaaacctctgtaa

SEQ ID NO: 538 - protein, 535 aa, Artificial Sequence
  Description of Artificial Sequence: Synthetic polypeptide
MAEGGGGPVGDAGQGADGVGNSSGNWHCDSQWLENGVVTRTTRTWVLPSYNNHLYKRIQGPSGGDNNNKFFGFSTPWGYFDYNRFHCHFSPRDWQRLINNNWGIRPKAMRFRLFNIQVKEVTVQDFNTTIGNNLTSTVQVFADKDYQLPYVLGSATEGTFPPFPADIYTIPQYGYCTLNYNNEAVDRSAFYCLDYFPSDMLRTGNNFEFTYTFEDVPFHSMFAHNQTLDRLMNPLVDQYLWAFSSVSQAGSSGRALHYSRATKTNMAAQYRNWLPGPFFRDQQIFTGASNITKNNVFSVWEKGKQWELDNRTNLMQPGPAAATTFSGEPDRQAMQNTLAFSRTVYDQTTATTDRNQILITNEDEIRPTNSVGIDAWGAVPTNNQSIVTPGTRAAVNNQGALPGMVWQNRDIYPTGTHLAKIPDTDNHFHPSPLIGRFGCKHPPPQIFIKNTPVPANPSETFQTAKVASFINQYSTGQCTVEIFWELKKETSKRWNPEIQFTSNFGNAADIQFAVSDTGSYSEPRPIGTRYLTKPL

SEQ ID NO: 539 - protein, 440 aa, Artificial Sequence
  Description of Artificial Sequence: Synthetic polypeptide
MELVDWLVEKGITTEKEWLLENRESFRSFQASSNSARQIKTALQGAIQEMLLTKTAEDYLVGKDPVSDDDIRQNRIYKILELNHYDPAYVGSILVGWCQKKWGKRNTLWLFGHATTGKTNIAEAIAHAVPFYGCVNWTNENFPFNDCVEKMIIWWEEGKMTAKVVETAKAILGGSRVRVDQKCKASVPIEPTPVIITSNTNMCYVIDGNTTTFEHKQPLEDRMFKLELLTRLPDDFGKVTKQEVRQFFRWSQDHLTPVIPEFLVRKAESRKRPAPSGEGYISPTKRPALAEQQQASESADPVPTRYRIKCSKHCGMDKMLFPCQICESMNRDINICAIHKTTDCKECFPDYGDKDDVELPPCTEHNVSRCYQCHSGELYRVTSDSDEKPAPESDEGTEPSYAPCTIHHLMGKSHGLVTCAACRLKNSTLHDDLDDGDLEQ

SEQ ID NO: 540 - protein, 319 aa, Artificial Sequence
  Description of Artificial Sequence: Synthetic polypeptide
MELVDWLVEKGITTEKEWLLENRESFRSFQASSNSARQIKTALQGAIQEMLLTKTAEDYLVGKDPVSDDDIRQNRIYKILELNHYDPAYVGSILVGWCQKKWGKRNTLWLFGHATTGKTNIAEAIAHAVPFYGCVNWTNENFPFNDCVEKMIIWWEEGKMTAKVVETAKAILGGSRVRVDQKCKASVPIEPTPVIITSNTNMCYVIDGNTTTFEHKQPLEDRMFKLELLTRLPDDFGKVTKQEVRQFFRWSQDHLTPVIPEFLVRKAESRKRPAPSGEGYISPTKRPALAEQQQASESADPVPTRLVGAVGQKGSECCS

SEQ ID NO: 541 - protein, 662 aa, Artificial Sequence
  Description of Artificial Sequence: Synthetic polypeptide
MRSYYEVIVQLPNDVESQVPGISDSFVNWITSREWTLPEDADWDLDQVDQVQLTLGDKIQREIRTHWGTMAKEPDFHYFIQLEQGEVFFHLHVLLETCSVKPMVLGRYIRHIQQKIVSKVYCATSLRWKDGCVVTKTKNFGGANKVRAESYIPAYLIPKQQPEVQWAWTNVPEYIKACLHRELRASLARLHFEEAGVSQSKENLARTADGAPVMPTRVSKRYMELVDWLVEKGITTEKEWLLENRESFRSFQASSNSARQIKTALQGAIQEMLLTKTAEDYLVGKDPVSDDDIRQNRIYKILELNHYDPAYVGSILVGWCQKKWGKRNTLWLFGHATTGKTNIAEAIAHAVPFYGCVNWTNENFPFNDCVEKMIIWWEEGKMTAKVVETAKAILGGSRVRVDQKCKASVPIEPTPVIITSNTNMCYVIDGNTTTFEHKQPLEDRMFKLELLTRLPDDFGKVTKQEVRQFFRWSQDHLTPVIPEFLVRKAESRKRPAPSGEGYISPTKRPALAEQQQASESADPVPTRYRIKCSKHCGMDKMLFPCQICESMNRDINICAIHKTTDCKECFPDYGDKDDVELPPCTEHNVSRCYQCHSGELYRVTSDSDEKPAPESDEGTEPSYAPCTIHHLMGKSHGLVTCAACRLKNSTLHDDLDDGDLEQ

SEQ ID NO: 542 - protein, 541 aa, Artificial Sequence
  Description of Artificial Sequence: Synthetic polypeptide
MRSYYEVIVQLPNDVESQVPGISDSFVNWITSREWTLPEDADWDLDQVDQVQLTLGDKIQREIRTHWGTMAKEPDFHYFIQLEQGEVFFHLHVLLETCSVKPMVLGRYIRHIQQKIVSKVYCATSLRWKDGCVVTKTKNFGGANKVRAESYIPAYLIPKQQPEVQWAWTNVPEYIKACLHRELRASLARLHFEEAGVSQSKENLARTADGAPVMPTRVSKRYMELVDWLVEKGITTEKEWLLENRESFRSFQASSNSARQIKTALQGAIQEMLLTKTAEDYLVGKDPVSDDDIRQNRIYKILELNHYDPAYVGSILVGWCQKKWGKRNTLWLFGHATTGKTNIAEAIAHAVPFYGCVNWTNENFPFNDCVEKMIIWWEEGKMTAKVVETAKAILGGSRVRVDQKCKASVPIEPTPVIITSNTNMCYVIDGNTTTFEHKQPLEDRMFKLELLTRLPDDFGKVTKQEVRQFFRWSQDHLTPVIPEFLVRKAESRKRPAPSGEGYISPTKRPALAEQQQASESADPVPTRLVGAVGQKGSECCS

SEQ ID NO: 543 - protein, 743 aa, Artificial Sequence
  Description of Artificial Sequence: Synthetic polypeptide
MSLISDAIPDWLERLVKKGVNAAADFYHLESGPPRPKANQQTQESLEKDDSRGLVFPGYNYLGPFNGLDKGEPVNEADAAALEHDKAYDLEIKDGHNPYFEYNEADRRFQERLKDDTSFGGNLGKAIFQAKKRVLEPFGLVEDSKTAPTGDKRKGEDEPRLPDTSSQTPKKNKKPRKERPSGGAEDPGEGTSSNAGAAAPASSVGSSIMAEGGGGPVGDAGQGADGVGNSSGNWHCDSQWLENGVVTRTTRTWVLPSYNNHLYKRIQGPSGGDNNNKFFGFSTPWGYFDYNRFHCHFSPRDWQRLINNNWGIRPKAMRFRLFNIQVKEVTVQDFNTTIGNNLTSTVQVFADKDYQLPYVLGSATEGTFPPFPADIYTIPQYGYCTLNYNNEAVDRSAFYCLDYFPSDMLRTGNNFEFTYTFEDVPFHSMFAHNQTLDRLMNPLVDQYLWAFSSVSQAGSSGRALHYSRATKTNMAAQYRNWLPGPFFRDQQIFTGASNITKNNVFSVWEKGKQWELDNRTNLMQPGPAAATTFSGEPDRQAMQNTLAFSRTVYDQTTATTDRNQILITNEDEIRPTNSVGIDAWGAVPTNNQSIVTPGTRAAVNNQGALPGMVWQNRDIYPTGTHLAKIPDTDNHFHPSPLIGRFGCKHPPPQIFIKNTPVPANPSETFQTAKVASFINQYSTGQCTVEIFWELKKETSKRWNPEIQFTSNFGNAADIQFAVSDTGSYSEPRPIGTRYLTKPL

SEQ ID NO: 544 - protein, 598 aa, Artificial Sequence
  Description of Artificial Sequence: Synthetic polypeptide
TAPTGDKRKGEDEPRLPDTSSQTPKKNKKPRKERPSGGAEDPGEGTSSNAGAAAPASSVGSSIMAEGGGGPVGDAGQGADGVGNSSGNWHCDSQWLENGVVTRTTRTWVLPSYNNHLYKRIQGPSGGDNNNKFFGFSTPWGYFDYNRFHCHFSPRDWQRLINNNWGIRPKAMRFRLFNIQVKEVTVQDFNTTIGNNLTSTVQVFADKDYQLPYVLGSATEGTFPPFPADIYTIPQYGYCTLNYNNEAVDRSAFYCLDYFPSDMLRTGNNFEFTYTFEDVPFHSMFAHNQTLDRLMNPLVDQYLWAFSSVSQAGSSGRALHYSRATKTNMAAQYRNWLPGPFFRDQQIFTGASNITKNNVFSVWEKGKQWELDNRTNLMQPGPAAATTFSGEPDRQAMQNTLAFSRTVYDQTTATTDRNQILITNEDEIRPTNSVGIDAWGAVPTNNQSIVTPGTRAAVNNQGALPGMVWQNRDIYPTGTHLAKIPDTDNHFHPSPLIGRFGCKHPPPQIFIKNTPVPANPSETFQTAKVASFINQYSTGQCTVEIFWELKKETSKRWNPEIQFTSNFGNAADIQFAVSDTGSYSEPRPIGTRYLTKPL

SEQ ID NO: 545 - DNA, 4694 bp, Artificial Sequence
  Description of Artificial Sequence: Synthetic polynucleotide
tggccagtttccaagacaggctcgctcgctcactcgggccggggccccaaaggggcccctagcgaccgcttcgcggtcgcggcccgagtgagcgagcgagcctgtcttggaaactggccagcactccggtgaggtaatgccgtcacgtggtcgggaatgggaacgggaaatctcgcgagaacgtaaacaaatataagacggcgccacacggcgctgcgtcatacgcgcgcgcgcaccggcgagatgaggtcgtactacgaggtcatcgttcagctgcccaacgacgtcgagagtcaggtacctggaatctccgattcgttcgtcaactggattacgtcgcgagaatggacgttgcctgaggacgccgattgggatttggaccaggtcgatcaagttcaactgacgctcggcgacaaaatccaacgggagattcgaactcattgggggacgatggccaaagaaccggactttcactattttatccaactggaacaaggtgaggtgttctttcatttacacgtcctgctggaaacgtgttccgtaaagccgatggtactcggaagatatatccgacatattcaacaaaaaattgtgagtaaagtctactgcgccacgagcctacgatggaaggatggatgcgtggtgaccaagaccaaaaatttcgggggcgcgaacaaggtccgggccgagtcgtatattcccgcctacctgatcccgaaacagcaaccggaagtgcagtgggcgtggactaacgtgcccgagtatataaaagcgtgcttgcaccgagaactgcgtgccagtctcgcgcgacttcacttcgaggaggcgggcgtctcgcaatccaaggaaaatctcgcgagaactgcagacggcgctcccgtgatgccgacccgcgtcagcaaacgctacatggagctcgtggattggctcgtggagaaggggatcaccaccgagaaggaatggctgctggaaaacagagaaagctttcggagctttcaggcctcgagcaactcggcgcgtcagatcaagacggccctgcaaggcgccattcaggagatgcttctgaccaagacggcggaggactacctcgtcggaaaggatcccgtctcggacgacgacatccgtcagaaccgcatctacaagattctggaactgaaccactacgacccagcgtacgtggggagtattttggtcgggtggtgccagaagaaatggggcaagcgaaacacgctgtggctgttcggacatgcgaccaccggcaagaccaacatcgcggaggctattgcccatgctgtgccgttctatggatgcgttaactggaccaacgagaactttccgttcaacgactgcgtcgaaaaaatgattatctggtgggaggagggcaaaatgaccgccaaagtggtggaaacagccaaggcgattctgggaggatctcgggtgagagtggaccaaaaatgcaaagcttcggttccgatcgaaccgacgccggtcattattaccagtaacaccaacatgtgttatgtcatcgacgggaacacgaccacgttcgagcataagcagccgttggaggacaggatgtttaagctcgaattgctgactcggttgcctgatgactttggtaaggtgaccaaacaggaggtgcgtcaattcttcaggtggtctcaggatcacctgacccctgtgatcccagaattcctagtgcggaaggcggagtctcgcaaaagacccgccccttccggggaaggctatataagcccgacaaagcggcccgcgctcgcagagcagcagcaggcgtcggagagcgcggacccggttcccaccaggtatcgtatcaaatgctcgaaacattgcggtatggataaaatgttgtttccttgccaaatttgtgaatcgatgaacagagatattaatatttgtgctattcataaaacgaccgactgtaaagagtgtttccccgactacggggataaagatgatgtagaactacccccctgtacagaacacaacgtgtctcgttgttatcaatgtcattcgggcgaattgtatcgcgtgacttcggactctgacgagaaacctgcccccgagagtgatgaaggcaccgagccatcctatgctccctgcacgattcaccacctgatgggcaagagtcacgggttagtcacttgcgcggcgtgtcggttgaaaaatagtacgttgcatgatgacttggatgacggtgatctcgaacaataaatgattgaaatgtagccatgtctctcatttctgatgcgattccagattggttggagcggttggtcaaaaagggagtgaatgctgcagctgatttctaccatttggaaagcggtcctcctcgtcctaaggcaaatcagcaaactcaagaatctcttgaaaaggacgattcgagaggtctcgtgttcccaggctacaattatctaggccctttcaacggtctagataaaggagaacccgtcaacgaggcagacgctgccgccttagaacacgacaaggcttacgacctcgaaatcaaggacgggcacaacccgtactttgagtacaacgaggccgacagacgtttccaggaacgtctcaaagacgatacctcctttggaggcaatttaggtaaagccatcttccaggccaaaaagagggttctcgaaccctttggtctggtggaagactcaaagacggctccgaccggagacaagcggaaaggcgaagacgaacctcgtttgcccgacacttcttcacagactcccaagaaaaacaagaagcctcgcaaggaaagaccttccggcggggcagaagatccgggcgaaggcacctcttccaacgctggagcagcagcacccgcctctagtgtgggatcatctatcatggctgaaggaggtggcggcccagtgggcgatgcaggccagggtgccgatggagtgggcaattcctccggaaattggcattgcgattcccaatggctggaaaacggagtcgtcactcgaaccacccgaacctgggtcttgcccagctacaacaaccacctgtacaaacgaatccaaggacccagcggaggcgacaacaacaacaaattctttggattcagcaccccctggggatactttgactacaatcgattccactgccacttttccccgcgagactggcaacgactcatcaacaacaactggggcatccgtcccaaagcgatgcgctttagactctttaacatccaggttaaagaggtcacggtccaagacttcaacaccaccatcggcaacaacctcaccagtacggtccaggtctttgcggacaaggactaccaactgccgtacgtcctcggatcggctaccgaaggcaccttcccgccgttcccagcggatatctacacgatcccgcagtacgggtactgcacgctaaactacaacaacgaggcggtggatcgttcggccttctactgtctggactactttccctcagacatgctgcggacaggaaataactttgagtttacttacaccttcgaggacgttcctttccatagcatgtttgcccacaaccagacgctagaccggctgatgaatcccctcgtggatcagtacctctgggctttcagctccgtcagccaagcaggctcatctggacgagctcttcattactcgcgggcgactaaaaccaacatggcggctcaatataggaactggttacctgggcctttcttccgtgatcagcaaatctttacgggcgctagcaacatcactaaaaataacgtctttagcgtttgggaaaaaggcaagcaatgggaactcgacaatcggaccaacctaatgcagcccggtcctgcggcagcgaccacctttagcggagaacctgaccgtcaagccatgcaaaacacgctggcttttagcaggaccgtctacgatcaaacgaccgccacgaccgatcgtaaccagatactcatcaccaacgaagacgaaatcagacccaccaactcggtcggtatcgacgcgtggggagcagttcccaccaacaaccagtcgatcgtgacccccggcactcgcgcggccgtcaacaatcaaggggcgcttcccgggatggtgtggcaaaacagagacatttaccctacagggacccatttggccaaaattcccgacactgacaatcacttccatccgtccccgcttattgggcggtttggctgcaagcatccccctccccagattttcattaaaaacacacccgtccctgccaacccttcggaaacgttccagacggccaaagtggcctccttcatcaaccagtactcgaccggacagtgcaccgtcgaaatcttttgggaactcaagaaggaaacctccaagcgctggaaccccgaaatccagttcacctccaactttggcaacgcggccgacatccagtttgccgtctccgacacgggatcctattccgaacctcgtcccatcggtacccgttaccttaccaaacctctgtaaattaaacccttcaataaaccgtttatgcgtaactgtatttccgtctcctgtcgttattcagtcacatgatgcggcattacctcaccggagtgctggccagtttccaagacaggctcgctcgctcactcgggccggggccccaaaggggcccctagcgaccgcttcgcggtcgcggcccgagtgagcgagcgagcctgtcttggaaactggcca

SEQ ID NO: 546 - DNA, 2211 bp, Artificial Sequence
  Description of Artificial Sequence: Synthetic polynucleotide
atggctgctgatggttatcttccagattggctcgaggacactctctctgaaggaataagacagtggtggaagctcaaacctggcccaccaccaccaaagcccgcagagcggcataaggacgacagcaggggtcttgtgcttcctgggtacaagtacctcggacccttcaacggactcgacaagggagagccggtcaacgaggcagacgcagcggccctcgagcacgacaaggcctacgaccagcagctcaaggccggtgacaacccctacctcaagtacaaccacgccgacgcggagttccagcagcggcttcagggcgacacatcgtttgggggcaacctcggcagagcagtcttccaggccaaaaagagggttcttgaacctcttggtctggttgagcaagcgggtgagacggctcctggaaagaagagaccgttgattgaatccccccagcagcccgactcctccacgggtatcggcaaaaaaggcaagcagccggctaaaaagagactcaattttggtcagactggcgactcagagtcagtccccgacccacaacctctcggagaacctccagcaacccccgctgctgtgggacctactacaatggcttcaggtggtggcgcaccaatggcagacaataacgaaggcgccgacggagtgggtaatgcctcaggaaattggcattgcgattccacatggctgggcgacagagtcatcaccaccagcacccgcacctgggccttgcccacctacaataaccacctctacaagcaaatctccagtgcttcaacgggggccagcaacgacaaccactacttcggctacagcaccccctgggggtattttgacttcaacagattccactgccacttttcaccacgtgactggcagcgactcatcaacaacaattggggattccggcccaagagactcaacttcaaactcttcaacatccaagtcaaggaggtcacgacgaatgatggcgtcacaaccatcgctaataaccttaccagcacggttcaagtcttctcggactcagactatcagctcccgtacgtgctcgggtcggctcacgagggctgcctcccgccgttcccagcagacgtcttcatggtgccacagtatggatacctcaccctgaacaacgggagtcaggcagtaggacgctcttcattttactgcctggagtactttccttctcagatgctgcgtaccggaaacaactttaccttcagctacacttttgaggacgttcctttccacagcagctacgctcacagccagagtctggaccgtctcatgaatcctctcatcgaccagtacctgtattacctgaacagaactcagaatcagtccggaagtgcccaaaacaaggacttgctgtttagccgggggtctccagctggcatgtctgttcagcccaaaaactggctacctggaccctgttatcggcagcagcgcgtttctaaaacaaaaacagacaacaacaacagcaactttacctggactggtgcttcaaaatataaccttaatgggcgtgaatctataatcaaccctggcactgctatggcctcacacaaagacgacaaagacaagttctttcccatgagcggtgtcatgatttttggaaaggagagcgccggagcttcaaacactgcattggacaatgtcatgatcacagacgaagaggaaatcaaagccactaaccccgtggccaccgaaagatttgggactgtggcagtcaatctccagagcagcagcacagaccctgcgaccggagatgtgcatgttatgggagccttacctggaatggtgtggcaagacagagacgtatacctgcagggtcccatttgggccaaaattcctcacacagatggacactttcacccgtctcctcttatgggcggctttggactcaagaacccgcctcctcagatcctcatcaaaaacacgcctgttcctgcgaatcctccggcggagttttcagctacaaagtttgcttcattcatcacccaatactccacaggacaagtgagtgtggaaattgaatgggagctgcagaaagaaaacagcaagcgctggaatcccgaagtgcagtacacatccaattatgcaaaatctgccaacgttgattttactgtggacaacaatggactttatactgagcctcgccccattggcacccgttacctcacccgtcccctgtaa

SEQ ID NO: 547 - protein, 736 aa, Artificial Sequence
  Description of Artificial Sequence: Synthetic polypeptide
MAADGYLPDWLEDTLSEGIRQWWKLKPGPPPPKPAERHKDDSRGLVLPGYKYLGPFNGLDKGEPVNEADAAALEHDKAYDQQLKAGDNPYLKYNHADAEFQQRLQGDTSFGGNLGRAVFQAKKRVLEPLGLVEQAGETAPGKKRPLIESPQQPDSSTGIGKKGKQPAKKRLNFGQTGDSESVPDPQPLGEPPATPAAVGPTTMASGGGAPMADNNEGADGVGNASGNWHCDSTWLGDRVITTSTRTWALPTYNNHLYKQISSASTGASNDNHYFGYSTPWGYFDFNRFHCHFSPRDWQRLINNNWGFRPKRLNFKLFNIQVKEVTTNDGVTTIANNLTSTVQVFSDSDYQLPYVLGSAHEGCLPPFPADVFMVPQYGYLTLNNGSQAVGRSSFYCLEYFPSQMLRTGNNFTFSYTFEDVPFHSSYAHSQSLDRLMNPLIDQYLYYLNRTQNQSGSAQNKDLLFSRGSPAGMSVQPKNWLPGPCYRQQRVSKTKTDNNNSNFTWTGASKYNLNGRESIINPGTAMASHKDDKDKFFPMSGVMIFGKESAGASNTALDNVMITDEEEIKATNPVATERFGTVAVNLQSSSTDPATGDVHVMGALPGMVWQDRDVYLQGPIWAKIPHTDGHFHPSPLMGGFGLKNPPPQILIKNTPVPANPPAEFSATKFASFITQYSTGQVSVEIEWELQKENSKRWNPEVQYTSNYAKSANVDFTVDNNGLYTEPRPIGTRYLTRPL

SEQ ID NO: 548 - DNA, 2211 bp, Artificial Sequence
  Description of Artificial Sequence: Synthetic polynucleotide
atggcttccgatggttatcttccagattggctcgaggacaacctctctgagggcatccgcgagtggtgggacttgaaacctggagccccgaaacccaaagccaaccagcaaaagcaggacgacggccggggtctggtgcttcctggctacaagtacctcggacccttcaacggactcgacaagggggagcccgtcaacgcggcggatgcagcggccctcgagcacgacaaggcctacgaccagcagctcagagcgggtgacaatccgtacctgcggtataaccacgccgacgccgagtttcaggagcgtctgcaagaagatacgtcttttgggggcaacctcgggcgagcagtcttccaggccaagaagagggttctcgaaccttttggtctggttgaggaaggtgctaagacggctcctggaaagaaacgtccggtagagcagtcgccacaagagccagactcctcctcgggcattggcaagacaggccagcagcccgctaaaaagagactcaattttggtcagactggcgactcagagtcagtccccgacccacaacctctcggagaacctccagcaacccccgctgctgtgggacctactacaatggcttcaggcggtggcgcaccaatggcagacaataacgaaggcgccgacggagtgggtaatgcctcaggaaattggcattgcgattccacatggctgggcgacagagtcatcaccaccagcacccgaacatgggccttgcccacctataacaaccacctctacaagcaaatctccagtgcttcaacgggggccagcaacgacaaccactacttcggctacagcaccccctgggggtattttgatttcaacagattccactgccatttctcaccacgtgactggcagcgactcatcaacaacaattggggattccggcccaagagactcaacttcaaactcttcaacatccaagtcaaggaggtcacgacgaatgatggcgtcacaaccatcgctaataaccttaccagcacggttcaagtcttctcggactcggagtaccagcttccgtacgtcctcggctctgcgcaccagggctgcctccctccgttcccggcggacgtgttcatgattccgcagtacggctacctaacgctcaacaatggcagccaggcagtgggacggtcatccttttactgcctggaatatttcccatcgcagatgctgagaacgggcaataactttaccttcagctacaccttcgaggacgtgcctttccacagcagctacgcgcacagccagagcctggaccggctgatgaatcctctcatcgaccagtacctgtattacctgaacagaactcagaatcagtccggaagtgcccaaaacaaggacttgctgtttagccgggggtctccagctggcatgtctgttcagcccaaaaactggctacctggaccctgttaccggcagcagcgcgtttctaaaacaaaaacagacaacaacaacagcaactttacctggactggtgcttcaaaatataaccttaatgggcgtgaatctataatcaaccctggcactgctatggcctcacacaaagacgacaaagacaagttctttcccatgagcggtgtcatgatttttggaaaggagagcgccggagcttcaaacactgcattggacaatgtcatgatcacagacgaagaggaaatcaaagccactaaccccgtggccaccgaaagatttgggactgtggcagtcaatctccagagcagcagcacagaccctgcgaccggagatgtgcatgttatgggagccttacctggaatggtgtggcaagacagagacgtatacctgcagggtcccatttgggccaaaattcctcacacagatggacactttcacccgtctcctcttatgggcggctttggacttaagcacccgcctcctcagatcctcatcaaaaacacgcctgttcctgcgaatcctccggcagagttttcggctacaaagtttgcttcattcatcacccagtattctactggccaagtcagcgtggagattgaatgggagctgcagaaagaaaacagcaaacgctggaatcccgaagtgcagtatacatctaactatgcaaaatctgccaacgttgatttcactgtggacaacaatggactttatactgagcctcgtcccattggcacccgttacctcacccgtcccctgtaa

SEQ ID NO: 549 - protein, 736 aa, Artificial Sequence
  Description of Artificial Sequence: Synthetic polypeptide
MASDGYLPDWLEDNLSEGIREWWDLKPGAPKPKANQQKQDDGRGLVLPGYKYLGPFNGLDKGEPVNAADAAALEHDKAYDQQLRAGDNPYLRYNHADAEFQERLQEDTSFGGNLGRAVFQAKKRVLEPFGLVEEGAKTAPGKKRPVEQSPQEPDSSSGIGKTGQQPAKKRLNFGQTGDSESVPDPQPLGEPPATPAAVGPTTMASGGGAPMADNNEGADGVGNASGNWHCDSTWLGDRVITTSTRTWALPTYNNHLYKQISSASTGASNDNHYFGYSTPWGYFDFNRFHCHFSPRDWQRLINNNWGFRPKRLNFKLFNIQVKEVTTNDGVTTIANNLTSTVQVFSDSEYQLPYVLGSAHQGCLPPFPADVFMIPQYGYLTLNNGSQAVGRSSFYCLEYFPSQMLRTGNNFTFSYTFEDVPFHSSYAHSQSLDRLMNPLIDQYLYYLNRTQNQSGSAQNKDLLFSRGSPAGMSVQPKNWLPGPCYRQQRVSKTKTDNNNSNFTWTGASKYNLNGRESIINPGTAMASHKDDKDKFFPMSGVMIFGKESAGASNTALDNVMITDEEEIKATNPVATERFGTVAVNLQSSSTDPATGDVHVMGALPGMVWQDRDVYLQGPIWAKIPHTDGHFHPSPLMGGFGLKHPPPQILIKNTPVPANPPAEFSATKFASFITQYSTGQVSVEIEWELQKENSKRWNPEVQYTSNYAKSANVDFTVDNNGLYTEPRPIGTRYLTRPL

SEQ ID NO: 550 - DNA, 2211 bp, Artificial Sequence
  Description of Artificial Sequence: Synthetic polynucleotide
atggctgctgatggttatcttccagattggctcgaggacactctctctgaaggaataagacagtggtggaagctcaaacctggcccaccaccaccaaagcccgcagagcggcataaggacgacagcaggggtcttgtgcttcctgggtacaagtacctcggacccttcaacggactcgacaagggagagccggtcaacgaggcagacgcagcggccctcgagcacgacaaggcctacgaccagcagctcaaggccggtgacaacccctacctcaagtacaaccacgccgacgcggagttccagcagcggcttcagggcgacacatcgtttgggggcaacctcggcagagcagtcttccaggccaaaaagagggttcttgaacctcttggtctggttgagcaagcgggtgagacggctcctggaaagaagagaccgttgattgaatccccccagcagcccgactcctccacgggtatcggcaaaaaaggcaagcagccggctaaaaagagactcaattttggtcagactggcgactcagagtcagtccccgacccacaacctctcggagaacctccagcaacccccgctgctgtgggacctactacaatggcttcaggtggtggcgcaccaatggcagacaataacgaaggcgccgacggagtgggtaatgcctcaggaaattggcattgcgattccacatggctgggcgacagagtcatcaccaccagcacccgcacctgggccttgcccacctacaataaccacctctacaagcaaatctccagtgcttcaacgggggccagcaacgacaaccactacttcggctacagcaccccctgggggtattttgacttcaacagattccactgccacttttcaccacgtgactggcagcgactcatcaacaacaattggggattccggcccaagagactcaacttcaaactcttcaacatccaagtcaaggaggtcacgacgaatgatggcgtcacaaccatcgctaataaccttaccagcacggttcaagtcttctcggactcagactatcagctcccgtacgtgctcgggtcggctcacgagggctgcctcccgccgttcccagcagacgtcttcatggtgccacagtatggatacctcaccctgaacaacgggagtcaggcagtaggacgctcttcattttactgcctggagtactttccttctcagatgctgcgtaccggaaacaactttaccttcagctacacttttgaggacgttcctttccacagcagctacgctcacagccagagtctggaccgtctcatgaatcctctcatcgaccagtacctgtattacctgaacagaactcagaatcagtccggaagtgcccaaaacaaggacttgctgtttagccgggggtctccaactggcatgtctgttcagcccaaaaactggctacctggaccctgttatcggcagcagcgcgtttctaaaacaaaaacagacaacaacaacagcaactttacctggactggtgcttcaaaatataaccttaatgggcgtgaatctataatcaaccctggcactgctatggcctcacacaaagacgacaaagacaagttctttcccatgagcggtgtcatgatttttggaaaggagagcgccggagcttcaaacactgcattggacaatgtcatgatcacagacgaagaggaaatcaaagccactaaccccgtggccactgaaagatttgggactgtggcagtcaatctccagagcagcagcacagaccctgcgaccggagatgtgcatgccatgggagccttacctggaatggtgtggcaagacagagacgtatacctgcagggtcctatttgggccaaaattcctcacacggatggacactttcacccgtctcctctcatgggcggctttggactcaagaacccgcctcctcagatcctcatcaaaaacacgcctgttcctgcgaatcctccggcggagttttcagctacaaagtttgcttcattcatcacccagtattccacaggacaagtgagcgtggagattgaatgggagctgcagaaagaaaacagcaaacgctggaatcccgaagtgcagtatacatctaactatgcaaaatctgccaacgttgatttcactgtggacaacaatggactttatactgagcctcgccccattggcacccgttacctcacccgtcccctgtaa

SEQ ID NO: 551 - protein, 736 aa, Artificial Sequence
  Description of Artificial Sequence: Synthetic polypeptide
MAADGYLPDWLEDTLSEGIRQWWKLKPGPPPPKPAERHKDDSRGLVLPGYKYLGPFNGLDKGEPVNEADAAALEHDKAYDQQLKAGDNPYLKYNHADAEFQQRLQGDTSFGGNLGRAVFQAKKRVLEPLGLVEQAGETAPGKKRPLIESPQQPDSSTGIGKKGKQPAKKRLNFGQTGDSESVPDPQPLGEPPATPAAVGPTTMASGGGAPMADNNEGADGVGNASGNWHCDSTWLGDRVITTSTRTWALPTYNNHLYKQISSASTGASNDNHYFGYSTPWGYFDFNRFHCHFSPRDWQRLINNNWGFRPKRLNFKLFNIQVKEVTTNDGVTTIANNLTSTVQVFSDSDYQLPYVLGSAHEGCLPPFPADVFMVPQYGYLTLNNGSQAVGRSSFYCLEYFPSQMLRTGNNFTFSYTFEDVPFHSSYAHSQSLDRLMNPLIDQYLYYLNRTQNQSGSAQNKDLLFSRGSPTGMSVQPKNWLPGPCYRQQRVSKTKTDNNNSNFTWTGASKYNLNGRESIINPGTAMASHKDDKDKFFPMSGVMIFGKESAGASNTALDNVMITDEEEIKATNPVATERFGTVAVNLQSSSTDPATGDVHAMGALPGMVWQDRDVYLQGPIWAKIPHTDGHFHPSPLMGGFGLKNPPPQILIKNTPVPANPPAEFSATKFASFITQYSTGQVSVEIEWELQKENSKRWNPEVQYTSNYAKSANVDFTVDNNGLYTEPRPIGTRYLTRPL

SEQ ID NO: 552 - DNA, 2211 bp, Artificial Sequence
  Description of Artificial Sequence: Synthetic polynucleotide
atggctgccgatggttatcttccagattggctcgaggacaacctctctgagggcattcgcgagtggtgggcgctgaaacctggagccccgaagcccaaagccaaccagcaaaagcaggacgacggccggggtctggtgcttcctggctacaagtacctcggacccttcaacggactcgacaagggggagcccgtcaacgcggcggatgcagcggccctcgagcacgacaaggcctacgaccagcagctcaaagcgggtgacaatccgtacctgcggtataaccacgccgacgccgagtttcaggagcgtctgcaagaagatacgtcttttgggggcaacctcgggcgagcagtcttccaggccaagaagcgggttctcgaacctctcggtctggttgaggaaggcgctaagacggctcctggaaagaaacgtccggtagagcaatcgccacaagagccagactcctcctcgggcatcggcaagacaggccagcagcccgctaaaaagagactcaattttggtcagactggcgactcagagtcagtccccgacccacaacctctcggagaacctccagcaacccccgctgctgtgggacctactacaatggcttcaggcggtggcgcaccaatggcagacaataacgaaggcgccgacggagtgggtaatgcctcaggaaattggcattgcgattccacatggctgggcgacagagtcatcaccaccagcacccgaacatgggccttgcccacctataacaaccacctctacaagcaaatctccagtgcttcgacgggggccagcaacgacaaccactacttcggctacagcaccccctgggggtattttgactttaacagattccactgccacttttcaccacgtgactggcagcgactcatcaacaacaactggggattccggcccaagagactcagcttcaagctcttcaacatccaggtcaaggaggtcacgacgaatgatggcgtcacaaccatcgctaataaccttaccagcacggttcaagtcttctcggactcggagtaccagcttccgtacgtcctcggctctgcgcaccagggctgcctccctccgttcccggcggacgtgttcatgattccgcaatacggctacctgacgctcaacaatggcagccaagccgtgggacgttcatccttttactgcctggaatatttcccttctcagatgctgagaacgggcaacaactttaccttcagctacacctttgaggaagtgcctttccacagcagctacgcgcacagccagagcctggaccggctgatgaatcctctcatcgatcaatacctgtattacctgaacagaactcaaaatcagtccggaagtgcccaaaacaaggacttgctgtttagccgtgggtctccagctggcatgtctgttcagcccaaaaactggctacctggaccctgttatcggcagcagcgcgtttctaaaacaaaaacagacaacaacaacagcaattttacctggactggtgcttcaaaatataacctcaatgggcgtgaatccatcatcaaccctggcactgctatggcctcacataaagacgacgaagacaagttctttcccatgagcggtgtcatgatttttggaaaagagagcgccggagcttcaaacactgcattggacaatgtcatgattacagacgaagaggaaattaaagccactaaccctgtggccaccgaaagatttgggaccgtggcagtcaatttccagagcagcagcacagaccctgcgaccggagatgtgcatgctatgggagcattacctggcatggtgtggcaagatagagacgtgtacctgcagggtcccatttgggccaaaattcctcacacagatggacactttcacccgtctcctcttatgggcggctttggactcaagaacccgcctcctcagatcctcatcaaaaacacgcctgttcctgcgaatcctccggcggagttttcagctacaaagtttgcttcattcatcacccaatactccacaggacaagtgagcgtggagattgaatgggagctgcagaaagaaaacagcaaacgctggaatcccgaagtgcagtatacatctaactatgcaaaatctgccaacattgatttcactgtggacaacaatggactttatactgagcctcgccccattggcacccgttacctcacccgtccccagtaa

SEQ ID NO: 553 - protein, 736 aa, Artificial Sequence
  Description of Artificial Sequence: Synthetic polypeptide
MAADGYLPDWLEDNLSEGIREWWALKPGAPKPKANQQKQDDGRGLVLPGYKYLGPFNGLDKGEPVNAADAAALEHDKAYDQQLKAGDNPYLRYNHADAEFQERLQEDTSFGGNLGRAVFQAKKRVLEPLGLVEEGAKTAPGKKRPVEQSPQEPDSSSGIGKTGQQPAKKRLNFGQTGDSESVPDPQPLGEPPATPAAVGPTTMASGGGAPMADNNEGADGVGNASGNWHCDSTWLGDRVITTSTRTWALPTYNNHLYKQISSASTGASNDNHYFGYSTPWGYFDFNRFHCHFSPRDWQRLINNNWGFRPKRLSFKLFNIQVKEVTTNDGVTTIANNLTSTVQVFSDSEYQLPYVLGSAHQGCLPPFPADVFMIPQYGYLTLNNGSQAVGRSSFYCLEYFPSQMLRTGNNFTFSYTFEEVPFHSSYAHSQSLDRLMNPLIDQYLYYLNRTQNQSGSAQNKDLLFSRGSPAGMSVQPKNWLPGPCYRQQRVSKTKTDNNNSNFTWTGASKYNLNGRESIINPGTAMASHKDDEDKFFPMSGVMIFGKESAGASNTALDNVMITDEEEIKATNPVATERFGTVAVNFQSSSTDPATGDVHAMGALPGMVWQDRDVYLQGPIWAKIPHTDGHFHPSPLMGGFGLKNPPPQILIKNTPVPANPPAEFSATKFASFITQYSTGQVSVEIEWELQKENSKRWNPEVQYTSNYAKSANIDFTVDNNGLYTEPRPIGTRYLTRPQ

SEQ ID NO: 554 - DNA, 2211 bp, Artificial Sequence
  Description of Artificial Sequence: Synthetic polynucleotide
atggctgccgatggttatcttccagattggctcgaggacaacctctctgagggcattcgcgagtggtgggacttgaaacctggagccccgaaacccaaagccaaccagcaaaagcaggacgacggccggggtctggtgcttcctggctacaagtacctcggacccttcaacggactcgacaagggggagcccgtcaacgcggcggatgcagcggccctcgagcacgacaaggcctacgaccagcagctcaaagcgggtgacaatccgtaccttcggtataaccacgccgacgccgagtttcaggagcgtctgcaagaagatacgtcttttgggggcaacctcgggcgagcagtcttccaggccaaaaagagggttctcgaacctctcggtctggttgaggaagcggctaagacggctcctggaaagaaacgtccggtagagcagtcgccacaagagccagactcctcctcgggcattggcaagacaggccagcagcccgctaaaaagagactcaattttggtcagactggcgactcagagtcagtccccgacccacaacctctcggagaacctcccgcagccccctcaggtgtgggatctcttacaatggcttcaggtggtggcgcaccaatggcagacaataacgaaggcgccgacggagtgggtaatgcctcaggaaattggcattgcgattccacatggctgggcgacagagtcatcaccaccagcacccgcacctgggccttgcccacctacaataaccacctctacaagcaaatctccagtgcttcaacgggggccagcaacgacaaccactacttcggctacagcaccccctgggggtattttgacttcaacagattccactgccacttttcaccacgtgactggcaaagactcatcaacaacaattggggattccggcccaagagactcaacttcaagctcttcaacatccaagtcaaggaggtcacgacgaatgatggcgtcacgaccatcgctaataaccttaccagcacggttcaagtcttctcggactcggagtaccagttgccgtacgtcctcggctctgcgcaccagggctgcctccctccgttcccggcggacgtgttcatgattccgcagtacggctacctaacgctcaacaatggcagccaggcagtgggacggtcatccttttactgcctggaatatttcccatcgcagatgctgagaacgggcaacaactttaccttcagctacacctttgaggaagtgcctttccacagcagctacgcgcacagccagagcctggaccggctgatgaatcctctcatcgaccagtacctgtattacctgaacagaactcaaaatcagtccggaagtgcccaaaacaaggacttgctgtttagccgtgggtctccagctggcatgtctgttcagcccaaaaactggctacctggaccctgttaccggcagcagtgcgtttctaaaacaaaaacagacaacaacaacagcaactttacctggactggtgcttcaaaatataaccttaatgggcgtgaatctataatcaaccctggcactgctatggcctcacacaaagacgacaaagacaagttctttcccatgagcggtgtcatgatttttggaaaggagagcgccggagcttcaaacactgcattggacaatgtcatgatcacagacgaagaggaaatcaaagccactaaccccgtggccaccgaaagatttgggactgtggcagtcaatctccagagcagcagcacagaccctgcgaccggagatgtgcatgttatgggagccttacctggaatggtgtggcaagacagagacgtatacctgcagggtcctatttgggccaaaattcctcacacagatggacactttcacccgtctcctcttatgggcggctttggactcaagaacccgcctcctcagatcctcatcaaaaacacgcctgttcctgcgaatcctccggcggagttttcagctacaaagtttgcttcattcatcacccaatactccacaggacaagtgagcgtggagattgaatgggagctgcagaaagaaaacagcaagcgctggaatcccgaagtgcagtacacatccaattatgcaaaatctgccaacgttgatttcactgtggacaacaatggactttatactgagcctcgccccattggcacccgttacctcacccgtcccctgtaa

SEQ ID NO: 555 - protein, 736 aa, Artificial Sequence
  Description of Artificial Sequence: Synthetic polypeptide
MAADGYLPDWLEDNLSEGIREWWDLKPGAPKPKANQQKQDDGRGLVLPGYKYLGPFNGLDKGEPVNAADAAALEHDKAYDQQLKAGDNPYLRYNHADAEFQERLQEDTSFGGNLGRAVFQAKKRVLEPLGLVEEAAKTAPGKKRPVEQSPQEPDSSSGIGKTGQQPAKKRLNFGQTGDSESVPDPQPLGEPPAAPSGVGSLTMASGGGAPMADNNEGADGVGNASGNWHCDSTWLGDRVITTSTRTWALPTYNNHLYKQISSASTGASNDNHYFGYSTPWGYFDFNRFHCHFSPRDWQRLINNNWGFRPKRLNFKLFNIQVKEVTTNDGVTTIANNLTSTVQVFSDSEYQLPYVLGSAHQGCLPPFPADVFMIPQYGYLTLNNGSQAVGRSSFYCLEYFPSQMLRTGNNFTFSYTFEEVPFHSSYAHSQSLDRLMNPLIDQYLYYLNRTQNQSGSAQNKDLLFSRGSPAGMSVQPKNWLPGPCYRQQCVSKTKTDNNNSNFTWTGASKYNLNGRESIINPGTAMASHKDDKDKFFPMSGVMIFGKESAGASNTALDNVMITDEEEIKATNPVATERFGTVAVNLQSSSTDPATGDVHVMGALPGMVWQDRDVYLQGPIWAKIPHTDGHFHPSPLMGGFGLKNPPPQILIKNTPVPANPPAEFSATKFASFITQYSTGQVSVEIEWELQKENSKRWNPEVQYTSNYAKSANVDFTVDNNGLYTEPRPIGTRYLTRPL

SEQ ID NO: 556 - DNA, 2211 bp, Artificial Sequence
  Description of Artificial Sequence: Synthetic polynucleotide
atggctgccgatggttatcttccagattggctcgaggacaacctctctgagggcattcgcgaatggtgggacttgaaacctggagccccgaaacccaaagtcaaccagcaaaagcaggacaacgctcggggtcttgtgcttccgggttacaaatacctcggacccttcaacggactcgacaagggggagcccgtcaacgcggcggacgcagcggccctcgagcacgacaaggcctacgaccagcagctcaaagcgggtgacaatccgtaccttcggtataaccacgccgacgccgagtttcaggagcgtctgcaagaagatacgtcttttgggggcaaccttggacgagcagtcttccaggccaagaagagggttctcgaaccttttggtctggttgaggaaggtgctaagacggctcctggaaagaaacgtccggtagagcagtcgccacaagagccagactcctcctcgggcattggcaagacaggccagcagcccgctaaaaagagactcaattttggtcagactggcgactcagagtcagtccccgacccacaacctctcggagaacctccagcaacccccgctgctgtgggacctactacaatggcttcaggcggtggcgcaccaatggcagacaataacgaaggcgccgacggagtgggtaatgcctcaggaaattggcattgcgattccacatggctgggcgacagagtcatcaccaccagcacccgcacctgggccttgcccacctacaataaccacctctacaagcaaatctccagtgcttcaacgggggccagcaacgacaaccactacttcggctacagcaccccctgggggtattttgacttcaacagattccactgccacttttcaccacgtgactggcaaagactcatcaacaacaattggggattccggcccaagagactcaacttcaagctcttcaacatccaagtcaaggaggtcacgacgaatgatggcgtcacgaccatcgctaataaccttaccagcacggttcaagtcttctcggactcggagtaccagttgccgtacgtcctcggctctgcgcaccagggctgcctccctccgttcccggcggacgtgttcatgattccgcaatacggctacctgacgctcaacaatggcagccaggcagtgggacggtcatccttttactgcctggaatatttcccatcgcagatgctgagaacgggcaataactttaccttcagctacacttttgaggacgttcctttccacagcagctacgctcacagccagagcctggaccggctgatgaatcctctcatcgaccagtacctgtattacctgaacagaactcagaatcagtccggaagtgcccaaaacaaggacttgctgtttagccgtgggtctccaactggcatgtctgttcagcccaaaaactggctacctggaccctgttatcggcagcagcgcgtttctaaaacaaaaacagacaacaacaacagcaactttacctggactggtgcttcaaaatataaccttaatgggcgtgaatctataatcaaccctggcactgctatggcctcacacaaagacgacgaagacaagttctttcccatgagcggtgtcatgatttttggaaaggagagcgccggagcttcaaacactgcattggacaatgtcatgatcacagacgaagaggaaatcaaagccactaaccccgtggccactgaaagatttgggactgtggcagtcaatctccagagcagcagcacagaccctgcgaccggagatgtgcatgccatgggagccttacctggaatggtgtggcaagacagagacgtatacctgcagggtcctatttgggccaaaattcctcacacggatggacactttcacccgtctcctctcatgggcggctttggacttaagcacccgcctcctcagatcctcatcaaaaacacgcctgttcctgcgaatcctccggcagagttttcggctacaaagtttgcttcattcatcacccagtattccacaggacaagtgagcgtggagattgaatgggagctgcagaaagaaaacagcaaacgctggaatcccgaagtgcagtatacatctaactatgcaaaatctgccaacgttgatttcactgtggacaacaatggactttatactgagcctcgccccattggcacccgttacctcacccgtcccctgtaa

SEQ ID NO: 557 - protein, 736 aa, Artificial Sequence
  Description of Artificial Sequence: Synthetic polypeptide
MAADGYLPDWLEDNLSEGIREWWDLKPGAPKPKVNQQKQDNARGLVLPGYKYLGPFNGLDKGEPVNAADAAALEHDKAYDQQLKAGDNPYLRYNHADAEFQERLQEDTSFGGNLGRAVFQAKKRVLEPFGLVEEGAKTAPGKKRPVEQSPQEPDSSSGIGKTGQQPAKKRLNFGQTGDSESVPDPQPLGEPPATPAAVGPTTMASGGGAPMADNNEGADGVGNASGNWHCDSTWLGDRVITTSTRTWALPTYNNHLYKQISSASTGASNDNHYFGYSTPWGYFDFNRFHCHFSPRDWQRLINNNWGFRPKRLNFKLFNIQVKEVTTNDGVTTIANNLTSTVQVFSDSEYQLPYVLGSAHQGCLPPFPADVFMIPQYGYLTLNNGSQAVGRSSFYCLEYFPSQMLRTGNNFTFSYTFEDVPFHSSYAHSQSLDRLMNPLIDQYLYYLNRTQNQSGSAQNKDLLFSRGSPTGMSVQPKNWLPGPCYRQQRVSKTKTDNNNSNFTWTGASKYNLNGRESIINPGTAMASHKDDEDKFFPMSGVMIFGKESAGASNTALDNVMITDEEEIKATNPVATERFGTVAVNLQSSSTDPATGDVHAMGALPGMVWQDRDVYLQGPIWAKIPHTDGHFHPSPLMGGFGLKHPPPQILIKNTPVPANPPAEFSATKFASFITQYSTGQVSVEIEWELQKENSKRWNPEVQYTSNYAKSANVDFTVDNNGLYTEPRPIGTRYLTRPL

SEQ ID NO: 558 - DNA, 2208 bp, Artificial Sequence
  Description of Artificial Sequence: Synthetic polynucleotide
  modified_base (955)..(955): a, t, c, or g
  modified_base (971)..(972): a, t, c, or g
  modified_base (981)..(981): a, t, c, or g
  modified_base (986)..(986): a, t, c, or g
  modified_base (1235)..(1235): a, t, c, or g
  modified_base (1694)..(1696): a, t, c, or g
  modified_base (1698)..(1698): a, t, c, or g
  modified_base (1763)..(1765): a, t, c, or g
  modified_base (1778)..(1778): a, t, c, or g
  modified_base (2204)..(2204): a, t, c, or g
atggctgccgatggttatcttccagattggctcgaggacaacctctctgagggcattcgcgaatggtgggacttgaaacctggagccccgaaacccaaagtcaaccagcaaaagcaggacaacgctcggggtcttgtgcttccgggttacaaatacctcggacccttcaacggactcgacaagggggagcccgtcaacgcggcggacgcagcggccctcgagcacgacaaggcctacgaccagcagctcaaagcgggtgacaatccgtaccttcggtataaccacgccgacgccgagtttcaggagcgtctgcaagaagatacgtcttttgggggcaaccttggacgagcagtcttccaggccaagaagagggttctcgaaccttttggtctggttgaggaaggtgctaagacggctcctggaaagaaacgtccggtagagcagtcgccacaagagccagactcctcctcgggcattggcaagacaggccagcagcccgctaaaaagagactcaattttggtcagactggcgactcagagtcagtccccgacccacaacctctcggagaacctccagcaacccccgctgctgtgggacctactacaatggcttcaggcggtggcgcaccaatggcagacaataacgaaggcgccgacggagtgggtaatgcctcaggaaattggcattgcgattccacatggctgggcgacagagtcatcaccaccagcacccgaacatgggccttgcccacctataacaaccacctctacaagcaaatctccagtgcttcaacgggggccagcaacgacaaccactacttcggctacagcaccccctgggggtattttgatttcaacagattccactgccacttttcaccacgtgactggcagcgactcatcaataacaattggggattccggcccaagagactcaacttcaaactcttcaacntccaagtcaaggaggnnacgacgaangatgncgtcacaaccatcgctaataaccttaccagcacggttcaagtcttctcggactcggagtaccagcttccgtacgtcctcggctctgcgcaccagggctgcctccctccgttcccggcggacgtgttcatgattccgcaatacggctacctgacgctcaacaatggcagccaggcagtgggacggtcatccttttactgcctggaatatttcccatcgcagatgctgagaacgggcaataactttacctncagctacacttttgaggacgttcctttccacagcagctacgctcacagccagagcctggaccggctgatgaatcctctcatcgaccagtacctgtattacctgaacagaactcagaatcagtccggaagtgcccaaaacaaggacttgctgtttagccgtgggtctccaactggcatgtctgttcagcccaaaaactggctacctggaccctgttatcggcagcagcgcgtttctaaaacaaaaacagacaacaacaacagcaactttacctggactggtgcttcaaaatataaccttaatgggcgtgaatctataatcaaccctggcactgctatggcctcacacaaagacgacgaagacaagttctttcccatgagcggtgtcatgatttttggaaaggagagcgccggagcttcaaacactgcattggacaatgtcatgatcacagacgaagagannncnaagccactaaccccgtggccactgaaagatttgggactgtggcagtcaatctccaagcagcacannnaccctgcgaccgnagatgtgcatgccatgggagccttacctggaatggtgtggcaagacagagacgtatacctgcagggtcctatttgggccaaaattcctcacacggatggacactttcacccgtctcctctcatgggcggctttggacttaagcacccgcctcctcagatcctcatcaaaaacacgcctgttcctgcgaatcctccggcagagttttcggctacaaagtttgcttcattcatcacccagtattccacaggacaagtgagcgtggagattgaatgggagctgcagaaagaaaacagcaaacgctggaatcccgaagtgcagtatacatctaactatgcaaaatctgccaacgttgatttcactgtggacaacaatggactttatactgagcctcgccccattggcacccgttacctcacccgtccccngtaa

SEQ ID NO: 559 - protein, 723 aa, Artificial Sequence
  Description of Artificial Sequence: Synthetic polypeptide
MAADGYLPDWLEDNLSEGIREWWDLKPGAPKPKVNQQKQDNARGLVLPGYKYLGPFNGLDKGEPVNAADAAALEHDKAYDQQLKAGDNPYLRYNHADAEFQERLQEDTSFGGNLGRAVFQAKKRVLEPFGLVEEGAKTAPGKKRPVEQSPQEPDSSSGIGKTGQQPAKKRLNFGQTGDSESVPDPQPLGEPPATPAAVGPTTMASGGGAPMADNNEGADGVGNASGNWHCDSTWLGDRVITTSTRTWALPTYNNHLYKQISSASTGASNDNHYFGYSTPWGYFDFNRFHCHFSPRDWQRLINNNWGFRPKRLNFKLFNQVKETTDVTTIANNLTSTVQVFSDSEYQLPYVLGSAHQGCLPPFPADVFMIPQYGYLTLNNGSQAVGRSSFYCLEYFPSQMLRTGNNFTSYTFEDVPFHSSYAHSQSLDRLMNPLIDQYLYYLNRTQNQSGSAQNKDLLFSRGSPTGMSVQPKNWLPGPCYRQQRVSKTKTDNNNSNFTWTGASKYNLNGRESIINPGTAMASHKDDEDKFFPMSGVMIFGKESAGASNTALDNVMITDEEATNPVATERFGTVAVNLQSSPATDVHAMGALPGMVWQDRDVYLQGPIWAKIPHTDGHFHPSPLMGGFGLKHPPPQILIKNTPVPANPPAEFSATKFASFITQYSTGQVSVEIEWELQKENSKRWNPEVQYTSNYAKSANVDFTVDNNGLYTEPRPIGTRYLTRP

SEQ ID NO: 560 - DNA, 2208 bp, Artificial Sequence
  Description of Artificial Sequence: Synthetic polynucleotide
atggctgccgatggttatcttccagattggctcgaggacactctctctgaaggaataagacagtggtggaagctcaaacctggcccaccaccaccaaagcccgcagagcggcataaggacgacagcaggggtcttgtgcttcctgggtacaagtacctcggacccttcaacggactcgacaagggagagccggtcaacgaggcagacgccgcggccctcgagcacgacaaagcctatgaccggcagctcgacagcggagacaacccgtacctcaagtacaaccacgccgacgcggagtttcaggagcgccttaaagaagatacgtcttttgggggcaacctcggacgagcagtcttccaggcgaaaaagagggttcttgaacctctgggcctggttgaggaacctgttaagacggctccgggaaaaaagaggccggtagagcactctcctgtggagccagactcctcctcgggaaccggaaaggcgggtcagcagcctgcaagaaaaagattgaattttggtcagactggagacgcagactcagtacctgacccccagcctctcggacagccaccagcagccccctctggtctgggaactaatacgatggctacaggcagtggcgcaccaatggcagacaataacgagggcgccgacggagtgggtaattcctcgggaaattggcattgcgattccacatggatgggcgacagagtcatcaccaccagcacccgaacctgggccctgcccacctacaacaaccacctctacaaacaaatttccagccaatcaggagcctcgaacgacaatcactactttggctacagcaccccttgggggtattttgacttcaacagattccactgccacttttcaccacgtgactggcaaagactcatcaacaacaactggggattccgacccaagagactcaagttcaagctctttaacattcaagtcaaagaggtcacgcagaatgacggtacgacgacgattgccaataaccttaccagcacggttcaggtgtttactgactcggagtaccagctcccgtacgtcctcggctcggcgcatcaaggatgcctcccgccgttcccagcagacgtcttcatggtgccacagtatggatacctcaccctgaacaacgggagtcaggcagtaggacgctcttcattttactgcctggagtactttccttctcagatgctgcgtaccggtaacaactttaccttcagctacacttttgaggacgttcctttccacagcagctacgctcacagccagagtctggaccgtctcatgaatcctctcatcgaccagtacctgtattacttgagcagaacagacgctccaagtggaaccaccacgcagtcaaggcttcagttttctcaggccggagcgagtgacattcgggaccagtctaggaactggcttcctggaccctgttaccgccagcagcgagtatcaaagacatctgcggataacaacaacagtgaatactcgtggactggagctaccaagtaccacctcaatggcagagactctctggtgaatccgggcccggccatggcaagccacaaggacgatgaagaaaagttttttcctcagagcggggttctcatctttgggaagcaaggctcagagaaaacaagtgtggacattgaaaaggtcatgattacagacgaagaggaaatcaggacaaccaatcccgtggctacggagcagtatggttctgtatctaccaacctccagagaggcaacagacaagcagctaccgcagatgtcaacacacaaggcgttcttccaggcatggtctggcaggacagagatgtgtaccttcaggggcccatctgggcaaagattccacacacggacggacattttcacccctctcccctcatgggtggattcggacttaaacaccctcctccacagattctcatcaagaacaccccggtacctgcgaatccttcgaccaccttcagtgcggcaaagtttgcttccttcatcacacagtactccacgggacaggtcagcgtggagatcgagtgggagctgcagaaggaaaacagcaaacgctggaatcccgaagttcagtacacttccaactacaacaagtctgttaatgtggactttactgtggacactaatggcgtgtattcagagcctcgccccattggcaccagatacctgactcgtaatctgtaa

SEQ ID NO: 561 - protein, 735 aa, Artificial Sequence
  Description of Artificial Sequence: Synthetic polypeptide
MAADGYLPDWLEDTLSEGIRQWWKLKPGPPPPKPAERHKDDSRGLVLPGYKYLGPFNGLDKGEPVNEADAAALEHDKAYDRQLDSGDNPYLKYNHADAEFQERLKEDTSFGGNLGRAVFQAKKRVLEPLGLVEEPVKTAPGKKRPVEHSPVEPDSSSGTGKAGQQPARKRLNFGQTGDADSVPDPQPLGQPPAAPSGLGTNTMATGSGAPMADNNEGADGVGNSSGNWHCDSTWMGDRVITTSTRTWALPTYNNHLYKQISSQSGASNDNHYFGYSTPWGYFDFNRFHCHFSPRDWQRLINNNWGFRPKRLKFKLFNIQVKEVTQNDGTTTIANNLTSTVQVFTDSEYQLPYVLGSAHQGCLPPFPADVFMVPQYGYLTLNNGSQAVGRSSFYCLEYFPSQMLRTGNNFTFSYTFEDVPFHSSYAHSQSLDRLMNPLIDQYLYYLSRTDAPSGTTTQSRLQFSQAGASDIRDQSRNWLPGPCYRQQRVSKTSADNNNSEYSWTGATKYHLNGRDSLVNPGPAMASHKDDEEKFFPQSGVLIFGKQGSEKTSVDIEKVMITDEEEIRTTNPVATEQYGSVSTNLQRGNRQAATADVNTQGVLPGMVWQDRDVYLQGPIWAKIPHTDGHFHPSPLMGGFGLKHPPPQILIKNTPVPANPSTTFSAAKFASFITQYSTGQVSVEIEWELQKENSKRWNPEVQYTSNYNKSVNVDFTVDTNGVYSEPRPIGTRYLTRNL

SEQ ID NO: 562 - DNA, 2208 bp, Artificial Sequence
  Description of Artificial Sequence: Synthetic polynucleotide
atggctgccgatggttatcttccagattggctcgaggacactctctctgaaggaataagacagtggtggaagctcaaacctggcccaccaccaccaaagcccgcagagcggcataaggacgacagcaggggtcttgtgcttcctgggtacaagtacctcggacccttcaacggactcgacaagggagagccggtcaacgaggcagacgccgcggccctcgagcacgacaaagcctatgaccggcagctcgacagcggagacaacccgtacctcaagtacaaccacgccgacgcggagtttcaggagcgccttaaagaagatacgtcttttgggggcaacctcggacgagcagtcttccaggcgaaaaagagggttcttgaacctctgggcctggttgaggaacctgttaagacggctccgggaaaaaagaggccggtagagcactctcctgtggagccagactcctcctcgggaaccggaaaggcgggccagcagcctgcaagaaaaagattgaattttggtcagactggagacgcaaactcagtacctgacccccagcctctcggacagccaccagcagccccctctggtctgggaactaatacgatggctacaggcagtggcgcaccaatggcagacaataacgagggcgccgacggagtgggtaattcctcgggaaattggcattgcgattccacatggatgggcgacagagtcatcaccaccagcacccgaacctgggccctgcccacctacaacaaccacctctacaaacaaatttccagccaatcaggagcctcgaacgacaatcactactttggctacagcaccccttgggggtattttgacttcaacagattccactgccacttttcaccacgtgactggcaaagactcatcaacaacaactggggattccgacccaagagactcaagttcaagctctttaacattcaagtcaaagaggtcacgcagaatgacggtacgacgacgattgccaataaccttaccagcacggttcaggtgtttactgactcggagtaccagctcccgtacgtcctcggctcggcgcatcaaggatgcctcccgccgttcccagcagacgtcttcatggtgccacagtatggatacctcaccctgaacaacgggagtcgggcagtaggacgctcttcattttactgcctggagtactttccttctcagatgctgcgtaccggtaacaactttaccttcagctacacttttgaggacgttcctttccacagcagctacgctcacagccagagtctggaccgtctcatgaatcctctcatcgaccagtacctgtattacttgagcagaacagacactccaagtggaaccaccacgcagtcaaggcttcagttttctcaggccggagcgagtgacattcgggaccagtctaggaactggcttcctggaccctgttaccgccagcagcgagtatcaaagacatctgcggataacaacaacagtgaatactcgtggactggagctaccaagtaccacctcaatggcagagactctctggtgaatccgggcccggccatggcaagccacaaggacgatgaagaaaagttttttcctcagagcggggttctcatctttgggaagcaaggctcagagaaaacaagtgtggacattgaaaaggtcatgattacagacgaagaggaaatcaggacgaccaatcccgtggctacggagcagtatggttctgtatctaccaacctccagagaggcaacagacaagcagctaccgcagatgtcaacacacaaggcgttcttccaggcatggtctggcaggacagagatgtgtaccttcaggggcccatctgggcaaagattccacacacggacggacattttcacccctctcccctcatgggtggattcggacttaaacaccctcctccacagattctcatcaagaacaccccggtacctgcgaatccttcgaccaccttcagtgcggcaaagtttgcttccttcatcacacagtactccacgggacaggtcagcgtggagatcgagtgggagctgcagaaggaaaacagcaaacgctggaatcccgaagttcagtacacttccaactacaacaagtctgttaatgtggactttactgtggacactaatggcgtgtatacagagcctcgccccattggcaccagatacctgactcgtaatctgtaa

SEQ ID NO: 563 - protein, 735 aa, Artificial Sequence
  Description of Artificial Sequence: Synthetic polypeptide
MAADGYLPDWLEDTLSEGIRQWWKLKPGPPPPKPAERHKDDSRGLVLPGYKYLGPFNGLDKGEPVNEADAAALEHDKAYDRQLDSGDNPYLKYNHADAEFQERLKEDTSFGGNLGRAVFQAKKRVLEPLGLVEEPVKTAPGKKRPVEHSPVEPDSSSGTGKAGQQPARKRLNFGQTGDANSVPDPQPLGQPPAAPSGLGTNTMATGSGAPMADNNEGADGVGNSSGNWHCDSTWMGDRVITTSTRTWALPTYNNHLYKQISSQSGASNDNHYFGYSTPWGYFDFNRFHCHFSPRDWQRLINNNWGFRPKRLKFKLFNIQVKEVTQNDGTTTIANNLTSTVQVFTDSEYQLPYVLGSAHQGCLPPFPADVFMVPQYGYLTLNNGSRAVGRSSFYCLEYFPSQMLRTGNNFTFSYTFEDVPFHSSYAHSQSLDRLMNPLIDQYLYYLSRTDTPSGTTTQSRLQFSQAGASDIRDQSRNWLPGPCYRQQRVSKTSADNNNSEYSWTGATKYHLNGRDSLVNPGPAMASHKDDEEKFFPQSGVLIFGKQGSEKTSVDIEKVMITDEEEIRTTNPVATEQYGSVSTNLQRGNRQAATADVNTQGVLPGMVWQDRDVYLQGPIWAKIPHTDGHFHPSPLMGGFGLKHPPPQILIKNTPVPANPSTTFSAAKFASFITQYSTGQVSVEIEWELQKENSKRWNPEVQYTSNYNKSVNVDFTVDTNGVYTEPRPIGTRYLTRNL

SEQ ID NO: 564 - DNA, 2211 bp, Artificial Sequence
  Description of Artificial Sequence: Synthetic polynucleotide
atggctgccgatggttatcttccagattggctcgaggacactctctctgaaggaataagacagtggtggaagctcaaacctggcccaccaccaccaaagcccgcagagcggcataaggacgacagcaggggtcttgtgcttcctgggtacaagtacctcggacccttcaacggactcgacaagggagagccggtcaacgaggcagacgccgcggccctcgagcacgacaaggcctacgaccagcagctcaaagcgggtgacaatccgtacctgcggtataaccacgccgacgccgagtttcaggagcgtctgcaagaagatacgtcttttgggggcaacctcgggcgagcagtcttccaggccaagaagcgggttctcgaacctctcggtctggttgaggaaggcgctaagacggctcctggaaagaaacgtccggtagagcagtcgccacaagagccagactcctcctcgggcatcggcaagacaggccagcagcccgctaaaaagagactcaattttggtcagactggcgactcagagtcagtccccgacccacaacctctcggagaacctccagcaacccccgctgctgtgggacctactacaatggcttcaggcggtggcgcaccaatggcagacaataacgaaggcgccgacggagtgggtaatgcctcaggaaattggcattgcgattccacatggctgggcgacagagtcatcaccaccagcacccgaacatgggccttgcccacctataacaaccacctctacaagcaaatctccagtgcttcgacgggggccagcaacgacaaccactacttcggctacagcaccccctgggggtattttgactttaacagattccactgccacttttcaccacgtgactggcagcgactcatcaacaataactggggattccggcccaagagactcagcttcaagctcttcaacatccaggtcaaggaggtcacgacgaatgatggcgtcacaaccatcgctaataaccttaccagcacggttcaagtcttctcggactcggagtaccagcttccgtacgtcctcggctctgcgcaccagggctgcctccctccgttcccggcggacgtgttcatgattccgcaatacggctacctgacgctcaacaatggcagccaagccgtgggacgttcatccttttactgcctggaatatttcccttctcagatgctgagaacgggcaacaactttaccttcagctacacctttgaggaagtgcctttccacagcagctacgcgcacagccagagcctggaccggctgatgaatcctctcatcgatcaatacctgtattacctgaacagaactcaaaatcagtccggaagtgcccaaaacaaggacttgctgtttagccgtgggtctccagctggcatgtctgttcagcccaaaaactggctacctggaccctgttatcggcagcagcgcgtttctaaaacaaaaacagacaacaacaacagcaattttacctggactggtgcttcaaaatataacctcaatgggcgtgaatccatcatcaaccctggcactgctatggcctcacacaaagacgacgaagacaagttctttcccatgagcggtgtcatgatttttggaaaagagagcgccggagcttcaaacactgcattggacaatgtcatgattacggacgaagaggaaattaaagccactaaccctgtggccaccgaaagatttgggaccgtggcagtcaatttccagagcagcagcacagaccctgcgaccggagatgtgcatgctatgggagcattacctggcatggtgtggcaagatagagacgtgtacctgcagggtcccatttgggccaaaattcctcacacagatggacactttcacccgtctcctcttatgggcggctttggactcaagaacccgcctcctcagatcctcatcaaaaacacgcctgttcctgcgaatcctccggcggagttttcagctacaaagtttgcttcattcatcactcaatactccacaggacaagtgagcgtggaaattgaatgggagctgcagaaagaaaacagcaaacgctggaatcccgaagtgcagtatacatctaactatgcaaaatctgccaacgttgatttcactgtggacaacaatggactttatactgagcctcgccccattggcacccgttacctcacccgtcccctgtaa

SEQ ID NO: 565 - protein, 736 aa, Artificial Sequence
  Description of Artificial Sequence: Synthetic polypeptide
MAADGYLPDWLEDTLSEGIRQWWKLKPGPPPPKPAERHKDDSRGLVLPGYKYLGPFNGLDKGEPVNEADAAALEHDKAYDQQLKAGDNPYLRYNHADAEFQERLQEDTSFGGNLGRAVFQAKKRVLEPLGLVEEGAKTAPGKKRPVEQSPQEPDSSSGIGKTGQQPAKKRLNFGQTGDSESVPDPQPLGEPPATPAAVGPTTMASGGGAPMADNNEGADGVGNASGNWHCDSTWLGDRVITTSTRTWALPTYNNHLYKQISSASTGASNDNHYFGYSTPWGYFDFNRFHCHFSPRDWQRLINNNWGFRPKRLSFKLFNIQVKEVTTNDGVTTIANNLTSTVQVFSDSEYQLPYVLGSAHQGCLPPFPADVFMIPQYGYLTLNNGSQAVGRSSFYCLEYFPSQMLRTGNNFTFSYTFEEVPFHSSYAHSQSLDRLMNPLIDQYLYYLNRTQNQSGSAQNKDLLFSRGSPAGMSVQPKNWLPGPCYRQQRVSKTKTDNNNSNFTWTGASKYNLNGRESIINPGTAMASHKDDEDKFFPMSGVMIFGKESAGASNTALDNVMITDEEEIKATNPVATERFGTVAVNFQSSSTDPATGDVHAMGALPGMVWQDRDVYLQGPIWAKIPHTDGHFHPSPLMGGFGLKNPPPQILIKNTPVPANPPAEFSATKFASFITQYSTGQVSVEIEWELQKENSKRWNPEVQYTSNYAKSANVDFTVDNNGLYTEPRPIGTRYLTRPL

SEQ ID NO: 566 - protein, 735 aa, Artificial Sequence
  Description of Artificial Sequence: Synthetic polypeptide
MAADGYLPDWLEDTLSEGIRQWWKLKPGPPPPKPAERHKDDSRGLVLPGYKYLGPFNGLDKGEPVNEADAAALEHDKAYDRQLDSGDNPYLKYNHADAEFQERLKEDTSFGGNLGRAVFQAKKRVLEPLGLVEEPVKTAPGKKRPVEHSPVEPDSSSGTGKAGQQPARKRLNFGQTGDADSVPDPQPLGQPPAAPSGLGTNTMATGSGAPMADNNEGADGVGNSSGNWHCDSTWMGDRVITTSTRTWALPTYNNHLYKQISSQSGASNDNHYFGYSTPWGYFDFNRFHCHFSPRDWQRLINNNWGFRPKRLKFKLFNIQVKEVTQNDGTTTIANNLTSTVQVFTDSEYQLPYVLGSAHQGCLPPFPADVFMVPQYGYLTLNNGSQAVGRSSFYCLEYFPSQMLRTGNNFTFSYTFEDVPFHSSYAHSQSLDRLMNPLIDQYLYYLSRTDTPSGTTTQSRLQFSQAGASDIRNQSRNWLPGPCYRQQRVSKTSADNNNSEYSWTGATKYHLNGRDSLVNPGPAMASHKDDEEKFFPQSGVLIFGKQGSEKTSVDIEKVMITDEEEIRTTNPVATEQYGSVSTNLQRGNRQAATADVNTQGVLPGMVWQDRDVYLQGPIWAKIPHTDGHFHPSPLMGGFGLKHPPPQILIKNTPVPANPSTTFSAAKFASFITQYSTGQVSVEIEWELQKENSKRWNPEVQYTSNYNKSVNVDFTVDTNGVYSEPRPIGTRYLTRNQ

SEQ ID NO: 567 - DNA, 2208 bp, Artificial Sequence
  Description of Artificial Sequence: Synthetic polynucleotide
atggctgccgatggttatcttccagattggctcgaggacactctctctgaaggaataagacagtggtggaagctcaaacctggcccaccaccaccaaagcccgcagagcggcataaggacgacagcaggggtcttgtgcttcctgggtacaagtacctcggacccttcaacggactcgacaagggagagccggtcaacgaggcagacgccgcggccctcgagcacgacaaagcctatgaccggcagctcgacagcggagacaacccgtacctcaagtacaaccacgccgacgcggagtttcaggaacgccttaaagaagatacgtcttttgggggcaacctcggacgagcagtcttccaggcgaaaaagagggttcttgaacctctgggcctggttgaggaacctgttaagacggctccgggaaaaaagaggccggtagagcactctcctgtggagccagactcctcctcgggaaccggaaaggcgggccagcagcctgcaagaaaaagattgaattttggtcagactggagacgcagactcagtacctgacccccagcctctcggacagccaccagcagccccctctggtctgggaactaatacgatggctacaggcagtggcgcaccaatggcagacaataacgagggcgccgacggagtgggtaattcctcgggaaattggcattgcgattccacatggatgggcgacagagtcatcaccaccagcacccgaacctgggccctgcccacctacaacaaccacctctacaaacaaatttccagccaatcaggagcctcgaacgacaatcactactttggctacagcaccccttgggggtattttgacttcaacagattccactgccacttttcaccacgtgactggcaaagactcatcaacaacaactggggattccgacccaagagactcaagttcaagctctttaacattcaagtcaaagaggtcacgcagaatgacggtacgacgacgattgccaataaccttaccagcacggttcaggtgtttactgactcggagtaccagctcccgtacgtcctcggctcggcgcatcaaggatgcctcccgccgttcccagcagacgtcttcatggtgccacagtatggatacctcaccctgaacaacgggagtcaggcagtaggacgctcttcattttactgcctggagtactttccttctcagatgctgcgtaccggtaacaactttaccttcagctacacttttgaggacgttcctttccacagcagctacgctcacagccagagtctggaccgtctcatgaatcctctcatcgaccagtacctgtattacttgagcagaacagacactccaagtggaaccaccacgcagtcaaggcttcagttttctcaggccggagcgagtgacattcggaaccagtctaggaactggcttcctggaccctgttaccgccagcagcgagtatcaaagacatctgcggataacaacaacagtgaatactcgtggactggagctaccaagtaccacctcaatggcagagactctctggtgaatccgggcccggccatggcaagccacaaggacgatgaagaaaagttttttcctcagagcggggttctcatctttgggaagcaaggctcagagaaaacaagtgtggacattgaaaaggtcatgattacagacgaagaggaaatcaggacaaccaatcccgtggctacggagcagtatggttctgtatctaccaacctccagagaggcaacagacaagcagctaccgcagatgtcaacacacaaggcgttcttccaggcatggtctggcaggacagagatgtgtaccttcaggggcccatctgggcaaagattccacacacggacggacattttcacccctctcccctcatgggtggattcggacttaaacaccctcctccacagattctcatcaagaacaccccggtacctgcgaatccttcgaccaccttcagtgcggcaaagtttgcttccttcatcacacagtactccacgggacaggtcagcgtggagatcgagtgggagctgcagaaggaaaacagcaaacgctggaatcccgaagttcagtacacttccaactacaacaagtctgttaatgtggactttactgtggacactaatggcgtgtattcagagcctcgccccattggcaccagatacctgactcgtaatcagtaa

SEQ ID NO: 568 - DNA, 2208 bp, Artificial Sequence
  Description of Artificial Sequence: Synthetic polynucleotide
atggctgccgatggttatcttccagattggctcgaggacactctctctgaaggaataagacagtggtggaagctcaaacctggcccaccaccaccaaagcccgcagagcggcataaggacgacagcaggggtcttgtgcttcctgggtacaagtacctcggacccttcaacggactcgacaagggagagccggtcaacgaggcagacgccgcggccctcgagcacgacaaagcctatgaccggcagctcgacagcggagacaacccgtacctcaagtacaaccacgccgacgcggagtttcaggagcgccttaaagaagatacgtcttttgggggcaacctcggacgagcagtcttccaggcgaaaaagagggttcttgaacctctgggcctggttgaggaacctgttaagacggctccgggaaaaaagaggccggtagagcactctcctgtggagccagactcctcctcgggaaccggaaaggcgggccagcagcctgcaagaaaaagattgaattttggtcagactggagacgcagactcagtacctgatccccagcctctcggacagccaccagcagccccctctggtctgggaactaatacgatggctacaggcagtggcgcaccaatggcagacaataacgagggcgccgacggagtgggtaattcctcgggaaattggcattgcgattccacatggatgggcgacagagtcatcaccaccagcacccgaacctgggccctgcccacctacaacaaccacctctacaaacaaatttccagccaatcaggagcctcgaacgacaatcactactttggctacagcaccccttgggggtattttgacttcaacagattccactgccacttttcaccacgtgactggcaaagactcatcaacaacaactggggattccgacccaagagactcaagttcaagctctttaacattcaagtcaaagaggtcacgcagaatgacggtacgacgacgattgccaataaccttaccagcacggttcaggtgtttactgactcggagtaccagctcccgtatgtcctcggctcggcgcatcaaggatgcctcccgccgttcccagcagacgtcttcatggtgccacagtatggatacctcaccctgaacaacgggagtcaggcagtaggacgctcttcattttactgcctggagtactttccttctcagatgctgcgtaccggtaacaactttaccttcagctacacttttgaggacgttcctttccacagcagctacgctcacagccagagtctggaccgtctcatgaatcctctcatcgaccagtacctgtattacttgagcagaacagacactccaagtggaaccaccacgcagtcaaggcttcagttttctcaggccggagcgagtgacattcgggaccagtctaggaactggcttcctggaccctgttaccgccagcagcgagtatcaaagacatctgcggataacaacaacagtgaatactcgtggactggagctaccaagtaccacctcaatggcagagactctctggtgaatccgggcccggccatggcaagccacaaggacgatgaagaaaagttttttcctcagagcggggttctcatctttgggaagcaaggctcagagaaaacaagtgtggacattgaaaaggtcatgattacagacgaagaggaaatcaggacaaccaatcccgtggctacggagcagtatggttctgtatctaccaacctccagagaggcaacagacaagcagctaccgcagatgtcaacacacaaggcgttcttccaggcatggtctggcaggacagagatgtgtaccttcaggggcccatctgggcaaagattccacacacggacggacattttcacccctctcccctcatgggtggattcggacttaaacaccctcctccacagattctcatcaagaacaccccggtacctgcgaatccttcgaccaccttcagtgcggcaaagtttgcttccttcatcacacagtactccacgggacaggtcagcgtggagatcgagtgggagctgcagaaggaaaacagcaaacgctggaatcccgaagttcagtacacttccaactacaacaagtctgttaatgtggactttactgtggacactaatggcgtgtattcagagcctcgccccattggcaccagatacctgactcgtaatctgtaa

SEQ ID NO: 569 - protein, 735 aa, Artificial Sequence
  Description of Artificial Sequence: Synthetic polypeptide
MAADGYLPDWLEDTLSEGIRQWWKLKPGPPPPKPAERHKDDSRGLVLPGYKYLGPFNGLDKGEPVNEADAAALEHDKAYDRQLDSGDNPYLKYNHADAEFQERLKEDTSFGGNLGRAVFQAKKRVLEPLGLVEEPVKTAPGKKRPVEHSPVEPDSSSGTGKAGQQPARKRLNFGQTGDADSVPDPQPLGQPPAAPSGLGTNTMATGSGAPMADNNEGADGVGNSSGNWHCDSTWMGDRVITTSTRTWALPTYNNHLYKQISSQSGASNDNHYFGYSTPWGYFDFNRFHCHFSPRDWQRLINNNWGFRPKRLKFKLFNIQVKEVTQNDGTTTIANNLTSTVQVFTDSEYQLPYVLGSAHQGCLPPFPADVFMVPQYGYLTLNNGSQAVGRSSFYCLEYFPSQMLRTGNNFTFSYTFEDVPFHSSYAHSQSLDRLMNPLIDQYLYYLSRTDTPSGTTTQSRLQFSQAGASDIRDQSRNWLPGPCYRQQRVSKTSADNNNSEYSWTGATKYHLNGRDSLVNPGPAMASHKDDEEKFFPQSGVLIFGKQGSEKTSVDIEKVMITDEEEIRTTNPVATEQYGSVSTNLQRGNRQAATADVNTQGVLPGMVWQDRDVYLQGPIWAKIPHTDGHFHPSPLMGGFGLKHPPPQILIKNTPVPANPSTTFSAAKFASFITQYSTGQVSVEIEWELQKENSKRWNPEVQYTSNYNKSVNVDFTVDTNGVYSEPRPIGTRYLTRNL

SEQ ID NO: 570 - DNA, 2601 bp, Artificial Sequence
  Description of Artificial Sequence: Synthetic polynucleotide
ccatcgacgtcagacgcggaagcttcgatcaactacgcggacaggtaccaaaacaaatgttctcgtcacgtgggcatgaatctgatgctgtttccctgcagacaatgcgagagactgaatcagaattcaaatatctgcttcactcacggtgtcaaagactgtttagagtgctttcccgtgtcagaatctcaacccgtttctgtcgtcaaaaaggcgtatcagaaactgtgctacattcatcacatcatgggaaaggtgccagacgcttgcactgcttgcgacctggtcaatgtggacttggatgactgtgtttctgaacaataaatgacttaaaccaggtatgactgccgatggttatcttccagattggctcgaggacaaccttagtgaaggaattcgcgagtggtgggctttgaaacctggagcccctcaacccaaggcaaatcaacaacatcaagacaacgctcgaggtcttgtgcttccgggttacaaataccttggacccggcaacggactcgacaagggggagccggtcaacgcagcagacgcggcggccctcgagcacgacaaggcctacgaccagcagctcaaggccggagacaacccgtacctcaagtacaaccacgccgacgccgagttccaggagcggctcaaagaagatacgtcttttgggggcaacctcgggcgagcagtcttccaggccaaaaagaggcttcttgaacctcttggtctggttgaggaagcggctaagacggctcctggaaagaagaggcctgtagagcagtctcctcaggaaccggactcctccgcgggtattggcaaatcgggtgcacagcccgctaaaaagagactcaatttcggtcagactggcgacacagagtcagtcccagaccctcaaccaatcggagaacctcccgcagccccctcaggtgtgggatctcttacaatggcttcaggtggtggcgcaccagtggcagacaataacgaaggtgccgatggagtgggtagttcctcgggaaattggcattgcgattcccaatggctgggggacagagtcatcaccaccagcacccgaacctgggccctgcccacctacaacaatcacctctacaagcaaatctccaacagcacatctggaggatcttcaaatgacaacgcctacttcggctacagcaccccctgggggtattttgacttcaacagattccactgccacttctcaccacgtgactggcagcgactcatcaacaacaactggggattccggcctaagcaactcaacttcaagctcttcaacattcaggtcaaagaggttacggacaacaatggagtcaagaccatcgccaataaccttaccagcacggtccaggtcttcacggactcagactatcagctcccgtacgtgctcgggtcggctcacgagggctgcctcccgccgttcccagcggacgttttcatgattcctcagtacgggtatctgacgcttaatgatggaagccaggccgtgggtcgttcgtccttttactgcctggaatatttcccgtcgcaaatgctaagaacgggtaacaacttccagttcagctacgagtttgagaacgtacctttccatagcagctacgctcacagccaaagcctggaccgactaatgaatccactcatcgaccaatacttgtactatctctcaaagactattaacggttctggacagaatcaacaaacgctaaaattcagtgtggccggacccagcaacatggctgtccagggaagaaactacatacctggacccagctaccgacaacaacgtgtctcaaccactgtgactcaaaacaacaacagcgaatttgcttggcctggagcttcttcttgggctctcaatggacgtaatagcttgatgaatcctggacctgctatggccagccacaaagaaggagaggaccgtttctttcctttgtctggatctttaatttttggcaaacaaggaactggaagagacaacgtggatgcggacaaagtcatgataaccaacgaagaagaaattaaaactactaacccggtagcaacggagtcctatggacaagtggccacaaaccaccagagtgcccaagcacaggcgcagaccggctgggttcaaaaccaaggaatacttccgggtatggtttggcaggacagagatgtgtacctgcaaggacccatttgggccaaaattcctcacacggacggcaactttcacccttctccgctgatgggagggtttggaatgaagcacccgcctcctcagatcctcatcaaaaacacacctgtacctgcggatcctccaacggccttcaacaaggacaagctgaactctttcatcacccagtattctactggccaagtcagcgtggagatcgagtgggagctgcagaaggaaaacagcaagcgctggaacccggagatccagtacacttccaactattacaagtctaataatgttgaatttgctgttaatactgaaggtgtatatagtgaaccccgccccattggcaccagatacctgactcgtaatctgtaattgcttgttaatcaataaaccgtttaattcgtttcagttgaactgcggcc

SEQ ID NO: 571 - DNA, 2601 bp, Artificial Sequence
  Description of Artificial Sequence: Synthetic polynucleotide
ccatcgacgtcagacgcggaagcttcgatcaactacgcggacaggtaccaaaacaaatgttctcgtcacgtgggcatgaatctgatgctgtttccctgcagacaatgcgagagactgaatcagaattcaaatatctgcttcactcacggtgtcaaagactgtttagagtgctttcccgtgtcagaatctcaacccgtttctgtcgtcaaaaaggcgtatcagaaactgtgctacattcatcacatcatgggaaaggtgccagacgcttgcactgcttgcgacctggtcaatgtggacttggatgactgtgtttctgaacaataaatgacttaaaccaggtatggctgccgatggttatcttccagattggctcgaggacaaccttagtgaaggaattcgcgagtggtgggctttgaaacctggagcccctcaacccaaggcaaatcaacaacatcaagacaacgctcgaggtcttgtgcttccgggttacaaataccttggacccggcaacggactcgacaagggggagccggtcaacgcagcagacgcggcggccctcgagcacgacaaggcctacgaccagcagctcaaggccggagacaacccgtacctcaagtacaaccacgccgacgccgagttccaggagcggctcaaagaagatacgtcttttgggggcaacctcgggcgagcagtcttccaggccaaaaagaggcttcttgaacctcttggtctggttgaggaagcggctaagacggctcctggaaagaagaggcctgtagagcagtctcctcaggaaccggactcctccgcgggtattggcaaatcgggtgcacagcccgctaaaaagagactcaatttcggtcagactggcgacacagagtcagtcccagaccctcaaccaatcggagaacctcccgcagccccctcaggtgtgggatctcttacaatggcttcaggtggtggcgcaccagtggcagacaataacgaaggtgccgatggagtgggtagttcctcgggaaattggcattgcgattcccaatggctgggggacagagtcatcaccaccagcacccgaacctgggccctgcccacctacaacaatcacctctacaagcaaatctccaacagcacatctggaggatcttcaaatgacaacgcctacttcggctacagcaccccctgggggtattttgacttcaacagattccactgccacttctcaccacgtgactggcagcgactcatcaacaacaactggggattccggcctaagcgactcaacttcaagctcttcaacattcaggtcaaagaggttacggacaacaatggagtcaagaccatcgccaataaccttaccagcacggtccaggtcttcacggactcagactatcagctcccgtacgtgctcgggtcggctcacgagggctgcctcccgccgttcccagcggacgttttcatgattcctcagtacgggtatctgacgcttaatgatggaagccaggccgtgggtcgttcgtccttttactgcctggaatatttcccgtcgcaaatgctaagaacgggtaacaacttccagttcagctacgagtttgagaacgtacctttccatagcagctacgctcacagccaaagcctggaccgactaatgaatccactcatcgaccaatacttgtactatctctcaaagactattaacggttctggacagaatcaacaaacgctaaaattcagtgtggccggacccagcaacatggctgtccagggaagaaactacatacctggacccagctaccgacaacaacgtgtctcaaccactgtgactcaaaacaacaacagcgaatttgcttggcctggggcttcttcttgggctctcaatggacgtaatagcttgatgaatcctggacctgctatggccagccacaaagaaggagaggaccgtttctttcctttgtctggatctttaatttttggcaaacaaggaactggaagagacaacgtggatgcggacaaagtcatgataaccaacgaagaagaaattaaaactactaacccggtagcaacggagtcctatggacaagtggccacaaaccaccagagtgcccaagcacaggcgcagaccggctgggttcaaaaccaaggaatacttccgggtatggtttggcaggacagagatgtgtacctgcaaggacccatttgggccaaaattcctcacacgggcggcaactttcacccttctccgctgatgggagggtttggaatgaagcacccgcctcctcagatcctcatcaaaaacacacctgtacctgcggatcctccaacggccttcaacaaggacaagctgaactctttcatcacccagtattctactggccaagtcagcgtggagatcgagtgggagctgcagaaggaaaacagcaagcgctggaacccggagatccagtacacttccaactattacaagtctaataatgttgaatttgctgttaatactggaggtgtatatagtgaaccccgccccattggcaccagatacctgactcgtaatctgtaattgcttgttaatcaataaaccgtttaattcgtttcagttgaactgcggcc

SEQ ID NO: 572 - DNA, 2601 bp, Artificial Sequence
  Description of Artificial Sequence: Synthetic polynucleotide
ccatcgacgtcagacgcggaagcttcgatcaactacgcggacaggtaccaaaacaaatgttctcgtcacgtgggcatgaatctgatgctgtttccctgcagacaatgcgagagactgaatcagaattcaaatatctgcttcactcacggtgtcaaagactgtttagagtgctttcccgtgtcagaatctcaacccgtttctgtcgtcaaaaaggcgtatcagaaactgtgctacattcatcacatcatgggaaaggtgccagacgcttgcactgcttgcgacctggtcaatgtggactcggatgactgtgtttctgaacaataaatgacttaaaccaggtatggctgccgatggttatcttccagattggctcgaggacaaccttagtgaaggaattcgcgagtggtgggctttgaaacctggagcccctcaacccaaggcaaatcaacaacatcaagacaacgctcgaggtcttgtgcttccgggttacaaataccttggacccggcaacggactcgacaagggggagccggtcaacgcagcagacgcggcggccctcgagcacgacaaggcctacgaccagcagctcaaggccggagacaacccgtacctcaagtacaaccacgccgacgccgagttccaggagcggctcaaagaagatacgtcttttgggggcaacctcgggcgagcagtcttccaggccaaaaagaggcttcttgaacctcttggtctggttgaggaagcggctaagacggctcctggaaagaagaggcctgtagagcagtctcctcaggaaccggactcctccgcgggtattgacaaatcgggtgcacagcccgctaaaaagagactcaatttcggtcagactggcgacacagagtcagtcccagaccctcaaccaatcggagaacctcccgcagccccctcaggtgtgggatctcttacaatggcttcaggtggtggcgcaccagtggcagacaataacgaaggtgccgatggagtgggtagttcctcgggaaattggcattgcgattcccaatggctgggggacagagtcatcaccaccagcacccgaacctgggccctgcccacctacaacaatcacctctacaagcaaatctccaacagcacatctggaggatcttcaaatgacaacgcctacttcggctacagcaccccctgggggtattttgacttcaacagattccactgccacttctcaccacgtgactggcagcgactcatcaacaacaactggggattccggcctaagcgactcaacttcaagctcttcaacattcaggtcaaagaggttacggacaacaatggagtcaagaccatcgccaataaccttaccagcacggtccaggtcttcacggactcggactatcagctcccgtacgtgctcgggtcggctcacgagggctgcctcccgccgttcccagcggacgttttcatgattcctcagtacgggtatctgacgcttaatgatggaagccaggccgtgggtcgttcgtccttttactgcctggaatatttcccgtcgcaaatgctaagaacgggtaacaacttccagttcagctacgagtttgagaacgtacctttccatagcagctacgctcacagccaaagcctggaccgactaatgaatccactcatcgaccaatacttgtactatctctcaaagactattaacggttctggacagaatcaacaaacgctaaaattcagtgtggccggacccagcaacatggctgtccagggaagaaactacatacctggacccagctaccgacaacaacgtgtctcaaccactgtgactcaaaacaacaacagcgaatttgcttggcctggagcttcttcttgggctctcaatggacgtaatagcttgatgaatcctggacctgctatggccagccacaaagaaggagaggaccgtttctttcctttgtctggatctttaatttttggcaaacaaggaactggaagagacaacgtggatgcggacaaagtcatgataaccaacgaagaagaaattaaaactactaacccggtagcaacggagtcctatggacaagtggccacaaaccaccagagtgcccaagcacaggcgcagaccggctgggttcaaaaccaaggaatacttccgggtatggtttggcaggacagagatgtgtacctgcaaggacccatttgggccaaaattcctcacacggacggcaactttcacccttctccgctgatgggagggtttggaatgaagcacccgcctcctcagatcctcatcaaaaacacacctgtacctgcggatcctccaacggccttcaacaaggacaagctgaactctttcatcacccagtattctactggccaagtcagcgtggagatcgagtgggagctgcagaaggaaaacagcaagcgctggaacccggagatccagtacacttccaactattacaagtctaataatgttgaatttgctgttaatactgaaggtgtatatagtgaaccccgccccattggcaccagatacctgactcgtaatctgtaattgcttgttaatcaataaaccgtttaattcgtttcagttgaactgcggcc

SEQ ID NO: 573 - DNA, 2601 bp, Artificial Sequence
  Description of Artificial Sequence: Synthetic polynucleotide
ccatcgacgtcagacgcggaagcttcgatcaactacgcggacaggtaccaaaacaaatgttctcgtcacgtgggcatgaatctgatgctgtttccctgcagacaatgcgagagactgaatcagaattcaaatatctgcttcactcacggtgtcaaagactgtttagagtgctttcccgtgtcagaatctcaacccgtttctgtcgtcaaaaaggcgtatcagaaactgtgctacattcatcacatcatgggaaaggtgccagacgcttgcactgcttgcgacctggtcaatgtggacttggatgactgtgtttctgaacaataaatgacttaaaccaggtatggctgccgatggttatcttccagattggctcgaggacaaccttagtgaaggaattcgcgagtggtgggctttgaaacctggagcccctcaacccaaggcaaatcaacaacatcaagacaacgctcgaggtcttgtgcttccgggttacaaataccttggacccggcaacggactcgacaagggggagccggtcaacgcagcagacgcggcggccctcgagcacgacaaggcctacgaccagcagctcaaggccggagacaacccgtacctcaagtacaaccacgccgacgccgagttccaggagcggctcaaagaagatacgtcttttgggggcaacctcgggcgagcagtcctccaggccaaaaagaggcttcttgaacctcttggtctggttgaggaagcggctaagacggctcctggaaagaagaggcctgtagagcagtctcctcaggaaccggactcctccgcgggtattggcaaatcgggtgcacagcccgctaaaaagagactcaatttcggtcagactggcgacacagagtcagtcccagaccctcaaccaatcggagaacctcccgcagccccctcaggtgtgggatctcttacaatggcttcaggtggtggcgcaccagtggcagacaataacgaaggtgccgatggagtgggtagttcctcgggaaattggcattgcgattcccaatggctgggggacagagtcatcaccaccagcacccgaacctgggccctgcccacctacaacaatcacctctacaagcaaatctccaacagcacatctggaggatcttcaaatgacaacgcctacttcggctacagcaccccctgggggtattttgacttcaacagattccactgccacttctcaccacgtgactggcagcgactcatcaacaacaactggggattccggcctaagcgactcaacttcaagctcttcaacattcaggtcaaagaggttacggacaacaatggagtcaagaccatcgccaataaccttaccagcacggtccaggtcttcacggactcagactatcagctcccgtacgtgctcgggtcggctcacgagggctgcctcccgccgttcccagcggacgttttcatgattcctcagtacgggtatctgacgcttaatgatggaagccaggccgtgggtcgttcgtccttttactgcctggaatatttcccgtcgcaaatgctaagaacgggtaacaacttccagttcagctacgagtttgagaacgtacctttccatagcagctacgctcacagccaaagcctggaccgactaatgaatccactcatcgaccaatacttgtactatctctcaaagactattaacggttctggacagaatcaacaaacgctaaaattcagtgtggccggatccagcaacatggctgtccagggaagaaactacatacctggacccagctaccgacaacaacgtgtctcaaccactgtgactcaaaacaacaacagcgaatttgcttggcctggagcttcttcttgggctctcaatggacgtaatagcttgatgaatcctggacctgctatggccagccacaaagaaggagaggaccgtttctttcctttgtctggatctttaatttttggcaaacaaggaactggaagagacaacgtggatgcggacaaagtcatgataaccaacgaagaagaaattaaaactactaacccggtagcaacggagtcctatggacaagtggccacaaaccaccagagtgcccaagcacaggcgcagaccggctgggttcaaaaccaaggaatacttccaggtatggtttggcaggacagagatgtgtacctgcaaggacccatttgggccaaaattcctcacacggacggcaactttcacccttctccgctgatgggagggtttggaatgaagcacccgcctcctcagatcctcatcaaaaacacacctgtacctgcggatcctccaacggccttcaacaaggacaagctgaactctttcatcacccagtattctactggccaagtcagcgtggagatcgagtgggagctgcagaaggaaaacagcaagcgctggaacccggagatccagtacacttccaactattacaagtctaataatgttgaatttgctgttaatactgaaggtgtatatagtgaaccccgccccattggcaccagatacctgactcgtaatctgtaattgcttgttaatcaataaaccgtttaattcgtttcagttgaactgcggcc

SEQ ID NO: 574 - DNA, 2601 bp, Artificial Sequence
  Description of Artificial Sequence: Synthetic polynucleotide
ccatcgacgtcagacgcggaagcttcgatcaactacgcggacaggtaccaaaacaaatgttctcgtcacgtgggcatgaatctgatgctgtttccctgcagacaatgcgagagactgaatcagaattcaaatatctgcttcactcacggtgtcaaagactgtttagagtgctttcccgtgtcagaatctcaacccgtttctgtcgtcaaaaaggcgtatcagaaactgtgctacattcatcacatcatgggaaaggtgccagacgcttgcactgcttgcgacctggtcaatgtggacttggatgactgtgtttctgaacaataaatgacttaaaccaggtatggctgccgatggttatcttccagattggctcgaggacaaccttagtgaaggaattcgcgagtggtgggctttgaaacctggagcccctcaacccaaggcaaatcaacaacatcaagacaacgctcgaggtcttgtgcttccgggttacaaataccttggacccggcaacggactcgacaagggggagccggtcaacgcagcagacgcggcggccctcgagcacgacagggcctacgaccagcagctcaaggccggagacaacccgtacctcaagtacaaccacgccgacgccgagttccaggagcggctcaaagaagatacgtcttttgggggcaacctcgggcgagcagtcttccaggccaaaaagaggcttcttgaacctcttggtctggttgaggaagcggctaagacggctcctggaaagaagaggcctgtagagcagtctcctcaggaaccggactcctccgcgggtattggcaaatcgggtgcacagcccgctaaaaagagactcaatttcggtcagactggcgacacagagtcagtcccagaccctcaaccaatcggagaacctcccgcagccccctcaggtgtgggatctcttacaatggcttcaggtggtggcgcaccagtggcagacaataacgaaggtgccgatggagtgggtagttcctcgggaaattggcattgcgattcccaatggctgggggacagagtcatcaccaccagcacccgaacctgggccctgcccacctacaacaatcacctctacaagcaaatctccaacagcacatctggaggatcttcaaatgacaacgcctacttcggctacagcaccccctgggggtattttgacttcaacagattccactgccacttctcaccacgtgactggcagcgactcatcaacaacaactggggattccggcctaagcgactcaacttcaagctcttcaacattcaggtcaaagaggttacggacaacaatggagtcaagaccatcgccaataaccttaccagcacggtccaggtcttcacggactcagactatcagctcccgtacgtgctcgggtcggctcacgagggctgcctcccgccgttcccagcggacgttttcatgattcctcagtacgggtatctgacgcttaatgatggaagccaggccgtgggtcgttcgtccttttactgcctggaatatttcccgtcgcaaatgctaagaacgggtaacaacttccagttcagctacgagtttgagaacgtacctttccatagcagctacgctcacagccaaagcctggaccgactaatgaatccactcatcgaccaatacttgtactatctctcaaagactattaacggttctggacagaatcaacaaacgctaaaattcagtgtggccggacctagcaacatggctgtccagggaagaaactacatacctggacccagctaccgacaacaacgtgtctcaaccactgtgactcaaaacaacaacagcgaatttgcttggcctggagcttcttcttgggctctcaatggacgtaatagcttgatgaatcctggacctgctatggccagccacaaagaaggagaggaccgtttctttcctttgtctggatctttaatttttggcaaacaaggaactggaagagacaacgtggatgcggacaaagtcatgataaccaacgaagaagaaattaaaactactaacccggtagcaacggagtcctatggacaagtggccacaaaccaccagagtgcccaagcacaggcgcagaccggctgggttcaaaaccaaggaatacttccgggtatggtttggcaggacagagatgtgtacctgcaaggacccatttgggccaaaattcctcacacggacggcaactttcacccttctccgctgatgggagggtttggaatgaagcacccgcctcctcagatcctcatcaaaaacacacctgtacctgcggatcctccaacggccttcaacaaggacaagctgaactctttcatcacccagtattctactggccaagtcagcgtggagatcgagtgggagctgcagaagaaaaacagcaagcgctggaacccggagatccagtacacttccaactattacaagtctaataatgttgaatttgctgttaacactgaaggtgtatatagtgaaccccgccccattggcaccagatacctgactcgtaatctgtaattgcttgttaatcaataaaccgtttaattcgtttcagttgaactgcggcc

SEQ ID NO: 575 - DNA, 2601 bp, Artificial Sequence
  Description of Artificial Sequence: Synthetic polynucleotide
ccatcgacgtcagacgcggaagcttcgatcaactacgcggacaggtaccaaaacaaatgttctcgtcacgtgggcatgaatctgatgctgtttccctgcagacaatgcgagagactgaatcagaattcaaatatctgcttcactcacggtgtcaaagactgtttagagtgctttcccgtgtcagaatctcaacccgtttctgtcgtcaaaaaggcgtatcagaaactgtgctacattcatcacatcatgggaaaggtgccagacgcttgcactgcttgcgacctggtcaatgtggacttggatgactgtgtttctgaacaataaatgacttaaaccaggtatggctgccgatggttatcttccagattggctcgaggacaaccttagtgaaggaattcgcgagtggtgggctttgaaacctggagcccctcaacccaaggcaaatcaacaacatcaagacaacgctcgaggtcttgtgcttccgggttacaaataccttggacccggcaacggactcgacaagggggagccggtcaacgcagcagacgcggcggccctcgagcacgacaaggcctacgaccagcagctcaaggccggagacaacccgtacctcaagtacaaccacgccgacgccgagttccaggagcggctcaaagaagatacgtcttttgggggcaacctcgggcgagcagtcttccaggccaaaaagaggcttcttgaacctcttggtctggttgaggaagcggctaagacggctcctggaaagaagaggcctgtagagcagtctcctcaggaaccggactcctccgcgggtattggcaaatcgggtgcacagcccgctaaaaagagactcaatttcggtcagactggcgacacagagtcagtcccagaccctcaaccaatcggagaacctcccgcagccccctcaggtgtgggatctcttacaatggcttcaggtggtggcgcaccagtggcagacaataacgaaggtgccgatggagtgggtagttcctcgggaaattggcattgcgattcccaatggctgggggacagagtcatcaccaccagcacccgaacctgggccctgcccacctacaacaatcacctctacaagcaaatctccaacagcacatctggaggatcttcaaatgacaacgcctacttcggctacagcaccccctgggggtattttgacttcaacagattccactgccacttctcaccacgtgactggcagcgactcatcaacaacaactggggattccggcctaagcgactcaacttcaagctcttcaacattcaggtcaaagaggttacggacaacaatggagtcaagaccatcgccaataaccttaccagcacggtccaggtcttcacggactcagactatcagctcccgtacgtgctcgggtcggctcacgagggctgcctcccgccgttcccagcggacgttttcatgattcctcagtacgggtatctgacgcttaatgatggaagccaggccgtgggtcgttcgtccttttactgcctggaatatttcccgtcgcaaatgctaagaacgggtaacaacttccagttcagctacgagtttgagaacgtacctttccatagcagctacgctcacagccaaagcctggaccgactaatgaatccactcatcgaccaatacttgtactatctctcaaagactattaacggttctggacagaatcaacaaacgctaaaattcagtgtggccggacccagcaacatggctgtccagggaagaaactacatacctggacccagctaccgacaacaacgtgtctcaaccactgtgactcaaaacaacaacagcgaatttgcttggcctggagcttcttcttgggctctcaatggacgtaatagcttgatgaatcctggacctgctatggccagccacaaagaaggagaggaccgtttctttcctttgtctggatctttaatttttggcaaacaaggaactggaagagacaacgtggatgcggacaaagtcatgataaccaacgaagaagaaattaaaactactaacccggtagcaacggagtcctatggacaagtggccacaaaccaccagagtgcccaagcacgggcgcagaccggctgggttcaaaaccaaggaatacttccgggtatggtttggcaggacagagatgtgtacctgcaaggacccatttgggccaaaattcctcacacggacggcaactttcacccttctccgctgatgggagggtttggaatgaagcacccgcctcctcagatcctcatcaaaaacacacctgtacctgcggatcctccaacggccttcaacaaggacaagctgaactctttcatcacccagtattctactggccaagtcagcgtggagatcgagtgggagctgcagaaggaaaacagcaagcgctggaacccggagatccagtacacttccaactattacaagtctaataatgttgaatttgctgttaatactgaaggtgtatatagtgaaccccgccccattggcaccagatacctgactcgtaatctgtaattgcttgttaatcaataaaccgtttaattcgtttcagttgaactgcggcc

SEQ ID NO: 576 - DNA, 2601 bp, Artificial Sequence
  Description of Artificial Sequence: Synthetic polynucleotide
ccatcgacgtcagacgcggaagcttcgatcaactacgcggacaggtaccaaaacaaatgttctcgtcacgtgggcatgaatctgatgctgtttccctgcagacaatgcgagagactgaatcagaattcaaatatctgcttcactcacggtgtcaaagactgtttagagtgctttcccgtgtcagaatctcaacccgtttctgtcgtcaaaaaggcgtatcagaaactgtgctacattcatcacatcatgggaaaggtgccagacgcttgcactgcttgcgacctggtcaatgtggacttggatgactgtgtttctgaacaataaatgacttaaaccaggtatggctgccgatggttatcttccagattggctcgaggacaaccttagtgaaggaattcgcgagtggtgggctttgaaacctggagcccctcaacccaaggcaaatcaacaacatcaagacaacgctcgaggtcttgtgcttccgggttacaaataccttggacccggcaacggactcgacaagggggagccggtcaacgcagtagacgcggcggccctcgagcacgacaaggcctacgaccagcagctcaaggccggagacaacccgtacctcaagtacaaccacgccgacgccgagttccaggagcggctcaaagaagatacgtcttttgggggcaacctcgggcgagcagtcttccaggccaaaaagaggcttcttgaacctcttggtctggttgaggaagcggctaagacggctcctggaaagaagaggcctgtagagcagtctcctcaggaaccggactcctccgcgggtattggcaaatcgggtgcacagcccgctaaaaagagactcaatttcggtcagactggcgacacagagtcagtcccagaccctcaaccaatcggagaacctcccgcagccccctcaggtgtgggatctcttacaatggcttcaggtggtggcgcaccagtggcagacaataacgaaggtgccgatggagtgggtagttcctcgggaaattggcattgcgattcccaatggctgggggacagagtcatcaccaccagcacccgaacctgggccctgcccacctacaacaatcacctctacaagcaaatctccaacagcacatctggaggatcttcaaatgacaacgcctacttcggctacagcaccccctgggggtattttgacttcaacagattccactgccacttctcaccacgtgactggcagcgactcatcaacaacaactggggatttcggcctaagcgactcaacttcaagctcttcaacattcaggtcaaagaggttacggacaacaatggagtcaagaccatcgccaataaccttaccagcacggtccaggtcttcacggactcagactatcagctcccgtacgtgctcgggtcggctcacgagggctgcctcccgccgttcccagcggacgttttcatgattcctcagtacgggtatctgacgcttaatgatggaagccaggccgtgggtcgttcgtccttttactgcctggaatatttcccgtcgcaaatgctaagaacgggtaacaacttccagttcagctacgagtttgagaacgtacctttccatagcagctacgctcacagccaaagcctggaccgactaatgaatccactcatcgaccaatacttgtactatctctcaaagactattaacggttctggacagaatcaacaaacgctaaaattcagtgtggccggacccagcaacatggctgtccagggaagaaactacatacctggacccagctaccgacaacaacgtgtctcaaccactgtgactcaaaacaacaacagcgaatttgcttggcctggagcttcttcttgggctctcaatggacgtaatagcttgatgaatcctggacctgctatggccagccacaaagaaggagaggaccgtttctttcctttgtctggatctttaatttttggcaaacaaggaactggaagagacaacgtggatgcggacaaagtcatgataaccaacgaagaagaaattaaaactactaacccggtagcaacggagtcctatggacaagtggccacaaaccaccagagtgcccaagcacaggcgcagaccggctgggttcaaaaccaaggaatacttccgggtatggtttggcaggacagagatgtgtacctgcaaggacccatttgggccaaaattcctcacacggacggcaactttcacccttctccgctgatgggagggtttggaatgaagcacccgcctcctcagatcctcatcaaaaacacacctgtacctgcggatcctccaacggccttcaacaaggacaagctgaactctttcatcacccagtattctactggccaagtcagcgtggagatcgagtgggagctgcagaaggaaaacagcaagcgctggaacccggagatccagtacacttccaactattacaagtctaataatgttgaatttgctgttaatactgaaggtgtatatagtgaaccccgccccattggcaccagatacctgactcgtaatctgtaattgcttgttaatcaataaaccgtttaattcgtttcagttgaactgcggcc

SEQ ID NO: 577 - DNA, 2580 bp, Artificial Sequence
  Description of Artificial Sequence: Synthetic polynucleotide
ccatcgacgtcagacgcggaagcttcgatcaactacgcggacaggtaccaaaacaaatgttctcgtcacgtgggcatgaatctgatgctgtttccctgcagacaatgcgagagactgaatcagaattcaaatatctgcttcactcacggtgtcaaagactgtttagagtgctttcccgtgtcagaatctcaacccgtttctgtcgtcaaaaaggcgtatcagaaactgtgctacattcatcacatcatgggaaaggtgccagacgcttgcactgcttgcgacctggtcaatgtggacttggatgactgtgtttctgaacaataaatgacttaaaccaggtatggctgccgatggttatcttccagattggctcgaggacaaccttagtgaaggaattcgcgagtggtgggctttgaaacctggagcccctcaacccaaggcaaatcaacaacatcaagacaacgctcgaggtcttgtgcttccgggttacaaataccttggacccggcaacggactcgacaagggggagccggtcaacgcagcagacgcggcggccctcgagcacgacaaggcctacgaccagcagctcaaggccggagacaacccgtacctcaagtacaaccacgccgacgccgagttccaggagcggctcaaagaagatacgtcttttgggggcaacctcgggcgagcagtcttccaggccaaaaagaggcttcttgaacctcttggtctggttgaggaagcggctaagacggctcctggaaagaagaggcctgtagagcagtctcctcgggaaccggactcctccgcgggtattggcaaatcgggtgcacagcccgctaaaaagagactcaatttcggtcagactggcgacacagagtcagtcccagaccctcaaccaatcggagaacctcccgcagccccctcaggtgtgggatctcttacaatggcttcaggtggtggcgcaccagtggcagacaataacgaaggtgccgatggagtgggtagttcctcgggaaattggcattgcgattcccaatggctgggggacagagtcatcaccaccagcacccgaacctgggccctgcccacctacaacaatcacctctacaagcaaatctccaacagcacatctggaggatcttcaaatgacaacgcctacttcggctacagcaccccctgggggtattttgacttcaacagattccactgccacttctcaccacgtgactggcagcgactcatcaacaacaactggggattccggcctaagcgactcaacttcaagctcttcaacattcaggtcaaagaggttacggacaacaatggagtcaagaccatcgccaataaccttaccagcacggtccaggtcttcacggactcagactatcagctcccgtacgtgctcgggtcggctcacgagggctgcctcccgccgttcccagcggacgttttcatgattcctcagtacgggtatctgacgcttaatgatggaagccaggccgtgggtcgttcgtccttttactgcctggaatatttcccgtcgcaaatgctaagaacgggtaacaacttccagttcagctacgagtttgagaacgtacctttccatagcagctacgctcacagccaaagcctggaccgactaatgaatccactcatcgaccaatacttgtactatctctcaaagactattaacggttctggacagaatcaacaaacgctaaaattcagtgtggccggacccagcaacatggctgtccagggaagaaactacatacctggacccagctaccgacaacaacgtgtctcaaccactgtgactcaaaacaacaacagcgaatttgcttggcctggagcttcttcttgggctctcaatggacgtaatagcttgatgaatcctggacctgctatggccagccacaaagaaggagaggaccgtttctttcctttgtctggatctttaatttttggcaaacaaggaactggaagagacaacgtggatgcggacaaagtcatgataaccaacgaagaagaaattaaaactactaacccggtagcaacggagtcctatggacaagtggccacaaaccaccagagtgcccaagcacaggcgcagaccggctgggttcaaaaccaaggaatacttccgggtatggtttggcaggacagagatgtgtacctgcaaggacccatttgggccaaaattcctcacacggacggcaactttcacccttctccgctgatgggagggtttggaatgaagcacccgcctcctcagatcctcatcaaaaacacacctgtacctgcggatcctccaacggccttcaacaaggacaagctgaactctttcatcacccagtattctactggccaagtcagcgtggagatcgagtgggaactgcagaaggaaaacagcaagcgctggaacccggagatccagtacacttccaactattacaagtctaataatgttgaatttgctgttaatactgaaggtgtatatagtgaaccccgccccattggcaccagatacctgactcgtaatctgtaattgcttgttaatcaataaaccgtttaatt

SEQ ID NO: 578 - DNA, 2601 bp, Artificial Sequence
  Description of Artificial Sequence: Synthetic polynucleotide
ccatcgacgtcagacgcggaagcttcgatcaactacgcggacaggtaccaaaacaaatgttctcgtcacgtgggcatgaatctgatgctgtttccctgcagacaatgcgagagactgaatcagaattcaaatatctgcttcactcacggtgtcaaagactgtttagagtgctttcccgtgtcagaatctcaacccgtttctgtcgtcaaaaaggcgtatcagaaactgtgctacattcatcacatcatgggaaaggtgccagacgcttgcactgcttgcgacctggtcaatgtggacttggatgactgtgtttctgaacaataaatgacttaaaccaggtatggctgccgatggttatcttccagattggctcgaggacaaccttagtgaaggaattcgcgagtggtgggctttgaaacctggagcccctcaacccaaggcaaatcaacaacatcaagacaacgctcgaggtcttgtgcttccgggttacaaataccttggacccggcaacggactcgacaagggggagccggtcaacgcagcagacgcggcggccctcgagcacgacaaggcctacgaccagcagctcaaggccggagacaacccgtacctcaagtacaaccacgccgacgccgagttccaggagcggctcaaagaagatacgtcttttgggggcaacctcgggcgagcagtctttcaggccaaaaagaggcttcttgaacctcttggtctggttgaggaagcggctaagacggctcctggaaagaagaggcctgtagagcagtctcctcaggaaccggactcctccgcgggtattggcaaatcgggtgcacagcccgctaaaaagagactcaatttcggtcagactggcgacacagagtcagtcccagaccctcaaccaatcggagaacctcccgcagccccctcaggtgtgggatctcttacaatggcttcatgtggtggcgcaccagtggcagacaataacgaaggtgccgatggagtgggtagttcctcgggaaattggcattgcgattcccaatggctgggggacagagtcatcaccaccagcacccgaacctgggccctgcccacctacaacaatcacctctacaagcaaatctccaacagcacatctggaggatcttcaaatgacaacgcctacttcggctacagcaccccctgggggtattttgacttcaacagattccactgccacttctcaccacgtgactggcagcgactcatcaacaacaactggggattccggcctaagcgactcaacttcaagctcttcaacattcaggtcaaagaggttacggacaacaatggagtcaagaccatcgccaataaccttaccagcacggtccaggtcttcacggactcagactatcagctcccgtacgtgctcgggtcggctcacgagggctgcctcccgccgttcccagcggacgttttcatgattcctcagtacgggtatctgacgcttaatgatggaagccaggccgtgggtcgttcgtccttttactgcctggaatatttcccgtcgcaaatgctaagaacgggtaacaacttccagttcagctacgagtttgagaacgtacctttccatagcagctacgctcacagccaaagcctggaccgactaatgaatccactcatcgaccaatacttgtactatctctcaaagactattaacggttctggacagaatcaacaaacgctaaaattcagtgtggccggacccagcaacatggctgtccagggaagaaactacatacctggacccagctaccgacaacaacgtgtctcaaccactgtgactcaaaacaacaacagcgaatttgcttggcctggagcttcttcttgggctctcaatggacgtaatagcttgatgaatcctggacctgctatggccagccacaaagaaggagaggaccgtttctttcctttgtctggatctttaatttttggcaaacaaggaactggaagagacaacgtggatgcggacaaagtcatgataaccaacgaagaagaaattaaaactactaacccggtagcaacggagtcctatggacaagtggccacaaaccaccagagtgcccaagcacaggcgcagaccggctgggttcaaaaccaaggaatacttccgggtatggtttggcaggacagagatgtgtacctgcaaggacccatttgggccaaaattcctcacacggacggcaactttcacccttctccgctgatgggagggtttggaatgaagcacccgcctcctcagatcctcatcaaaaacacacctgtacctgcggatcctccaacggccttcaacaaggacaagctgaactctttcatcacccagtattctactggccaagtcagcgtggagatcgagtgggagctgcagaaggaaaacagcaagcgctggaacccggagatccagtacacttccaactattacaagtctaataatgttgaatttgctgttaatactgaaggtgtatatagtgaaccccgccccattggcaccagatacctgactcgtaatctgtaattgcttgttaatcaataaaccgtttaattcgtttcagttgaactgcggcc

SEQ ID NO: 579 - DNA, 2601 bp, Artificial Sequence
  Description of Artificial Sequence: Synthetic polynucleotide
ccatcgacgtcagacgcggaagcttcgatcaactacgcggacaggtaccaaaacaaatgttctcgtcacgtgggcatgaatctgatgctgtttccctgcagacaatgcgagagactgaatcagaattcaaatatctgcttcactcacggtgtcaaagactgtttagagtgctttcccgtgtcagaatctcaacccgtttctgtcgtcaaaaaggcgtatcagaaactgtgctacattcatcacatcatgggaaaggtgccagacgcttgcactgcttgcgacctggtcaatgtggacttggatgactgtgtttctgaacaataaatgacttaaaccaggtatggctgccgatggttatcttccagattggctcgaggacaaccttagtgaaggaattcgcgagtggtgggctttgaaacctggagcccctcaacccaaggcaaatcaacaacatcaagacaacgctcgaggtcttgtgcttccgggttacaaataccttggacccggcaacggactcgacaagggggagccgatcaacgcagcagacgcggcggccctcgagcacgacaaggcctacgaccagcagctcaaggccggagacaacccgtacctcaagtacaaccacgccgacgccgagttccaggagcggctcaaagaagatacgtcttttgggggcaacctcgggcgagcagtcttccaggccaaaaagaggcttcttgaacctcttggtctggttgaggaagcggctaagacggctcctggaaagaagaggcctgtagagcagtctcctcaggaaccggactcctccgcgggtattggcaaatcgggtgcacagcccgctaaaaagagactcaatttcggtcagactggcgacacagagtcagtcccagaccctcaaccaatcggagaacctcccgcagccccctcaggtgtgggatctcttacaatggcttcaggtggtggcgcaccagtggcagacaataacgaaggtgccgatggagtgggtagttcctcgggaaattggcattgcgattcccaatggctgggggacagagtcatcaccaccagcacccgaacctgggccctgcccacctacaacaatcacctctacaagcaaatctccaacagcacatctggaggatcttcaaatgacaacgcctacttcggctacagcaccccctgggggtattttgacttcaacagattccactgccacttctcaccacgtgactggcagcgactcatcaacaacaactggggattccggcctaagcgactcaacttcaagctcttcaacattcaggtcaaagaggttacggacaacaatggagtcaagaccatcgccaataaccttaccagcacggtccaggtcttcacggactcagactatcagctcccgtacgtgctcgggtcggctcacgagggctgcctcccgccgttcccagcggacgttttcatgattcctcagtacgggtatctgacgcttaatgatggaagccaggccgtgggtcgttcgtccttttactgcctggaatatttcccgtcgcaaatgctaagaacgggtaacaacttccagttcagctacgagtttgagaacgtacctttccatagcagctacgctcacagccaaagcctggaccgactaatgaatccactcatcgaccaatacttgtactatctctcaaagactattaacggttctggacagaatcaacaaacgctaaaattcagtgtggccggacccagcaacatggctgtccagggaagaaactacatacctggacccagctaccgacaacaacgtgtctcaaccactgtgactcaaaacaacaacagcgaatttgcttggcctggagcttcttcttgggctctcaatggacgtaatagcttgatgaatcctggacctgctatggccagccacaaagaaggagaggaccgtttctttcctttgtctggatctttaatttttggcaaacaaggaactggaagagacaacgtggatgcggacaaagtcatgataaccaacgaagaagaaattaaaactactaacccggtagcaacggagtcctatggacaagtggccacaaaccaccagagtgcccaagcacaggcgcagaccggctgggttcaaaaccaaggaatacttccgggtatggtttggcaggacagagatgtgtacctgcaaggacccatttgggccaaaattcctcacacgtacggcaactttcacccttctccgctgatgggagggtttggaatgaagcacccgcctcctcagatcctcatcaaaaacacacctgtacctgcggatcctccaacggccttcaacaaggacaagctgaactctttcatcacccagtattctactggccaagtcagcgtggagatcgagtgggagctgcagaaggaaaacagcaagcgctggaacccggagatccagtacacttccaactattacaagtctaataatgttgaatttgctgttaatactgaaggtgtatatagtgaaccccgccccattggcaccagatacctgactcgtaatctgtaattgcttgttaatcaataaaccgtttaattcgtttcagttgaactgcggcc

SEQ ID NO: 580 - DNA, 2601 bp, Artificial Sequence
  Description of Artificial Sequence: Synthetic polynucleotide
ccatcgacgtcagacgcggaagcttcgatcaactacgcggacaggtaccaaaacaaatgttctcgccacgtgggcatgaatctgatgctgtttccctgcagacaatgcgagagactgaatcagaattcaaatatctgcttcactcacggtgtcaaagactgtttagagtgctttcccgtgtcagaatctcaacccgtttctgtcgtcaaaaaggcgtatcagaaactgtgctacattcatcacatcatgggaaaggtgccagacgcttgcactgcttgcgacctggtcaatgtggacttggatgactgtgtttctgaacaataaatgacttaaaccaggtatggctgccgatggttatcttccagattggctcgaggacaaccttagtgaaggaattcgcgagtggtgggctttgaaacctggagcccctcaacccaaggcaaatcaacaacatcaagacaacgctcgaggtcttgtgcttccgggttacaaataccttggacccggcaacggactcgacaagggggagccggtcaacgcagcagacgcggcggccctcgagcacgacaaggcctacgaccagcagctcaaggccggagacaacccgtacctcaagtacaaccacgccgacgccgagttccaggagcggctcaaagaagatacgtcttttgggggcaacctcgggcgagcagtcttccaggccaaaaagaggcttcttgaacctcttggtctggttgaggaagcggctaagacggctcctggaaagaagaggcctgtagagcagtctcctcaggaaccggactcctccgcgggtattggcaaatcgggtgcacagcccgctaaaaagagactcaatttcggtcagactggcgacacagagtcagtcccagaccctcaaccaatcggagaacctcccgctgccccctcaggtgtgggatctcttacaatggcttcaggtggtggcgcaccagtggcagacaataacgaaggtgccgatggagtgggtagttcctcgggaaattggcattgcgattcccaatggctgggggacagagtcatcaccaccagcacccgaacctgggccctgcccacctacaacaatcacctctacaagcaaatctccaacagcacatctggaggatcttcaaatgacaacgcctacttcggctacagcaccccctgggggtattttgacttcaacagattccactgccacttctcaccacatgactggcagcgactcatcaacaacaactggggattccggcctaagcgactcaacttcaagctcttcaacattcaggtcaaagaggttacggacaacaatggagtcaagaccatcgccaataaccttaccagcacggtccaggtcttcacggactcagactatcagctcccgtacgtgctcgggtcggctcacgagggctgcctcccgccgttcccagcggacgttttcatgattcctcagtacgggtatctgacgcttaatgatggaagccaggccgtgggtcgttcgtccttttactgcctggaatatttcccgtcgcaaatgctaagaacgggtaacaacttccagttcagctacgagtttgagaacgtacctttccatagcagctacgctcacagccaaagcctggaccgactaatgaatccactcatcgaccaatacttgtactatctctcaaagactattaacggttctggacagaatcaacaaacgctaaaattcaatgtggccggacccagcaacatggctgtccagggaagaaactacatacctggacccagctaccgacaacaacgtgtctcaaccactgtgactcaaaacaacaacagcgaatttgcctggcctagagcttcttcttgggctctcaatggacgtaatagcttgatgaatcctggacctgctatggccagccacaaagaaggagaggaccgtttctttcctttgtctggatctttaatttttggcaaacaaggaactggaagagacaacgtggatgcggacaaagtcatgataaccaacgaagaagaaattaaaactactaacccggtagcaacggagtcctatggacaagtggccacaaaccaccagagtgcccaagcacaggcgcagaccggctgggttcaaaaccaaggaatacttccgggtatggtttggcaggacagagatgtgtacctgcaaggacccatttgggccaaaattcctcacacggacggcaactttcacccttctccgctgatgggagggtttggaatgaagcacccgcctcctcagatcctcatcaaaaacacacctgtacctgcggatcctccaacggccttcaacaaggacaagctgaactctttcatcacccagtattctactggccaagtcagcatggagatcgagtgggagctgcagaaggaaaacagcaagcgctggaacccggagatccagtacacttccaactattacaagtctaataatgttgaatttgctgttaatactgaaggtgtatatagtgaaccccgccccattggcaccagatacctgactcgtaatctgtaattgcttgttaatcaataaaccgtttaattcgtttcagttgaactgcggcc

SEQ ID NO: 581 - DNA, 2601 bp, Artificial Sequence
  Description of Artificial Sequence: Synthetic polynucleotide
ccatcgacgtcagacgcggaagcttcgatcaactacgcggacaggtaccaaaacaaatgttctcgtcacgtgggcatgaatctgatgctgtttccctgcagacaatgcgagagactgaatcagaattcaaatatctgcttcactcacggtgtcaaagactgtttagagtgctttcccgtgtcagaatctcaacccgtttctgtcgtcaaaaaggcgtatcagaaactgtgctacattcatcacatcatgggaaaggtgccagacgcttgcactgcttgcgacctggtcaatgtggacttggatgactgtgtttctgaacaataaatgacttaaaccaggtatggctgccgatggttatcttccagattggctcgaggacaaccttagtgaaggaattcgcgagtggtgggctttgaaacctggagcccctcaacccaaggcaaatcaacaacatcaagacaacgctcgaggtcttgtgcttccgggttacaaataccttggacccggcaacggactcgacaagggggagccggtcaacgcagcagacgcggcggccctcgagcacgacaaggcctacgaccagcagctcaaggccggagacaacccgtacctcaagtacaaccacgccgacgccgagttccaggagcggctcaaagaagatacgtcttttgggggcaacctcgggcgagcagtcttccaggccaaaaagaggcttcttgaacctcttggtctggttgaggaagcggctaagacggctcctggaaagaagaggcctgtagagcagtctcctcaggaaccggactcctccgcgggtattggcaaatcgggtgcacagcccgctaaaaagagactcaatttcggtcagactggcgacacagagtcagtcccagaccctcaaccaatcggagaacctcccgcagccccctcaggtgtgggatctcttacaatggcttcaggtggtggcgcaccagtggcagacaataacgaaggtgccgatggagtgggtagttcctcgggaaattggcattgcgattcccaatggctgggggacagagtcatcaccaccagcacccgaacctgggccctgcccacctacaacaatcacctctacaagcaaatctccaacagcacatctggaggatcttcaaatgacaacgcctacttcggctacagcaccccctgggggtattttgacttcaacagattccactgccacttctcaccacgtgactggcagcgactcatcaacaacaactggggattccggcctaagcgactcaacttcaagctcttcaacattcaggtcaaagaggttacggacaacaatggagtcaagaccatcgccaataaccttaccagcacggtccaggtcttcacggactcagactatcagctcccgtacgtgctcgggtcggctcacgagggctgcctcccgccgttcccagcggacgttttcatgattcctcagtacgggtatctgacgcttaatgatggaagccaggccgtgggtcgttcgtccttttactgcctggaatatttcccgtcgcaaatgctaagaacgggtaacaacttccagttcagctacgagtttgagaacgtacctttccatagcagctacgctcacagccaaagcctggaccgactaatgaatccactcatcgaccaatacttgtactatctctcaaagactattaacggttctggacagaatcaacaaacgctaaaattcagtgtggccggacccagcaacatggctgtccagggaagaaactacatacctggacccagctaccgacaacaacgtgtctcaaccactgtgactcaaaacaacaacagcgaatttgcttggcctagagcttcttcttgggctctcaatggacgtaatagcttgatgaatcctggacctgctatggccagccacaaagaaggagaggaccgtttctttcctttgtctggatctttaatttttggcaaacaaggaactggaagagacaacgtggatgcggacaaagtcatgataaccaacgaagaagaaattaaaactactaacccggtagcaacggagtcctatggacaagtggccacaaaccaccagagtgcccaagcacaggcgcagaccggctgggttcaaaaccaaggaatacttccgggtatggtttggcaggacagagatgtgtacctgcaaggacccatttgggccaaaattcctcacacggacggcaactttcacccttctccgctgatgggagggtttggaatgaagcacccgcctcctcagatcctcatcaaaaacacacctgtacctgcggatcctccaacggccttcaacaaggacaagctgaactctttcatcacccagtattctactggccaagtcagcgtggagatcgagtgggagctgcagaaggaaaacagcaagcgctggaacccggagatccagtacacttccaactattacaagtctaataatgttgaatttgctgttaatactgaaggtgtatatagtgaaccccgccccattggcaccagatacctgactcgtaatctgtaattgcttgttaatcaataaaccgtttaattcgtttcagttgaactgcggcc

SEQ ID NO: 582 - DNA, 2601 bp, Artificial Sequence
  Description of Artificial Sequence: Synthetic polynucleotide
ccatcgacgtcagacgcggaagcttcgatcaactacgcggacaggtaccaaaacaaatgttctcgtcacgtgggcatgaatctgatgctgtttccctgcagacaatgcgagagactgaatcagaattcaaatatctgcttcactcacggtgtcaaagactgtttagagtgctttcccgtgtcagaatctcaacccgtttctgtcgtcaaaaaggcgtatcagaaactgtgctacattcatcacatcatgggaaaggtgccagacgcttgcactgcttgcgacctggtcaatgtggacttggatgactgtgtttctgaacaataaatgacttaaaccaggtatggctgccgatggttatcttccagattggctcgaggacaaccttagtgaaggaattcgcgagtggtgggctttgaaacctggagcccctcaacccaaggcaaatcaacaacatcaagacaacgctcgaggtcttgtgcttccgggttacaaataccttggacccggcaacggactcgacaagggggagccggtcaacgcagcagacgcggcggccctcgagcacgacaaggcctacgaccagcagctcaaggccggagacaacccgtacctcaagtacaaccacgccgacgccgagttccaggagcggctcaaagaagatacgtcttttgggggcaacctcgggcgagcagtcttccaggccaaaaagaggcttcttgaacctcttggtctggttgaggaagcggctaagacggctcctggaaagaagaggcctgtagagcagtctcctcaggaaccggactcctccgcgggtattggcaaatcgggtgcacagcccgctaaaaagagactcaatttcggtcagactggcgacacagagtcagtcccagaccctcaaccaatcggagaacctcccgcagccccctcaggtgtgggatctcttacaatggcttcaggtggtggcgcaccagtggcagacaataacgaaggtgccgatggagtgggtagttcctcgggaaattggcattgcgattcccaatggctgggggacagagtcatcaccaccagcacccgaacctgggccctgcccacctacaacaatcacctctacaagcaaatctccaacagcacatctggaggatcttcaaatgacaacgcctacttcggctacagcaccccctgggggtattttgacttcaacagattccactgccacttctcaccacgtgactggcagcgactcatcaacaacaactggggattccggcctaagcgactcaacttcaagctcttcaacattcaggtcaaagaggttacggacaacaatggagtcaagaccatcgccaataaccttaccagcacggtccaggtcttcacggactcagactatcagctcccgtacgtgctcgggtcggctcacgagggctgcctcccgccgttcccagcggacgttttcatgattcctcagtacgggtatctgacgcttaatgatggaagccaggccgtgggtcgttcgtccttttactgcctggaatatttcccgtcgcaaatgctaagaacgggtaacaacttccagttcagctacgagtttgagaacgtacctttccatagcagctacgctcacagccaaagcctggaccgactaatgaatccactcatcgaccaatacttgtactatctctcaaagactattaacggttctggacagaatcaacaaacgctaaaattcagtgtggccggacccagcaacatggctgtccagggaagaaactacatacctggacccagctaccgacaacaacgtgtctcaaccactgtgactcaaaacaacaacagcgaatttgcttggcctagagcttcttcttgggctctcaatggacgtaatagcttgatgaatcctggacctgctatggccagccacaaagaaggagaggaccgtttctttcctttgtctggatctttaatttttggcaaacaaggaactggaagagacaacgtggatgcggacaaagtcatgataaccaacgaagaagaaattaaaactactaacccggtagcaacggagtcctatggacaagtggccacaaaccaccagagtgcccaagcacaggcgcagaccggctgggttcaaaaccaaggaatacttccgggtatggtttggcaggacagagatgtgtacctgcaaggacccatttgggccaaaattcctcacacggacggcaactttcacccttctccgctgatgggagggtttggaatgaagcacccgcctcctcagatcctcatcaaaaacacacctgtacctgcggatcctccaacggccttcaacaaggacaagctgaactctttcatcacccagtattctactggccaagtcagcgtggagatcgagtgggagcggcagaaggaaaacagcaagcgctggaacccggagatccagtacacttccaactattacaagtctaataatgttgaatttgctgttaatactgaaggtgtatatagtgaaccccgccccattggcaccagatacctgactcgtaatctgtaattgcttgttaatcaataaaccgtttaattcgtttcagttgaactgcggcc

SEQ ID NO: 583 - DNA, 2601 bp, Artificial Sequence
  Description of Artificial Sequence: Synthetic polynucleotide
ccatcgacgtcagacgcggaagcttcgatcaactacgcggacaggtaccaaaacaaatgttctcgtcacgtgggcatgaatctgatgctgtttccctgcagacaatgcgagagactgaatcagaattcaaatatctgcttcactcacggtgtcaaagactgtttagagtgctttcccgtgtcagaatctcaacccgtttctgtcgtcaaaaaggcgtatcagaaactgtgctacattcatcacatcatgggaaaggtgccagacgcttgcactgcttgcgacctggtcaatgtggacttggatgactgtgtttctgaacaataaatgacttaaaccaggtatggctgccgatggttatcttccagattggctcgaggacaaccttagtgaaggaattcgcgagtggtgggctttgaaacctggagcccctcaacccaaggcaaatcaacaacatcaagacaacgctcgaggtcttgtgcttccgggttacaaataccttggacccggcaacggactcgacaagggggagccggtcaacgcagcagacgcggcggccctcgagcacgacaaggcctacgaccagcagctcaaggccggagacaacccgtacctcaagtacaaccacgccgacgccgagttccaggagcggctcaaagaagatacgtcttttgggggcaacctcgggcgagcagtcttccaggccaaaaagaggcttcttgaacctcttggtctggttgaggaagcggctaagacggctcctggaaagaagaggcctgtagagcagtctcctcaggaaccggactcctccgcgggtattggcaaatcgggtgcacagcccgctaaaaagagactcaatttcggtcagactggcgacacagagtcagtcccagaccctcaaccaatcggagaacctcccgcagccccctcaggtgtgggatctcttacaatggcttcaggtggtggcgcaccagtggcagacaataacgaaggtgccgatggagtgggtagttcctcgggaaattggcattgcgattcccaatggctgggggacagagtcatcaccaccagcacccgaacctgggccctgcccacctacaacaatcacctctacaagcaaatctccaacagcacatctggaggatcttcaaatgacaacgcctacttcggctacagcaccccctgggggtattttgacttcaacagattccactgccacttctcaccacgtgactggcagcgactcatcaacaacaactggggattccggcctaagcgactcaacttcaagctcttcaacattcaggtcaaagaggttacggacaacaatggagtcaagaccatcgccaataaccttaccagcacggtccaggtcttcgcggactcagactatcagctcccgtacgtgctcgggtcggctcacgagggctgcctcccgccgttcccagcggacgttttcatgattcctcagtacgggtatctgacgcttaatgatggaagccaggccgtgggtcgttcgtccttttactgcctggaatatttcccgtcgcaaatgctaagaacgggtaacaacttccagttcagctacgagtttgagaacgtacctttccatagcagctacgctcacagccaaagcctggaccgactaatgaatccactcatcgaccaatacttgtactatctctcaaagactattaacggttctggacagaatcaacaaacgctaaaattcagtgtggccggacccagcaacatggctgtccagggaagaaactacatacctggacccagctaccgacaacaacgtgtctcaaccactgtgactcaaaacaacaacagcgaatttgcttggcctagagcttcttcttgggctctcaatggacgtaatagcttgatgaatcctggacctgctatggccagccacaaagaaggagaggaccgtttctttcctttgtctggatctttaatttttggcaaacaaggaactggaagagacaacgtggatgcggacaaagtcatgataaccaacgaagaagaaattaaaactactaacccggtagcaacggagtcctatggacaagtggccacaaaccaccagagtgcccaagcacaggcgcagaccggctgggttcaaaaccaaggaatacttccgggtatggtttggcaggacagagatgtgtacctgcaaggacccatttgggccaaaattcctcacacggacggcaactttcacccttctccgctgatgggagggtttggaatgaagcacccgcctcctcagatcctcatcaaaaacacacctgtacctgcggatcctccaacggccttcaacaaggacaagctgaactctttcatcacccagtattctactggccaagtcagcgtggagatcgagtgggagctgcagaaggaaaacagcaagcgctggaacccggagatccagtacacttccaactattacaagtctaataatgttgaatttgctgttaatactgaaggtgtatatagtgaaccccgccccattggcaccagatacctgactcgtaatctgtaattgcttgttaatcaataaaccgtttaattcgtttcagttgaactgcggcc

SEQ ID NO: 584 - DNA, 2601 bp, Artificial Sequence
  Description of Artificial Sequence: Synthetic polynucleotide
ccatcgacgtcagacgcggaagcttcgatcaactacgcggacaggtaccaaaacaaatgttctcgtcacgtgggcatgaatctgatgctgtttccctgcagacaatgcgagagactgaatcagaattcaaatatctgcttcactcacggtgtcaaagactgtttagagtgctttcccgtgtcagaatctcaacccgtttctgtcgtcaaaaaggcgtatcagaaactgtgctacattcatcacatcatgggaaaggtgccagacgcttgcactgcttgcgacctggtcaatgtggacttggatgactgtgtttctgaacaataaatgacttaaaccaggtatggctgccgatggttatcttccagattggctcgaggacaaccttagtgaaggaattcgcgagtggtgggctttgaaacctggagcccctcaacccaaggcaaatcaacaacatcaagacaacgctcgaggtcttgtgcttccgggttacaaataccttggacccggcaacggactcgacaagggggagccggtcaacgcagcagacgcggcggccctcgagcacgacaaggcctacgaccagcagctcaaggccggagacaacccgtacctcaagtacaaccacgccgacgccgagttccaggagcggctcaaagaagatacgtcttttgggggcaacctcgggcgagcagtcttccaggccaaaaagaggcttcttgaacctcttggtctggttgaggaagcggctaagacggctcctggaaagaagaggcctgtagagcagtctcctcaggaaccggactcctccgcgggtattggcaaatcgggtgcacagcccgctaaaaagagactcaatttcggtcagactggcgacacagagtcagtcccagaccctcaaccaatcggagaacctcccgcagccccctcaggtgtgggatctcttacaatggcttcaggtggtggcgcaccagtggcagacaataacgaaggtgccgatggagtgggtagttcctcgggaaattggcattgcgattcccaatggctgggggacagagtcatcaccaccagcacccgaacctgggccctgcccacctacaacaatcacctctacaagcaaatctccaacagcacatctggaggatcttcaaatgacaacgcctacttcggctacagcaccccctgggggtattttgacttcaacagattccactgccacttctcaccacgtgactggcagcgactcatcaacaacaactggggattccggcctaagcgactcaacttcaagctcttcaacattcaggtcaaagaggttacggacaacaatggagtcaagaccatcgccaataaccttaccagcacggtccaggtcttcacggactcagactatcagctcccgtacgtgctcgggtcggctcacgagggctgcctcccgccgttcccagcggacgttttcatgattcctcagtacgggtatctgacgcttaatgatggaagccaggccgtgggtcgttcgtccttttactgcctggaatatttcccgtcgcaaatgctaagaacgggtaacaacttccagttcagctacgagtttgagaacgtacctttccatagcagctacgctcacagccaaagcctggaccgactaatgaatccactcatcgaccaatacttgtactatctctcaaagactattaacggttctggacagaatcaacaaacgctaaaattcagtgtggccggacccagcaacatggctgtccagggaagaaactacatacctggacccagctaccgacaacaacgtgtctcaaccactgtgactcaaaacaacaacagcgaaattgcttggcctagagcttcttcttgggctctcaatggacgtaatagcttgatgaatcctggacctgctatggccagccacaaagaaggagaggaccgtttctttcctttgtctggatctttaatttttggcaaacaaggaactggaagagacaacgtggatgcggacaaagtcatgataaccaacgaagaagaaattaaaactactaacccagtagcaacggagtcctatggacaagtggccacaaaccaccagagtgcccaagcacaggcgcagaccggctgggttcaaaaccaaggaatacttccgggtatggtttggcaggacagagatgtgtacctgcaaggacccatttgggccaaaattcctcacacggacggcaactttcacccttctccgctgatgggagggtttggaatgaagcacccgcctcctcagatcctcatcaaaaacacacctgtacctgcggatcctccaacggccttcaacaaggacaagctgaactctttcatcacccagtattctactggccaagtcagcgtggagatcgagtgggagctgcagaaggaaaacagcaagcgctggaacccggagatccagtacacttccaactattgcaagtctaataatgttgaatttgctgttaatactgaaggtgtatatagtgaaccccgccccattggcaccagatacctgactcgtaatctgtaattgcttgttaatcaataaaccgtttaattcgtttcagttgaactgcggcc

SEQ ID NO: 585 - DNA, 2601 bp, Artificial Sequence
  Description of Artificial Sequence: Synthetic polynucleotide
ccatcgacgtcagacgcggaagcttcgatcaactacgcggacaggtaccaaaacaaatgttctcgtcacgtgggcatgaatctgatgctgtttccctgcagacaatgcgagagactgaatcagaattcaaatatctgcttcactcacggtgtcaaagactgtttagagtgctttcccgtgtcagaatctcaacccgtttctgtcgtcaaaaaggcgtatcagaaactgtgctacattcatcacatcatgggaaaggtgccagacgcttgcactgcttgcgacctggtcaatgtggacttggatgtctgtgtttctgaacaataaatgacttaaaccaggtatggctgccgatggttatcttccagattggctcgaggacaaccttagtgaaggaattcgcgagtggtgggctttgaaacctggagcccctcaacccaaggcaaatcaacaacatcaagacaacgctcgaggtcttgtgcttccgggttacaaataccttggacccggcaacggactcgataagggggagccggtcaacgcagcagacgcggcggccctcgagcacgacaaggcctacgaccagcagctcaaggccggagacaacccgtacctcaagtacaaccacgccgacgccgagttccaggagcggctcaaagaagatacgtcttttgggggcaacctcgggcgagcagtcttccaggccaaaaagaggcttcttgaacctcttggtctggttgaggaagcggctaagacggctcctggaaagaagaggcctgtagagcagtctcctcaggaaccggactcctccgcgggtattggcaaatcgggtgcacagcccgctaaaaagagactcaatttcggtcagactggcgacacagagtcagtcccagaccctcaaccaatcggagaacctcccgcagccccctcaggtgtgggatctcttacaatggcttcaggtggtggcgcaccagtggcagacaataacgaaggtgccgatggagtgggtagttcctcgggaaattggcattgcgattcccaatggctgggggacagagtcatcaccaccagcacccgaacctgggccctgcccacctacaacaatcacctctacaagcaaatctccaacagcacatctggaggatcttcaaatgacaacgcctacttcggctacagcaccccctgggggtattttgacttcaacagattccactgccacttctcaccacgtgactggcagcgactcatcaacaacaactggggattccggcctaagcgactcaacttcaagctcttcaacattcaggtcaaagaggttacggacaacaatggagtcaagaccatcgccaataaccttaccagcacggtccaggtcttcacggactcagactatcagctcccgtacgtgctcgggtcggctcacgagggctgcctcccgccgttcccagcggacgttttcatgattcctcagtacgggtatctgacgcttaatgatggaagccaggccgtgggtcgttcgtccttttactgcctggaatatttcccgtcgcaaatgctaagaacgggtaacaacttccagttcagctacgagtttgagaacgtacctttccatagcagctacgctcacagccaaagcctggaccgactaatgaatccactcatcgaccaatacttgtactatctctcaaagactattaacggttctggacagaatcaacaaacgctaaaattcagtgtggccggacccagcaacatggctgtccagggaagaaactacatacctggacccagctaccgacaacaacgtgtctcaaccactgtgactcaaaacaacaacagcgaatttgcttggcctagagcttcttcttgggctctcaatggacgtaatagcttgatgaatcctggacctgctatggccagccacaaagaaggagaggaccgtttctttcctttgtctggatctttaatttttggcaaacaaggaactggaagagacaacgtggatgcggacaaagtcatgataaccaacgaagaagaaattaaaactactaacccggtagcaacggagtcctatggacaagtggccacaaaccaccagagtgcccaagcacaggcgcagaccggctgggttcaaaaccaaggaatacttccgggtatggtttggcaggacagagatgtgtacctgcaaggacccatttgggccaaaattcctcacacggacggcaactttcacccttctccgctgatgggagggtttggaatgaagcacccgcctcctcagatcctcatcaaaaacacacctgtacctgcggatcctccaacggccttcaacaaggacaagctgaactctttcatcacccagtattctactggccaagtcagcgtggagatcgagtgggagctgcagaaggaaaacagcaagcgctggaacccggagatccagtacacttccaactattacaagtctaataatgttgaatttgctgttaatactgaaggtgtatatagtgaaccccgccccattggcaccagatacctgactcgtaatctgtaattgcttgttaatcaataaaccgtttaattcgtttcagttgaactgcggcc

SEQ ID NO: 586 - protein, 736 aa, Artificial Sequence
  Description of Artificial Sequence: Synthetic polypeptide
MTADGYLPDWLEDNLSEGIREWWALKPGAPQPKANQQHQDNARGLVLPGYKYLGPGNGLDKGEPVNAADAAALEHDKAYDQQLKAGDNPYLKYNHADAEFQERLKEDTSFGGNLGRAVFQAKKRLLEPLGLVEEAAKTAPGKKRPVEQSPQEPDSSAGIGKSGAQPAKKRLNFGQTGDTESVPDPQPIGEPPAAPSGVGSLTMASGGGAPVADNNEGADGVGSSSGNWHCDSQWLGDRVITTSTRTWALPTYNNHLYKQISNSTSGGSSNDNAYFGYSTPWGYFDFNRFHCHFSPRDWQRLINNNWGFRPKQLNFKLFNIQVKEVTDNNGVKTIANNLTSTVQVFTDSDYQLPYVLGSAHEGCLPPFPADVFMIPQYGYLTLNDGSQAVGRSSFYCLEYFPSQMLRTGNNFQFSYEFENVPFHSSYAHSQSLDRLMNPLIDQYLYYLSKTINGSGQNQQTLKFSVAGPSNMAVQGRNYIPGPSYRQQRVSTTVTQNNNSEFAWPGASSWALNGRNSLMNPGPAMASHKEGEDRFFPLSGSLIFGKQGTGRDNVDADKVMITNEEEIKTTNPVATESYGQVATNHQSAQAQAQTGWVQNQGILPGMVWQDRDVYLQGPIWAKIPHTDGNFHPSPLMGGFGMKHPPPQILIKNTPVPADPPTAFNKDKLNSFITQYSTGQVSVEIEWELQKENSKRWNPEIQYTSNYYKSNNVEFAVNTEGVYSEPRPIGTRYLTRNL

SEQ ID NO: 587 - protein, 736 aa, Artificial Sequence
  Description of Artificial Sequence: Synthetic polypeptide
MAADGYLPDWLEDNLSEGIREWWALKPGAPQPKANQQHQDNARGLVLPGYKYLGPGNGLDKGEPVNAADAAALEHDKAYDQQLKAGDNPYLKYNHADAEFQERLKEDTSFGGNLGRAVFQAKKRLLEPLGLVEEAAKTAPGKKRPVEQSPQEPDSSAGIGKSGAQPAKKRLNFGQTGDTESVPDPQPIGEPPAAPSGVGSLTMASGGGAPVADNNEGADGVGSSSGNWHCDSQWLGDRVITTSTRTWALPTYNNHLYKQISNSTSGGSSNDNAYFGYSTPWGYFDFNRFHCHFSPRDWQRLINNNWGFRPKRLNFKLFNIQVKEVTDNNGVKTIANNLTSTVQVFTDSDYQLPYVLGSAHEGCLPPFPADVFMIPQYGYLTLNDGSQAVGRSSFYCLEYFPSQMLRTGNNFQFSYEFENVPFHSSYAHSQSLDRLMNPLIDQYLYYLSKTINGSGQNQQTLKFSVAGPSNMAVQGRNYIPGPSYRQQRVSTTVTQNNNSEFAWPGASSWALNGRNSLMNPGPAMASHKEGEDRFFPLSGSLIFGKQGTGRDNVDADKVMITNEEEIKTTNPVATESYGQVATNHQSAQAQAQTGWVQNQGILPGMVWQDRDVYLQGPIWAKIPHTGGNFHPSPLMGGFGMKHPPPQILIKNTPVPADPPTAFNKDKLNSFITQYSTGQVSVEIEWELQKENSKRWNPEIQYTSNYYKSNNVEFAVNTGGVYSEPRPIGTRYLTRNL

SEQ ID NO: 588 - protein, 736 aa, Artificial Sequence
  Description of Artificial Sequence: Synthetic polypeptide
MAADGYLPDWLEDNLSEGIREWWALKPGAPQPKANQQHQDNARGLVLPGYKYLGPGNGLDKGEPVNAADAAALEHDKAYDQQLKAGDNPYLKYNHADAEFQERLKEDTSFGGNLGRAVFQAKKRLLEPLGLVEEAAKTAPGKKRPVEQSPQEPDSSAGIDKSGAQPAKKRLNFGQTGDTESVPDPQPIGEPPAAPSGVGSLTMASGGGAPVADNNEGADGVGSSSGNWHCDSQWLGDRVITTSTRTWALPTYNNHLYKQISNSTSGGSSNDNAYFGYSTPWGYFDFNRFHCHFSPRDWQRLINNNWGFRPKRLNFKLFNIQVKEVTDNNGVKTIANNLTSTVQVFTDSDYQLPYVLGSAHEGCLPPFPADVFMIPQYGYLTLNDGSQAVGRSSFYCLEYFPSQMLRTGNNFQFSYEFENVPFHSSYAHSQSLDRLMNPLIDQYLYYLSKTINGSGQNQQTLKFSVAGPSNMAVQGRNYIPGPSYRQQRVSTTVTQNNNSEFAWPGASSWALNGRNSLMNPGPAMASHKEGEDRFFPLSGSLIFGKQGTGRDNVDADKVMITNEEEIKTTNPVATESYGQVATNHQSAQAQAQTGWVQNQGILPGMVWQDRDVYLQGPIWAKIPHTDGNFHPSPLMGGFGMKHPPPQILIKNTPVPADPPTAFNKDKLNSFITQYSTGQVSVEIEWELQKENSKRWNPEIQYTSNYYKSNNVEFAVNTEGVYSEPRPIGTRYLTRNL

SEQ ID NO: 589 - protein, 736 aa, Artificial Sequence
  Description of Artificial Sequence: Synthetic polypeptide
MAADGYLPDWLEDNLSEGIREWWALKPGAPQPKANQQHQDNARGLVLPGYKYLGPGNGLDKGEPVNAADAAALEHDKAYDQQLKAGDNPYLKYNHADAEFQERLKEDTSFGGNLGRAVLQAKKRLLEPLGLVEEAAKTAPGKKRPVEQSPQEPDSSAGIGKSGAQPAKKRLNFGQTGDTESVPDPQPIGEPPAAPSGVGSLTMASGGGAPVADNNEGADGVGSSSGNWHCDSQWLGDRVITTSTRTWALPTYNNHLYKQISNSTSGGSSNDNAYFGYSTPWGYFDFNRFHCHFSPRDWQRLINNNWGFRPKRLNFKLFNIQVKEVTDNNGVKTIANNLTSTVQVFTDSDYQLPYVLGSAHEGCLPPFPADVFMIPQYGYLTLNDGSQAVGRSSFYCLEYFPSQMLRTGNNFQFSYEFENVPFHSSYAHSQSLDRLMNPLIDQYLYYLSKTINGSGQNQQTLKFSVAGSSNMAVQGRNYIPGPSYRQQRVSTTVTQNNNSEFAWPGASSWALNGRNSLMNPGPAMASHKEGEDRFFPLSGSLIFGKQGTGRDNVDADKVMITNEEEIKTTNPVATESYGQVATNHQSAQAQAQTGWVQNQGILPGMVWQDRDVYLQGPIWAKIPHTDGNFHPSPLMGGFGMKHPPPQILIKNTPVPADPPTAFNKDKLNSFITQYSTGQVSVEIEWELQKENSKRWNPEIQYTSNYYKSNNVEFAVNTEGVYSEPRPIGTRYLTRNL

SEQ ID NO: 590 - protein, 736 aa, Artificial Sequence
  Description of Artificial Sequence: Synthetic polypeptide
MAADGYLPDWLEDNLSEGIREWWALKPGAPQPKANQQHQDNARGLVLPGYKYLGPGNGLDKGEPVNAADAAALEHDRAYDQQLKAGDNPYLKYNHADAEFQERLKEDTSFGGNLGRAVFQAKKRLLEPLGLVEEAAKTAPGKKRPVEQSPQEPDSSAGIGKSGAQPAKKRLNFGQTGDTESVPDPQPIGEPPAAPSGVGSLTMASGGGAPVADNNEGADGVGSSSGNWHCDSQWLGDRVITTSTRTWALPTYNNHLYKQISNSTSGGSSNDNAYFGYSTPWGYFDFNRFHCHFSPRDWQRLINNNWGFRPKRLNFKLFNIQVKEVTDNNGVKTIANNLTSTVQVFTDSDYQLPYVLGSAHEGCLPPFPADVFMIPQYGYLTLNDGSQAVGRSSFYCLEYFPSQMLRTGNNFQFSYEFENVPFHSSYAHSQSLDRLMNPLIDQYLYYLSKTINGSGQNQQTLKFSVAGPSNMAVQGRNYIPGPSYRQQRVSTTVTQNNNSEFAWPGASSWALNGRNSLMNPGPAMASHKEGEDRFFPLSGSLIFGKQGTGRDNVDADKVMITNEEEIKTTNPVATESYGQVATNHQSAQAQAQTGWVQNQGILPGMVWQDRDVYLQGPIWAKIPHTDGNFHPSPLMGGFGMKHPPPQILIKNTPVPADPPTAFNKDKLNSFITQYSTGQVSVEIEWELQKKNSKRWNPEIQYTSNYYKSNNVEFAVNTEGVYSEPRPIGTRYLTRNL

SEQ ID NO: 591 - protein, 736 aa, Artificial Sequence
  Description of Artificial Sequence: Synthetic polypeptide
MAADGYLPDWLEDNLSEGIREWWALKPGAPQPKANQQHQDNARGLVLPGYKYLGPGNGLDKGEPVNAADAAALEHDKAYDQQLKAGDNPYLKYNHADAEFQERLKEDTSFGGNLGRAVFQAKKRLLEPLGLVEEAAKTAPGKKRPVEQSPQEPDSSAGIGKSGAQPAKKRLNFGQTGDTESVPDPQPIGEPPAAPSGVGSLTMASGGGAPVADNNEGADGVGSSSGNWHCDSQWLGDRVITTSTRTWALPTYNNHLYKQISNSTSGGSSNDNAYFGYSTPWGYFDFNRFHCHFSPRDWQRLINNNWGFRPKRLNFKLFNIQVKEVTDNNGVKTIANNLTSTVQVFTDSDYQLPYVLGSAHEGCLPPFPADVFMIPQYGYLTLNDGSQAVGRSSFYCLEYFPSQMLRTGNNFQFSYEFENVPFHSSYAHSQSLDRLMNPLIDQYLYYLSKTINGSGQNQQTLKFSVAGPSNMAVQGRNYIPGPSYRQQRVSTTVTQNNNSEFAWPGASSWALNGRNSLMNPGPAMASHKEGEDRFFPLSGSLIFGKQGTGRDNVDADKVMITNEEEIKTTNPVATESYGQVATNHQSAQARAQTGWVQNQGILPGMVWQDRDVYLQGPIWAKIPHTDGNFHPSPLMGGFGMKHPPPQILIKNTPVPADPPTAFNKDKLNSFITQYSTGQVSVEIEWELQKENSKRWNPEIQYTSNYYKSNNVEFAVNTEGVYSEPRPIGTRYLTRNL

SEQ ID NO: 592 - protein, 736 aa, Artificial Sequence
  Description of Artificial Sequence: Synthetic polypeptide
MAADGYLPDWLEDNLSEGIREWWALKPGAPQPKANQQHQDNARGLVLPGYKYLGPGNGLDKGEPVNAVDAAALEHDKAYDQQLKAGDNPYLKYNHADAEFQERLKEDTSFGGNLGRAVFQAKKRLLEPLGLVEEAAKTAPGKKRPVEQSPQEPDSSAGIGKSGAQPAKKRLNFGQTGDTESVPDPQPIGEPPAAPSGVGSLTMASGGGAPVADNNEGADGVGSSSGNWHCDSQWLGDRVITTSTRTWALPTYNNHLYKQISNSTSGGSSNDNAYFGYSTPWGYFDFNRFHCHFSPRDWQRLINNNWGFRPKRLNFKLFNIQVKEVTDNNGVKTIANNLTSTVQVFTDSDYQLPYVLGSAHEGCLPPFPADVFMIPQYGYLTLNDGSQAVGRSSFYCLEYFPSQMLRTGNNFQFSYEFENVPFHSSYAHSQSLDRLMNPLIDQYLYYLSKTINGSGQNQQTLKFSVAGPSNMAVQGRNYIPGPSYRQQRVSTTVTQNNNSEFAWPGASSWALNGRNSLMNPGPAMASHKEGEDRFFPLSGSLIFGKQGTGRDNVDADKVMITNEEEIKTTNPVATESYGQVATNHQSAQAQAQTGWVQNQGILPGMVWQDRDVYLQGPIWAKIPHTDGNFHPSPLMGGFGMKHPPPQILIKNTPVPADPPTAFNKDKLNSFITQYSTGQVSVEIEWELQKENSKRWNPEIQYTSNYYKSNNVEFAVNTEGVYSEPRPIGTRYLTRNL

SEQ ID NO: 593 - protein, 736 aa, Artificial Sequence
  Description of Artificial Sequence: Synthetic polypeptide
MAADGYLPDWLEDNLSEGIREWWALKPGAPQPKANQQHQDNARGLVLPGYKYLGPGNGLDKGEPVNAADAAALEHDKAYDQQLKAGDNPYLKYNHADAEFQERLKEDTSFGGNLGRAVFQAKKRLLEPLGLVEEAAKTAPGKKRPVEQSPREPDSSAGIGKSGAQPAKKRLNFGQTGDTESVPDPQPIGEPPAAPSGVGSLTMASGGGAPVADNNEGADGVGSSSGNWHCDSQWLGDRVITTSTRTWALPTYNNHLYKQISNSTSGGSSNDNAYFGYSTPWGYFDFNRFHCHFSPRDWQRLINNNWGFRPKRLNFKLFNIQVKEVTDNNGVKTIANNLTSTVQVFTDSDYQLPYVLGSAHEGCLPPFPADVFMIPQYGYLTLNDGSQAVGRSSFYCLEYFPSQMLRTGNNFQFSYEFENVPFHSSYAHSQSLDRLMNPLIDQYLYYLSKTINGSGQNQQTLKFSVAGPSNMAVQGRNYIPGPSYRQQRVSTTVTQNNNSEFAWPGASSWALNGRNSLMNPGPAMASHKEGEDRFFPLSGSLIFGKQGTGRDNVDADKVMITNEEEIKTTNPVATESYGQVATNHQSAQAQAQTGWVQNQGILPGMVWQDRDVYLQGPIWAKIPHTDGNFHPSPLMGGFGMKHPPPQILIKNTPVPADPPTAFNKDKLNSFITQYSTGQVSVEIEWELQKENSKRWNPEIQYTSNYYKSNNVEFAVNTEGVYSEPRPIGTRYLTRNL

SEQ ID NO: 594 - protein, 736 aa, Artificial Sequence
  Description of Artificial Sequence: Synthetic polypeptide
MAADGYLPDWLEDNLSEGIREWWALKPGAPQPKANQQHQDNARGLVLPGYKYLGPGNGLDKGEPVNAADAAALEHDKAYDQQLKAGDNPYLKYNHADAEFQERLKEDTSFGGNLGRAVFQAKKRLLEPLGLVEEAAKTAPGKKRPVEQSPQEPDSSAGIGKSGAQPAKKRLNFGQTGDTESVPDPQPIGEPPAAPSGVGSLTMASCGGAPVADNNEGADGVGSSSGNWHCDSQWLGDRVITTSTRTWALPTYNNHLYKQISNSTSGGSSNDNAYFGYSTPWGYFDFNRFHCHFSPRDWQRLINNNWGFRPKRLNFKLFNIQVKEVTDNNGVKTIANNLTSTVQVFTDSDYQLPYVLGSAHEGCLPPFPADVFMIPQYGYLTLNDGSQAVGRSSFYCLEYFPSQMLRTGNNFQFSYEFENVPFHSSYAHSQSLDRLMNPLIDQYLYYLSKTINGSGQNQQTLKFSVAGPSNMAVQGRNYIPGPSYRQQRVSTTVTQNNNSEFAWPGASSWALNGRNSLMNPGPAMASHKEGEDRFFPLSGSLIFGKQGTGRDNVDADKVMITNEEEIKTTNPVATESYGQVATNHQSAQAQAQTGWVQNQGILPGMVWQDRDVYLQGPIWAKIPHTDGNFHPSPLMGGFGMKHPPPQILIKNTPVPADPPTAFNKDKLNSFITQYSTGQVSVEIEWELQKENSKRWNPEIQYTSNYYKSNNVEFAVNTEGVYSEPRPIGTRYLTRNL

SEQ ID NO: 595 - protein, 736 aa, Artificial Sequence
  Description of Artificial Sequence: Synthetic polypeptide
MAADGYLPDWLEDNLSEGIREWWALKPGAPQPKANQQHQDNARGLVLPGYKYLGPGNGLDKGEPINAADAAALEHDKAYDQQLKAGDNPYLKYNHADAEFQERLKEDTSFGGNLGRAVFQAKKRLLEPLGLVEEAAKTAPGKKRPVEQSPQEPDSSAGIGKSGAQPAKKRLNFGQTGDTESVPDPQPIGEPPAAPSGVGSLTMASGGGAPVADNNEGADGVGSSSGNWHCDSQWLGDRVITTSTRTWALPTYNNHLYKQISNSTSGGSSNDNAYFGYSTPWGYFDFNRFHCHFSPRDWQRLINNNWGFRPKRLNFKLFNIQVKEVTDNNGVKTIANNLTSTVQVFTDSDYQLPYVLGSAHEGCLPPFPADVFMIPQYGYLTLNDGSQAVGRSSFYCLEYFPSQMLRTGNNFQFSYEFENVPFHSSYAHSQSLDRLMNPLIDQYLYYLSKTINGSGQNQQTLKFSVAGPSNMAVQGRNYIPGPSYRQQRVSTTVTQNNNSEFAWPGASSWALNGRNSLMNPGPAMASHKEGEDRFFPLSGSLIFGKQGTGRDNVDADKVMITNEEEIKTTNPVATESYGQVATNHQSAQAQAQTGWVQNQGILPGMVWQDRDVYLQGPIWAKIPHTYGNFHPSPLMGGFGMKHPPPQILIKNTPVPADPPTAFNKDKLNSFITQYSTGQVSVEIEWELQKENSKRWNPEIQYTSNYYKSNNVEFAVNTEGVYSEPRPIGTRYLTRNL

SEQ ID NO: 596 - protein, 736 aa, Artificial Sequence
  Description of Artificial Sequence: Synthetic polypeptide
MAADGYLPDWLEDNLSEGIREWWALKPGAPQPKANQQHQDNARGLVLPGYKYLGPGNGLDKGEPVNAADAAALEHDKAYDQQLKAGDNPYLKYNHADAEFQERLKEDTSFGGNLGRAVFQAKKRLLEPLGLVEEAAKTAPGKKRPVEQSPQEPDSSAGIGKSGAQPAKKRLNFGQTGDTESVPDPQPIGEPPAAPSGVGSLTMASGGGAPVADNNEGADGVGSSSGNWHCDSQWLGDRVITTSTRTWALPTYNNHLYKQISNSTSGGSSNDNAYFGYSTPWGYFDFNRFHCHFSPHDWQRLINNNWGFRPKRLNFKLFNIQVKEVTDNNGVKTIANNLTSTVQVFTDSDYQLPYVLGSAHEGCLPPFPADVFMIPQYGYLTLNDGSQAVGRSSFYCLEYFPSQMLRTGNNFQFSYEFENVPFHSSYAHSQSLDRLMNPLIDQYLYYLSKTINGSGQNQQTLKFNVAGPSNMAVQGRNYIPGPSYRQQRVSTTVTQNNNSEFAWPRASSWALNGRNSLMNPGPAMASHKEGEDRFFPLSGSLIFGKQGTGRDNVDADKVMITNEEEIKTTNPVATESYGQVATNHQSAQAQAQTGWVQNQGILPGMVWQDRDVYLQGPIWAKIPHTDGNFHPSPLMGGFGMKHPPPQILIKNTPVPADPPTAFNKDKLNSFITQYSTGQVSMEIEWELQKENSKRWNPEIQYTSNYYKSNNVEFAVNTEGVYSEPRPIGTRYLTRNL

SEQ ID NO: 597 - protein, 736 aa, Artificial Sequence
  Description of Artificial Sequence: Synthetic polypeptide
MAADGYLPDWLEDNLSEGIREWWALKPGAPQPKANQQHQDNARGLVLPGYKYLGPGNGLDKGEPVNAADAAALEHDKAYDQQLKAGDNPYLKYNHADAEFQERLKEDTSFGGNLGRAVFQAKKRLLEPLGLVEEAAKTAPGKKRPVEQSPQEPDSSAGIGKSGAQPAKKRLNFGQTGDTESVPDPQPIGEPPAAPSGVGSLTMASGGGAPVADNNEGADGVGSSSGNWHCDSQWLGDRVITTSTRTWALPTYNNHLYKQISNSTSGGSSNDNAYFGYSTPWGYFDFNRFHCHFSPRDWQRLINNNWGFRPKRLNFKLFNIQVKEVTDNNGVKTIANNLTSTVQVFTDSDYQLPYVLGSAHEGCLPPFPADVFMIPQYGYLTLNDGSQAVGRSSFYCLEYFPSQMLRTGNNFQFSYEFENVPFHSSYAHSQSLDRLMNPLIDQYLYYLSKTINGSGQNQQTLKFSVAGPSNMAVQGRNYIPGPSYRQQRVSTTVTQNNNSEFAWPRASSWALNGRNSLMNPGPAMASHKEGEDRFFPLSGSLIFGKQGTGRDNVDADKVMITNEEEIKTTNPVATESYGQVATNHQSAQAQAQTGWVQNQGILPGMVWQDRDVYLQGPIWAKIPHTDGNFHPSPLMGGFGMKHPPPQILIKNTPVPADPPTAFNKDKLNSFITQYSTGQVSVEIEWELQKENSKRWNPEIQYTSNYYKSNNVEFAVNTEGVYSEPRPIGTRYLTRNL

SEQ ID NO: 598 - protein, 736 aa, Artificial Sequence
  Description of Artificial Sequence: Synthetic polypeptide
MAADGYLPDWLEDNLSEGIREWWALKPGAPQPKANQQHQDNARGLVLPGYKYLGPGNGLDKGEPVNAADAAALEHDKAYDQQLKAGDNPYLKYNHADAEFQERLKEDTSFGGNLGRAVFQAKKRLLEPLGLVEEAAKTAPGKKRPVEQSPQEPDSSAGIGKSGAQPAKKRLNFGQTGDTESVPDPQPIGEPPAAPSGVGSLTMASGGGAPVADNNEGADGVGSSSGNWHCDSQWLGDRVITTSTRTWALPTYNNHLYKQISNSTSGGSSNDNAYFGYSTPWGYFDFNRFHCHFSPRDWQRLINNNWGFRPKRLNFKLFNIQVKEVTDNNGVKTIANNLTSTVQVFTDSDYQLPYVLGSAHEGCLPPFPADVFMIPQYGYLTLNDGSQAVGRSSFYCLEYFPSQMLRTGNNFQFSYEFENVPFHSSYAHSQSLDRLMNPLIDQYLYYLSKTINGSGQNQQTLKFSVAGPSNMAVQGRNYIPGPSYRQQRVSTTVTQNNNSEFAWPRASSWALNGRNSLMNPGPAMASHKEGEDRFFPLSGSLIFGKQGTGRDNVDADKVMITNEEEIKTTNPVATESYGQVATNHQSAQAQAQTGWVQNQGILPGMVWQDRDVYLQGPIWAKIPHTDGNFHPSPLMGGFGMKHPPPQILIKNTPVPADPPTAFNKDKLNSFITQYSTGQVSVEIEWERQKENSKRWNPEIQYTSNYYKSNNVEFAVNTEGVYSEPRPIGTRYLTRNL

SEQ ID NO: 599 - protein, 736 aa, Artificial Sequence
  Description of Artificial Sequence: Synthetic polypeptide
MAADGYLPDWLEDNLSEGIREWWALKPGAPQPKANQQHQDNARGLVLPGYKYLGPGNGLDKGEPVNAADAAALEHDKAYDQQLKAGDNPYLKYNHADAEFQERLKEDTSFGGNLGRAVFQAKKRLLEPLGLVEEAAKTAPGKKRPVEQSPQEPDSSAGIGKSGAQPAKKRLNFGQTGDTESVPDPQPIGEPPAAPSGVGSLTMASGGGAPVADNNEGADGVGSSSGNWHCDSQWLGDRVITTSTRTWALPTYNNHLYKQISNSTSGGSSNDNAYFGYSTPWGYFDFNRFHCHFSPRDWQRLINNNWGFRPKRLNFKLFNIQVKEVTDNNGVKTIANNLTSTVQVFADSDYQLPYVLGSAHEGCLPPFPADVFMIPQYGYLTLNDGSQAVGRSSFYCLEYFPSQMLRTGNNFQFSYEFENVPFHSSYAHSQSLDRLMNPLIDQYLYYLSKTINGSGQNQQTLKFSVAGPSNMAVQGRNYIPGPSYRQQRVSTTVTQNNNSEFAWPRASSWALNGRNSLMNPGPAMASHKEGEDRFFPLSGSLIFGKQGTGRDNVDADKVMITNEEEIKTTNPVATESYGQVATNHQSAQAQAQTGWVQNQGILPGMVWQDRDVYLQGPIWAKIPHTDGNFHPSPLMGGFGMKHPPPQILIKNTPVPADPPTAFNKDKLNSFITQYSTGQVSVEIEWELQKENSKRWNPEIQYTSNYYKSNNVEFAVNTEGVYSEPRPIGTRYLTRNL

SEQ ID NO: 600 - protein, 736 aa, Artificial Sequence
  Description of Artificial Sequence: Synthetic polypeptide
MAADGYLPDWLEDNLSEGIREWWALKPGAPQPKANQQHQDNARGLVLPGYKYLGPGNGLDKGEPVNAADAAALEHDKAYDQQLKAGDNPYLKYNHADAEFQERLKEDTSFGGNLGRAVFQAKKRLLEPLGLVEEAAKTAPGKKRPVEQSPQEPDSSAGIGKSGAQPAKKRLNFGQTGDTESVPDPQPIGEPPAAPSGVGSLTMASGGGAPVADNNEGADGVGSSSGNWHCDSQWLGDRVITTSTRTWALPTYNNHLYKQISNSTSGGSSNDNAYFGYSTPWGYFDFNRFHCHFSPRDWQRLINNNWGFRPKRLNFKLFNIQVKEVTDNNGVKTIANNLTSTVQVFTDSDYQLPYVLGSAHEGCLPPFPADVFMIPQYGYLTLNDGSQAVGRSSFYCLEYFPSQMLRTGNNFQFSYEFENVPFHSSYAHSQSLDRLMNPLIDQYLYYLSKTINGSGQNQQTLKFSVAGPSNMAVQGRNYIPGPSYRQQRVSTTVTQNNNSEIAWPRASSWALNGRNSLMNPGPAMASHKEGEDRFFPLSGSLIFGKQGTGRDNVDADKVMITNEEEIKTTNPVATESYGQVATNHQSAQAQAQTGWVQNQGILPGMVWQDRDVYLQGPIWAKIPHTDGNFHPSPLMGGFGMKHPPPQILIKNTPVPADPPTAFNKDKLNSFITQYSTGQVSVEIEWELQKENSKRWNPEIQYTSNYCKSNNVEFAVNTEGVYSEPRPIGTRYLTRNL

SEQ ID NO: 601 - protein, 736 aa, Artificial Sequence; identical to SEQ ID NO: 597
  Description of Artificial Sequence: Synthetic polypeptide

SEQ ID NO: 602 - DNA, 2208 bp, Artificial Sequence
  Description of Artificial Sequence: Synthetic polynucleotide
atggctgccgatggttatcttccagattggctcgaggacaaccttagtgaaggaattcgcgagtggtgggctttgaaacctggagcccctcaacccaaggcaaatcaacaacatcaagacaacgctcgaggtcttgtgcttccgggttacaaataccttggacccggcaacggactcgacaagggggagccggtcaacgcagcagacgcggcggccctcgagcacgacaaggcctacgaccagcagctcaaggccggagacaacccgtacctcaagtacaaccacgccgacgccgagttccaggagcggctcaaagaagatacgtcttttgggggcaacctcgggcgagcagtcttccaggccaaaaagaggcttcttgaacctcttggtctggttgaggaagcggctaagacggctcctggaaagaagaggcctgtagagcagtctcctcaggaaccggactcctccgcgggtattggcaaatcgggtgcacagcccgctaaaaagagactcaatttcggtcagactggcgacacagagtcagtcccagaccctcaaccaatcggagaacctcccgcagccccctcaggtgtgggatctcttacaatggcttcaggtggtggcgcaccagtggcagacaataacgaaggtgccgatggagtgggtagttcctcgggaaattggcattgcgattcccaatggctgggggacagagtcatcaccaccagcacccgaacctgggccctgcccacctacaacaatcacctctacaagcaaatctccaacagcacatctggaggatcttcaaatgacaacgcctacttcggctacagcaccccctgggggtattttgacttcaacagattccactgccacttctcaccacgtgactggcagcgactcatcaacaacaactggggattccggcctaagcgactcaacttcaagctcttcaacattcaggtcaaagaggttacggacaacaatggagtcaagaccatcgccaataaccttaccagcacggtccaggtcttcacggactcagactatcagctcccgtacgtgctcgggtcggctcacgagggctgcctcccgccgttcccagcggacgttttcatgattcctcagtacgggtatctgacgcttaatgatggaagccaggccgtgggtcgttcgtccttttactgcctggaatatttcccgtcgcaaatgctaagaacgggtaacaacttccagttcggctacgagtttgagaacgtacctttccatagcagctacgctcacagccaaagcctggaccgactaatgaatccactcatcgaccaatacttgtactatctctcaaagactattaacggttctggacagaatcaacaaacgctaaaattcagtgtggccggacccagcaacatggctgtccagggaagaaactacatacctggacccagctaccgacaacaacgtgtctcaaccactgtgactcaaaacaacaacagcgaatttgcttggcctggagcttcttcttgggctctcaatggacgtaatagcttgatgaatcctggacctgctatggccagccacaaagaaggagaggaccgtttctttcctttgtctggatctttaatttttggcaaacaaggaactggaagagacaacgtggatgcggacaaagtcatgataaccaacgaagaagaaattaaaactactaacccggtagcaacggagtcctatggacaagtggccacaaaccaccagagtgcccaagcacaggcgcagaccggctgggttcaaaaccaaggaatacttccgggtatggtttggcaggacagagatgtgtacctgcaaggacccatttgggccaaaattcctcacacggacggcaactttcacccttctccgctgatgggagggtttggaatgaagcacccgcctcctcagatcctcatcaaaaacacacctgtacctgcggatcctccaacggccttcaacaaggacaagctgaactctttcatcacccagtattctactggccaagtcagcgtggagatcgagtgggagctgcagaaggaaaacagcaagcgctgggacccggagatccagtacacttccaactattacaagtctaataatgttgaatttgctgttaatactgaaggtgtatatagtgaaccccgccccattggcaccagatacctgactcgtaatctg

SEQ ID NO: 603 - DNA, 2208 bp, Artificial Sequence
  Description of Artificial Sequence: Synthetic polynucleotide
atggctgccgatggttatcttccagattggctcgaggacaaccttagtgaaggaattcgcgagtggtgggctttgaaacctggagcccctcaacccaaggcaaatcaacaacatcaagacaacgctcgaggtcttgtgcttccgggttacaaataccttggacccggcaacggactcgacaagggggagccggtcaacgcagcagacgcggcggccctcgagcacgacaaggcctacgaccagcagctcaaggccggagacaacccgtacctcaagtacaaccacgccgacgccgagttccaggagcggctcaaagaagatacgtcttttgggggcaacctcgggcgagcagtcttccaggccaaaaagaggcttcttgaacctcttggtctggttgaggaagcggctaagacggctcctggaaagaagaggcctgtagagcagtctcctcaggaaccggactcctccgcgggtattggcaaatcgggtgcacagcccgctaaaaagagactcaatttcggtcagactggcgacacagagtcagtcccagaccctcaaccaatcggagaacctcccgcagccccctcaggtgtgggatctcttacaatggcttcaggtggtggcgcaccagtggcagacaataacgaaggtgccgatggagtgggtagttcctcgggaaattggcattgcgattcccaatggctgggggacagagtcatcaccaccagcacccgaacctgggccctgcccacctacaacaatcacctctacaagcaaatctccaacagcacatctggaggatcttcaaatgacaacgcctacttcggctacagcaccccctgggggtattttgacttcaacagattccactgccgcttctcaccacgtgactggcagcgactcatcaacaacaactggggattccggcctaagcgactcaacttcaagctcttcaacattcaggtcaaagaggttacggacaacaatggagtcaagaccatcgccaataaccttaccagcacggtccaggtcttcacggactcagactatcagctcccgtacgtgctcgggtcggctcacgagggctgcctcccgccgttcccagcggacgttttcatgattcctcagtacgggtatctgacgcttaatgatggaagccaggccgtgggtcgttcgtccttttactgcctggaatatttcccgtcgcaaatgctaagaacgggtaacaacttccagttcagctacgagtttgagaacgtacctttccatagcagctacgctcacagccaaagcctggaccgactaatgaatccactcatcgaccaatacttgtactatctctcaaagactattaacggttctggacagaatcaacaaacgctaaaattcagtgtggccggacccagcaacatggctgtccagggaagaaactacatacctggacccagctaccgacaacaacgtgtctcaaccactgtgactcaaaacaacaacagcgaatttgcttggcctggagcttcttcttgggctctcaatggacgtaatagcttgatgaatcctggacctgctatggccagccacaaagaaggagaggaccgtttctttcctttgtctggatctttaatttttggcaaacaaggaactggaagagacaacgtggatgcggacaaagtcatgataaccaacgaagaagaaattaaaactactaacccggtagcaacggagtcctatggacaagtggccacaaaccaccagagtgcccaagcacaggcgcagaccggctgggttcaaaaccaaggaatacttccgggtatggtttggcaggacagagatgtgtacctgcaaggacccatttgggccaaaattcctcacacggacggcaactttcacccttctccgctgatgggagggtttggaatgaagcacccgcctcctcagatcctcatcaaaaacgcccctgtacctgcggatcctccaacggccttcaacaaggacaagctgaactctttcatcacccagtattctactggccaagtcagcgtggagatcgagtgggagctgcagaaggaaaacagcaagcgctggaacccggagatccagtacacttccaactattacaagtctaataatgttgaatttgctgttaatactgaaggtgtatatagtgaaccccgccccattggcaccagatacctgactcgtaatctg

SEQ ID NO: 604 - DNA, 2208 bp, Artificial Sequence
  Description of Artificial Sequence: Synthetic polynucleotide
atggctgccgatggttatcttccagattggctcgaggacaaccttagtgaaggaattcgcgagtggtgggctttgaaacctggagcccctcaacccaaggcaaatcaacaacatcaagacaacgctcgaggtcttgtgcttccgggttacaaataccttggacccggcaacggactcgacaagggggagccggtcagcgcagcagacgcggcggccctcgagcacgacaaggcctacgaccagcagctcaaggccggagacaacccgtacctcaagtacaaccacgccgacgccgagttccaggagcggctcaaagaagatacgtcttttgggggcaacctcgggcgagcagtcttccaggccaaaaagaggcttcttgaacctcttggtctggttgaggaagcggctaagacggctcctggaaagaagaggcctgtagagcagtctcctcaggaaccggactcctccgcgggtattggcaaatcgggtgcacagcccgctaaaaagagactcaatttcggtcagactggcgacacagagtcagtcccagaccctcaaccaatcggagaacctcccgcagccccctcaggtgtgggatctcttacaatggcttcaggtggtggcgcaccagtggcagacaataacgaaggtgccgatggagtgggtagttcctcgggaaattggcattgcgattcccaatggctgggggacagagtcatcaccaccagcacccgaacctgggccctgcccacctacaacaatcacctctacaagcaaatctccaacagcacatctggaggatcttcaaatgacaacgcctacttcggctacagcaccccctgggggtattttgacttcaacagattccactgccacttctcaccgcgtgactggcagcgactcatcaacaacaactggggattccggcctaagcgactcaacttcaagctcttcaacattcaggtcaaagaggttacggacaacaatggagtcaagaccatcgccaataaccttaccagcacggtccaggtcttcacggactcagactatcagctcccgtacgtgctcgggtcggctcacgagggctgcctcccgccgttcccagcggacgttttcatgattcctcagtacgggtatctgacgcttaatgatggaagccaggccgtgggtcgttcgtccttttactgcctggaatatttcccgtcgcaaatgctaagaacgggtaacaacttccagttcagctacgagtttgagaacgtacctttccatagcagctacgctcacagccaaagcctggaccgactaatgaatccactcatcgaccaatacttgtactatctctcaaagactattaacggttctggacagaatcaacaaacgctaaaattcagtgtggccggacccagcaacatggctgtccagggaagaaactacatacctggacccagctaccgacaacaacgtgtctcaaccactgtgactcaaaacaacaacagcgaatttgcttggcctggagcttcttcttgggctctcaatggacgtaatagcttgatgaatcctggacctgctatggccagccacaaagaaggagaggaccgtttctttcctttgtctggatctttaatttttggcaaacaaggaactggaagagacaacgtggatgcggacaaagtcatgataaccaacgaagaagaaattaaaactactaacccggtagcaacggagtcctatggacaagtggccacaaaccaccagagtgcccaagcacaggcgcagaccggctgggttcaaaaccaaggaatacttccgggtatggtttggcaggacagagatgtgtacctgcaaggacccatttgggccaaaattcctcacacggacggcaactttcacccttctccgctgatgggagggtttggaatgaagcacccgcctcctcagatcctcatcaaaaacacacctgtacctgcggatcctccaacggccttcaacaaggacaagctgaactctttcatcacccagtattctactggccaagtcagcgtggagatcgagtgggagctgcagaaggaaaacagcaagcgctggaacccggagatccagtacacttccaactattacaagtctaataatgttgaatttgctgttaatactgaaggtgtatatagtgaaccccgccccattggcaccagatacctgactcgtaatctg

SEQ ID NO: 605 - DNA, 2208 bp, Artificial Sequence
  Description of Artificial Sequence: Synthetic polynucleotide
atggctgccgatggttatcttccagattggctcgaggacaaccttagtgaaggaattcgcgagtggtgggctttgaaacctggagcccctcaacccaaggcaaatcaacaacatcaagacaacgctcgaggtcttgtgcttccgggttacaaataccttggacccggcaacggactcgacaagggggagccggtcaacgcagcagacgcggcggccctcgagcacgacaaggcctacgaccagcagctcaaggccggagacaacccgtacctcaagtacaaccacgccgacgccgagttccaggagcggctcaaagaagatacgtcttttgggggcaacctcgggcgagcagtcttccaggccaaaaagaggcttcttgaacctcttggtctggttgaggaagcggctaagacggctcctggaaagaagaggcctgtagagcagtctcctcaggaaccggactcctccgcgggtattggcaaatcgggtgcacagcccgctaaaaagagactcaatttcggtcagactggcgacacagagtcagtcccagaccctcaaccaatcggagaacctcccgcagccccctcaggtgtgggatctcttacaatggcttcaggtggtggcgcaccagtggcagacaataacgaaggtgccgatggagtgggtagttcctcgggaaattggcattgcgattcccaatggctgggggacagagtcatcaccaccagcacccgaacctgggccctgcccacctacaacaatcacctctacaagcaaatctccaacagcacatctggaggatcttcaaatgacaacgcctacttcggctacagcaccccctgggggtattttgacttcaacagattccactgccacttctcaccacgtgactggcagcgactcatcaacaacaactggggattccggcctaagcgactcaacttcaagctcttcaacattcaggtcaaagaggttacggacaacaatggagtcaagaccatcgccaataaccttaccagcacggtccaggtcttcacggactcagactatcagctcccgtacgtgctcgggtcggctcacgagggctgcctcccgccgttcccagcggacgttttcatgattcctcagtacgggtatctgacgcttaatgatggaagccaggccgtgggtcgttcgtccttttactgcctggaatatttcccgtcgcaaatgctaagaacgggtaacaacttccagttcagctacgagtttgagaacgtacctttccatagcagctacgctcacagccaaagcctggaccgactaatgaatccactcatcgaccaatacttgtactatctctcaaagactattaacggttctggacagaatcaacaaacgctaaaattcagtgtggccggacccagcaacacggctgtccagggaagaaactacatacctggacccagctaccgacaacaacgtgtctcaaccactgtgactcaaaacaacaacagcgaatttgcttggcctggagcttcttcttgggctctcaatggacgtaatagcttgatgaatcctggacctgctatggccagccacaaagaaggagaggaccgtttctttcctttgtctggatctttaatttttggcaaacaaggaactggaagagacaacgtggatgcggacaaagtcatgataaccaacgaagaagaaattaaaactactaacccggtagcaacggagtcctatggacaagtggccacaaaccaccagagtgcccaagcacaggcgcagaccggctgggttcaaaaccaaggaatacttccgggtatggtttggcaggacagagatgtgtacctgcaaggacccatttgggccaaaattcctcacacggacggcaactttcacccttctccgctgatgggagggtttggaatgaagcacccgcctcctcagatcctcatcaaaaacacacctgtacctgcggatcctccaacggccttcaacaaggacaagctgaactctttcatcacccagtattctactggccaagtcagcgtggagatcgagtgggagctgcagaaggaaaacagcaagcgctggaacccggagatccagtacacttccaactattacaagtctaataatgttgaatttgctgttaatactgaaggtgtatatagtgaaccccgccccattggcaccagatacctgactcgtaatctg

SEQ ID NO: 606 - DNA, 2208 bp, Artificial Sequence
  Description of Artificial Sequence: Synthetic polynucleotide
atggctgccgatggttatcttccagattggctcgaggacaaccttagtgaaggaattcgcgagtggtgggctttgaaacctggagcccctcaacccaaggcaaatcaacaacatcaagacaacgctcgaggtcttgtgcttccgggttacaaataccttggacccggcaacggactcgacaagggggagccggtcaacgcagcagacgcggcggccctcgagcacgacaaggcctacgaccagcagctcaaggccggagacaacccgtacctcaagtacaaccacgccgacgccgagttccaggagcggctcaaagaagatacgtcttttgggggcaacctcgggcgagcagtcttccaggccaaaaagaggcttcttgaacctcttggtctggttgaggaagcggctaagacggctcctggaaagaagaggcctgtagagcagtctcctcaggaaccggactcctccgcgggtattggcaaatcgggtgcacagcccgctaaaaagagactcaatttcggtcagactggcgacacagagtcagtcccagaccctcaaccaatcggagaacctcccgcagccccctcaggtgtgggatctcttacaatggcttcaggtggtggcgcaccagtggcagacaataacgaaggtgccgatggagtgggtagttcctcgggaaattggcattgcgattcccaatggctgggggacagagtcatcaccaccagcacccgaacctgggccctgcccacctacaacaatcacctctacaagcaaatctccaacagcacatctggaggatcttcaaatgacaacgcctacttcggctacagcaccccctgggggtattttgacttcaacagattccactgccacttctcaccacgtgactggcagcgactcatcaacaacaactggggattccggcctaagcggctcaacttcaagctcttcaacattcaggtcaaagaggttacggacaacaatggagtcaagaccatcgccaataaccttaccagcacggtccaggtcttcacggactcagactatcagctcccgtacgtgctcgggtcggctcacgagggctgcctcccgccgttcccagcggacgttttcatgattcctcagtacgggtatctgacgcttaatgatggaagccaggccgtgggtcgttcgtccttttactgcctggaatatttcccgtcgcaaatgctaagaacgggtagcaacttccagttcagctacgagtttgagaacgtacctttccatagcagctacgctcacagccaaagcctggaccgactaatgaatccactcatcgaccaatacttgtactatctctcaaagactattaacggttctggacagaatcaacaaacgctaaaattcagtgtggccggacccagcaacatggctgtccagggaagaaactacatacctggacccagctaccgacaacaacgtgtctcaaccactgtgactcaaaacaacaacagcgaatttgcttggcctggagcttcttcttgggctctcaatggacgtaatagcttgatgaatcctggacctgctatggccagccacaaagaaggagaggaccgtttctttcctttgtctggatctttaatttttggcaaacaaggaactggaagagacaacgtggatgcggacaaagtcatgataaccaacgaagaagaaattaaaactactaacccggcagcaacggagtcctatggacaagtggccacaaaccaccagagtgcccaagcacaggcgcagaccggctgggttcaaaaccaaggaatacttccgggtatggtttggcaggacagagatgtgtacctgcaaggacccatttgggccaaaattcctcacacggacggcaactttcacccttctccgctgatgggagggtttggaatgaagcacccgcctcctcagatcctcatcaaaaacacacctgtacctgcggatcctccaacggccttcaacaaggacaagctgaactctttcatcacccagtattctactggccaagtcagcgtggagatcgagtgggagctgcagaaggaaaacagcaagcgctggaacccggagatccagcacacttccaactattacaagtctaataatgttgaatttgctgttaatactgaaggtgtatatagtgaaccccgccccattggcaccagatacctgactcgtaatctg

SEQ ID NO: 607 - DNA, 2208 bp, Artificial Sequence
  Description of Artificial Sequence: Synthetic polynucleotide
atggctgccgatggttatcttccagattggctcgaggacaaccttagtgaaggaattcgcgagtggtgggctttgaaacctggagcccctcaacccaaggcaaatcaacaacatcaagacaacgctcgaggtcttgtgcttccgggttacaaataccttggacccggcaacggactcgacaagggggagccggtcaacgcagcagacgcggcggccctcgagcacgacaaggcctacgaccagcagctcaaggccggagacaacccgtacctcaagtacaaccacgccgacgccgagttccaggagcggctcaaagaagatacgtcttttgggggcaacctcgggcgagcagtcttccaggccaaaaagaggcttcttgaacctcttggtctggttgaggaagcggctaagacggctcctggaaagaagaggcctgtagagcagtctcctcaggaaccggactcctccgcgggtattggcaaatcgggtgcacagcccgctaaaaagagactcaatttcggtcagactggcgacacagagtcagtcccagaccctcaaccaatcggagaacctcccgcagccccctcaggtgtgggatctcttacaatggcttcaggtggtggcgcaccagtggcagacaataacgaaggtgccgatggagtgggtagttcctcgggaaattggcattgcgattcccaatggctgggggacagagtcatcaccaccagcacccgaacctgggccctgcccacctacaacaatcacctctacaagcaaatctccaacagcacatctggaggatcttcaaatgacaacgcctacttcggctacagcaccccctgggggtattttgacttcaacagattccactgccacttctcaccacgtgactggcagcgactcatcaacaacaactggggattccggcctaagcgactcaacttcaggctcttcaacattcaggtcaaagaggttacggacaacaatggagtcaagaccatcgccaataaccttaccagcacggtccaggtcttcacggactcagactatcagctcccgtacgtgctcgggtcggctcacgagggctgcctcccgccgttcccagcggacgttttcatgattcctcagtacgggtatctgacgcttaatgatggaagccaggccgtgggtcgttcgtccttttactgcctggaatatttcccgtcgcaaatgctaagaacgggtaacaacttccagttcagctacgagtttgagaacgtacctttccatagcagctacgctcacagccaaagcctggaccgactaatgaatccactcatcgaccaatacttgtactatctctcaaagactattaacggttctggacagaatcaacaaacgctaaaattcagtgtggccggacccagcaacatggctgtccagggaagaaactacatacctggacccagctaccgacaacaacgtgtctcaaccactgtgactcaaaacaacaacagcgaatttgcttggcctggagcttcttcttgggctctcaatggacgtaatagcttgatgaatcctggacctgctatggccagccacaaagaaggagaggaccgtttctttcctttgtctggatctttaatttttggcaaacaaggaactggaagagacaacgtggatgcggacaaagtcatgataaccaacgaagaagaaattaaaactactaacccggtagcaacggagtcctatggacaagtggccacaaaccaccagagtgcccaagcacaggcgcagaccggctgggttcaaagccaaggaatacttccgggtatggtttggcaggacagagatgtgtacctgcaaggacccatttgggccaaaattcctcacacggacggcaactttcacccttctccgctgatgggagggtttggaatgaagcacccgcctccccagatcctcatcaaaaacacacctgtacctgcggatcctccaacggccttcaacaaggacaagctgaactctttcatcacccagtattctactggccaagtcagcgtggagatcgagtgggagctgcagaaggaaaacagcaagcgctggaacccggagatccagtacacttccaactattacaagtctaataatgttgaatttgctgttaatactgaaggtgtatatagtgaaccccgccccattggcaccagatacctgactcgtaatctg

SEQ ID NO: 608 - DNA, 2205 bp, Artificial Sequence
  Description of Artificial Sequence: Synthetic polynucleotide
atggctgccgatggttatcttccagattggctcgaggacaaccttagtgaaggaattcgcgagtggtgggctttgaaacctggagcccctcaacccaaggcaaatcaacaacatcaagacaacgcccgaggtcttgtgcttccgggttacaaataccttggacccggcaacggactcgacaagggggagccggtcaacgcagcagacgcggcggccctcgagcacgacaaggcctacgaccagcagctcaaggccggagacaacccgtacctcaagtacaaccacgccgacgccgagttccaggagcggctcaaagaagatacgtcttttgggggcaacctcgggcgagcagtcttccaggccaaaaagaggcttcttgaacctcttggtctggttgaggaagcggctaagacggctcctggaaagaagaggcctgtagagcagtctcctcaggaaccggactcctccgcgggtattggcaaatcgggtgcacagcccgctaaaaagagactcaatttcggtcagactggcgacacagagtcagtcccagaccctcaaccaatcggagaacctcccgcagccccctcaggtgtgggatctcttacaatggcttcaggtggtggcgcaccagtggcagacaataacgaaggtgccgatggagtgggtagttcctcgggaaattggcattgcgattcccaatggctgggggacagagtcatcaccaccagcacccgaacctgggccctgcccacctacaacaatcacctctacaagcaaatctccaacagcacatctggaggatcttcaaatgacaacgcctacttcggctacagcaccccctggaggtattttgacttcaacagattccactgccacttctcaccacgtgactggcagcgactcatcaacaactggggattccggcctaagcgactcaacttcaagctcttcaacattcaggtcaaagaggttacggacaacaatggagtcaagaccatcgccaataaccttaccagcacggtccaggccttcacggactcagactatcagctcccgtacgtgctcgggtcggctcacgagggctgcctcccgccgttcccagcggacgttttcatgattcctcagtacgggtatctgacgcttaatgatggaagccaggccgtgggtcgttcgtccttttactgcctggaatatttcccgtcgcaaatgctaagaacgggtaacaacttccagttcagctacgagtttgagaacgtacctttccatagcagctacgctcacagccaaagcctggaccgactaatgaatccactcatcgaccaatacttgtactatctctcaaagactattaacggttctggacagaatcaacaaacgctaaaattcagtgtggccggacccagcaacatggctgtccagggaagaaactacatacctggacccagctaccgacaacaacgtgtctcaaccactgtgactcaaaacaacaacagcgaatttgcttggcctggagcttcttcttgggctctcaatggacgtaatagcttgatgaatcctggacctgctatggccagccacaaagaaggagaggaccgtttctttcctttgtctggatctttaatttttggcaaacaaggaactggaagagacaacgtggatgcggacaaagtcatgataaccaacgaagaagaaattaaaactactaacccggtagcaacggagtcctatggacaagtggccacaaaccaccagagtgcccaagcacaggcgcagaccggctgggttcaaaaccaaggaatacttccgggtatggtttggcaggacagagatgtgtacctgcaaggacccatttgggccaaaattcctcacacggacggcaactttcacccttctccgctgatgggagggtttggaatgaagcacccgcctcctcagatcctcatcaaaaacacacctgtacctgcggatcctccaacggccttcaacaaggacgagctgaactctttcatcacccagtattctactggccaagtcagcgtggagatcgagtgggagctgcagaaggaaaacagcaagcgctggaacccggagatccagtacacttccaactattacaagtctaataatgttgaatttgctgttaatactgaaggtgtatatagtgaaccccgccccattggcaccagatacctgactcgtaatctg

SEQ ID NO: 609 - DNA, 2205 bp, Artificial Sequence
  Description of Artificial Sequence: Synthetic polynucleotide
atggctgccgatggttatcttccagattggctcgaggacaaccttagtgaaggaattcgcgagtggtgggctttgaaacctggagcccctcaacccaaggcaaatcaacaacatcaagacaacgctcgaggtcttgtgcttccgggttacaaataccttggacccggcaacggactcgacaagggggagccggtcaacgcagcagacgcggcggccctcgagcacgacaaggcctacgaccagcagctcaaggccggagacaacccgtacctcaagtacaaccacgccgacgccgagttccaggagcggctcaaagaagatacgtcttttgggggcaacctcgggcgagcagtcttccaggacaaaaagaggcttcttgaacctcttggtctggttgaggaagcggctaagacggctcctggaaagaagaggcctgtagagcagtctcctcaggaaccggactcctccgcgggtattggcaaatcgggtgcacagcccgctaaaaagagactcaatttcggtcagactggcgacacagagtcagtcccagaccctcaaccaatcggagaacctcccgcagccccctcaggtgtgggatctcttacaatggcttcaggtggtggcgcaccagtggcagacaataacgaaggtgccgatggagtgggtagttcctcgggaaattggcattgcgattcccaatggctgggggacagagtcatcaccaccagcacccgaacctgggccctgcccacctacaacaatcacctctacaagcaaatctccaacagcacatctggaggatcttcaaatgacaacgcctacttcggctacagcaccccctgggggtattttgacttcaacagattccactgccacttctcaccacgtgactggcagcgactcatcaacaactggggattccggcctaagcgactcaacttcaagctcttcaacattcaggtcaaagaggttacggacaacaatggagtcaagaccatcgccaataaccttaccagcacggtccaggtcttcacggactcagactatcagctcccgtacgtgctcgggtcggctcacgagggctgcctcccgccgttcccagcggacgttttcatgattcctcagtacgggtatctgacgcttaatgatggaagccaggccgtgggtcgttcgtccttttactgcctggaatatttcccgtcgcaaatgctaagaacgggtaacaacttccaattcagctacgagtttgagaacgtacctttccatagcagctacgctcacagccaaagcctggaccgactaatgaatccactcatcgaccaatacttgtactatctctcaaagactattaacggttctggacagaatcaacaaacgctaaaattcagtgtggccggacccagcaacatggctgtccagggaagaaactacatacctggacccagctaccgacaacaacgtgtctcaaccactgtgactcaaaacaacaacagcgaatttgcttggcctggagcttcttcttgggctctcaatggacgtaatagcttgatgaatcctggacctgctatggccagccacaaagaaggagaggaccgtttctttcctttgtctggatctttaatttttggcaaacaaggaactggaagagacaacgtggatgcggacaaagtcatgataaccaacgaagaagaaattaaaactactaacccggtagcaacggagtcctatggacaagtggccacaaaccaccagagtgcccaagcacaggcgcagaccggctgggttcaaaaccaaggaatacttccgggtatggtttggcaggacagagatgtgtacctgcaaggacccatttgggccaaaattcctcacacggacggcaactttcacccttctccgctgatgggagggtttggaatgaagcacccgcctcctcagatcctcatcaaaaacacacctgtacctgcggatcctccaacggccttcaacaaggacaagctgaactctttcatcacccagtattctactggccaagtcagcgtggagatcgagtgggagctgcagaaggaaaacagcaagcgctggaacccggagatccagtacacttccaactattacaagtctaataatgttgaatttgctgttaatactgaaggtgtatatagtgaaccccgccccattggcaccagatacctgactcgtaatctg

SEQ ID NO: 610 - DNA, 2208 bp, Artificial Sequence
  Description of Artificial Sequence: Synthetic polynucleotide
atggctgccgatggttatcttccagattggctcgaggacaaccttagtgaaggaattcgcgagtggtgggctttgaaacctggagcccctcaacccaaggcaaatcaacaacatcaagacaacgctcgaggtcttgtgcttccgggttacaaataccttggacccggcaacggactcgacaagggggagccggtcaacgcagcagacgcggcggccctcgagcacgacaaggcctacgaccagcagctcaaggccggagacaacccgtacctcaagtacaaccacgccgacgccgagttccaggagcggctcaaagaagatacgtcttttgggggcaacctcgggcgagcagtcttccaggccaaaaagaggcttcttgaacctcttggtctggttgaggaagcggctaagacggctcctggaaagaagaggcctgtagagcagtctcctcaggaaccggactcctccgcgggtattggcaaatcgggtgcacagcccgctaaaaagagactcaatttcggtcagactggcgacacagagtcagtcccagaccctcaaccaatcggagaacctcccgcagccccctcaggtgtgggatctcttacaatggcttcaggtggtggcgcaccagtggcagacaataacgaaggtgccgatggagtgggtagttcctcgggaaattggcattgcgattcccaatggctgggggacagagccatcaccaccagcacccgaacctgggccctgcccacctacaacaatcacctctacaagcaaatctccaacagcacatctggaggatcttcaaatgacaacgcctacttcggctacagcaccccctgggggtattttgacttcaacagattccactgccacttctcaccacgtgactggcagcggctcatcaacaacaactggggattccggcctaagcgactcaacttcaagctcttcaacattcaggtcaaagaggttacggacaacaatggagtcaagaccatcgccaataaccttaccagcacggtccaggtcttcacggactcagactatcagctcccgtacgtgctcgggtcggctcacgagggctgcctcccgccgttcccagcggacgttttcatgattcctcagtacgggtatctgacgcttaatgatggaagccaggccgtgggtcgttcgtccttttactgcctggaatatttcccgtcgcaaatgctaagaacgggtaacaacttccagttcagctacgagtttgagaacgtacctttccatagcagctacgctcacagccaaagcctggaccgactaatgaatccactcatcgaccaatacttgtactatctctcaaagactattaacggttctggacagaatcaacaaacgctaaaattcagtgtggccggacccagcaacatggctgtccagggaagaaactacatacctggacccagctaccgacaacaacgtgtctcaaccactgtgactcaaaacaacaacagcgaatttgcttggcctggagcttcttcttgggctctcaatggacgtaatagcttgatgaatcctggacctgctatggccagccacaaagaaggagaggaccgtttctttcctttgtctggatctttaatttttggcaaacaaggaactggaagagacaacgtggatgcggacaaagtcatgacaaccaacgaagaagaaattaaaactactaacccggtagcaacggagtcctatggacaagtggccacaaaccaccagagtgcccaagcacaggcgcagaccggctgggttcaaaaccaaggaatacttccgggtatggtttggcaggacagagatgtgtacctgcaaggacccatttgggccaaaattcctcacacggacggcaactttcacccttctccgctgatgggagggtttggaatgaagcacccgcctcctcagatcctcatcaaaaacacacctgtacctgcggatcctccaacggccttcaacaaggacaagctgaactctttcatcacccagtattctactggccaagtcagcgtggagatcgagtgggagctgcagaaggaaaacagcaagcgctggaacccggagatccagtacacttccaactattacaagtctaataatgttgaatttgctgttaatactgaaggtgtatatagtgaaccccgccccattggcaccagatacctgactcgtaatctg

SEQ ID NO: 611 - DNA, 2208 bp, Artificial Sequence
  Description of Artificial Sequence: Synthetic polynucleotide
atggctgccgatggttatcttccagattggctcgaggacaaccttagtgaaggaattcgcgagtggtgggctttgaaacctggagcccctcaacccaaggcaaatcaacaacatcaagacaacgctcgaggtcttgtgcttccgggttacaaataccttggacccggcaacggactcgacaagggggagccggtcaatgcagcagacgcggcggccctcgagcacgacaaggcctacgaccagcagctcaaggccggagacaacccgtacctcaagtacaaccacgccgacgccgagttccaggagcggctcaaagaagatacgtcttttgggggcaacctcgggcgagcagtcttccagaccaaaaagaggcttcttgaacctcttggtctggttgaggaagcggctaagacggctcctggaaagaagaggcctgtagagcagtctcctcaggaaccgggctcctccgcgggtattggcaaatcgggtgcacagcccgctaaaaagagactcaatttcggtcagactggcgacacagagtcagtcccagaccctcaaccaatcggagaacctcccgcagccccctcaggtgtgggatctcttacaatggcttcaggtggtggcgcaccagtggcagacaataacgaaggtgccgatggagtgggtagttcctcgggaaattggcattgcgattcccaatggctgggggacagagtcatcaccaccagcacccgaacctgggccctgcccacctacaacaatcacctctacaagcaaatctccaacagcacatctggaggatcttcaaatgacaacgcctacttcggctacagcaccccctgggggtattttgacttcaacagattccactgccacttctcaccacgtgactggcagcgactcatcaacaacaactggggattccggcctaagcgactcaacttcaagctcttcaacattcaggtcaaagaggttacggacaacaatggagtcaagaccatcgccaataaccttaccagcacggtccaggtcttcacggactcagactatcagctcccgtacgtgctcgggtcggctcacgagggctgcctcccgccgttcccagcggacgttttcatgattcctcagtacgggtatctgacgcttaatgatggaagccaggccgtgggtcgttcgtccttttactgcctggaatatttcccgtcgcaaatgctaagaacgggtaacaacttccagttcagctacgagtttgagaacgtacctttccatagcagctacgctcacagccaaagcctggaccgactaatgaatccactcatcgaccaatacttgcactatctctcaaagactattaacggttctggacagaatcaacaaacgctaaaattcagtgtggccggacccagcaacatggctgtccagggaagaaactacatacctggacccagctaccgacaacaacgtgtctcaaccactgtgactcaaaacaacaacagcgaatttgcttggcctggagcttcttcttgggctctcaatggacgtaatagcttgatgaatcctggacctgctatggccagccacaaagaaggagaggaccgtttctttcctttgtctggatctttaatttttggcaaacaaggaactggaagagacaacgtggatgcggacaaagtcatgataaccaacgaagaagaaattaaaactactaacccggtagcaacggagtcctatggacaagtggccacaaaccaccagagtgcccaagcacaggcgcagaccggctgggttcaaaaccaaggaatacttccgggtatggtttggcaggacagagatgtgtacctgcaaggacccatttgggccaaaattcctcacacggacggcaactttcacccttctccgctgatgggagggtttggaatgaagcacccgcctcctcagatcctcatcaaaaacacacctgtacctgcggatcctccaacggccttcaacaaggacaagctgaactctttcatcacccagtattctactggccaagtcagcgtggagatcgagtgggagctgcagaaggaaaacagcaagcgctggaacccggagatccagtacacttccaactattacaagtctaataatgttgaatttgctgttaatactgaaggtgtatatagtgaaccccgccccattggcaccagatacctgactcgtaatctg

SEQ ID NO: 612 - DNA, 2208 bp, Artificial Sequence
  Description of Artificial Sequence: Synthetic polynucleotide
atggctgccgatggttattttccagattggctcgaggacaaccttagtgaaggaattcgcgagtggtgggctttgaaacctggagcccctcaacccaaggcaaatcaacaacatcaagacaacgctcgaggtcttgtgcttccgggttacaaataccttggacccggcaacggactcgacaagggggagccggtcaacgcagcagacgcggcggccctcgagcacgacaaggcctacgaccagcagctcaaggccggagacaacccgtacctcaagtacaaccacgccgacgccgagttccaggagcggctcaaagaagatacgtcttttgggggcaacctcgggcgagcagtcttccaggccaaaaagaggcttcttgaacctcttggtctggttgaggaagcggctaagacggctcctggaaagaagaggcctgtagagcagtctcctcaggaaccggactcctccgcgggtattggcaaatcgggtgcacagcccgctaaaaagagactcaatttcggtcagactggcgacacagagtcagtcccagaccctcaaccaatcggagaatctcccgcagccccctcaggtgtgggatctcttacaatggcttcaggtggtggcgcaccagtggcagacaataacgaaggtgccgatggagtgggtagttcctcgggaaattggcattgcgattcccaatggctgggggacagagtcatcaccaccagcacccgaacctgggccctgcccacctacaacaatcacctctacaagcaaatctccaacagcacatctggaggatcttcaaatgacaacgcctacttcggctacagcaccccctgggggtattttgacttcaacagattccactgccacttctcaccacgtgactggcagcgactcatcaacaacaactggggattccggcctaagcgactcaacttcaagctcttcaacattcaggtcaaagaggttacggacaacaatggagtcaagaccatcgccaataaccttaccagcacggtccaggtcttcacggactcagactatcagctcccgtacgtgctcgggtcggctcacgagggctgcctcccgccgttcccagcggacgttttcatgattcctcagtacgggtatctgacgcttaatgatggaagccaggccgtgggtcgttcgtccttttactgcctggaatatctcccgtcgcaaatgctaagaacgggtaacaacttccagttcagctacgagtttgagaacgtacctttccatagcagctacgctcacagccaaagcctggaccgactaatgaatccactcatcgaccaatacttgcactatctctcaaagactattaacggttctggacagaatcaacaaacgctaaaattcagtgtggccggacccagcaacatggctgtccagggaagaaactacatacctggacccagctaccgacaacaacgtgtctcaaccactgtgactcaaaacaacaacagcgaatttgcttggcctggagcttcttcttgggctctcaatggacgtaatagcttgatgaatcctggacctgctgtggccagccacaaagaaggagaggaccgtttctttcctttgtctggatctttaatttttggcaaacaaggaactggaagagacaacgtggatgcggacaaagtcatgataaccaacgaagaagaaattaaaactactaacccggtagcaacggagtcctatggacaagtggccacaaaccaccagagtgcccaagcacaggcgcagaccggctgggttcaaaaccaaggaatacttccgggtatggtttggcaggacagagatgtgtacctgcaaggacccatttgggccaaaattcctcacacggacggcaactttcacccttctccgctgatgggagggtttggaatgaagcacccgcctcctcagatcctcatcaaaaacacacctgtacctgcggatcctccaacggccttcaacaaggacaagctgaactctttcatcacccagtattctactggccaagtcagcgtggagatcgagtgggagctgcagaaggaaaacagcaagcgctggaacccggagatccagtacacttccaactattacaagtctaataatgttgaatttgctgttaatactgaaggtgtatatagtgaaccccgccccattggcaccagatacctgactcgtaatctg

SEQ ID NO: 613 - DNA, 2208 bp, Artificial Sequence
  Description of Artificial Sequence: Synthetic polynucleotide
atggctgccgatggttatcttccagattggctcgaggacaaccttagtgaaggaattcgcgagtggtgggctttgaaacctggagcccctcaacccaaggcaaatcaacaacatcaagacaacgctcgaggtcttgtgcttccgggttacaaataccttggacccggcaacggactcgacaagggggagccggtcaacgcagcagacgcggcggccctcgagcacgacaaggcctacgaccagcagctcaaggccggagacaacccgtacctcaagtacaaccacgccgacgccgagttccaggagcggctcaaagaagatacgtcttttgggggcaacctcgggcgagcagtcttccaggccaaaaagaggcttcttgaacctcttggtccggttgaggaagcggctaagacggctcctggaaagaagaggcctgtagagcagtctcctcaggaaccggactcctccgcgggtattggcaaatcgggtgcacagcccgctaaaaagagactcaatttcggtcagactggcgacacagagtcagtcccagaccctcaaccaatcggagaacctcccgcagccccctcaggtgtgggatctcttacaatggcttcaggtggtggcgcaccagtggcagacaataacgaaggtgccgatggagtgggtagttcctcgggaaattggcattgcgattcccaatggctgggggacagagtcatcaccaccagcacccgaacctgggccctgcccacctacaacaatcacctctacaagcaaatctccaacagcacatctggaggatcttcaaatgacaacgcctacttcggctacagcaccccctgggggtattttgacttcaacagattccactgccacttctcaccacgtgactggcagcgactcatcaacaacaactggggattccggcctaagcgactcaacttcaagctcttcaacattcaggtcaaagaggttacggacaacaatggagtcaagaccatcgccaataaccttaccagcacggtccaggtcttcacggactcagactatcagctcccgtacgtgctcgggtcggctcacgagggctgcctcccgccgttcccagcggacgttttcatgattcctcagtacgggtatctgacgcttaatgatggaagccaggccgtgggtcgttcgtccttttactgcctggaatatttcccgtcgcaaatgctaagaacgggtaacaacttccagttcagctacgagtttgagaacgtacctttccatagcagctacgctcacagccaaagcctggaccgactaatgaatccactcatcgaccaatacttgtactatctctcaaagactattaacggttctggacagaatcaacaaacgctaaaattcagtgtggccggacccagcaacatggctgtccagggaagaaactacatacctggacccagctaccgacaacaacgtgtctcaaccactgtgactcaaaacaacaacagcgaatttgcttggcctggagcttcttcttgggctctcaatggacgtaatagcttgatgaatcctggacctgctatggccagccacaaagaaggagaggaccgtttctttcctttgtctggatctttaatttttggcaaacaaggaactggaagagacaacgtggatgcggacaaagtcatgataaccaacgaagaagaaattaaaactactaacccggtagcaacggagtcctatggacaagcggccacaaaccaccagagtgcccaagcacaggcgcagaccggctgggttcaaaaccaaggaatacttccgggtatggtttggcaggacagagatgtgtacctgcaaggacccatttgggccaaaattcctcacacggacggcaactttcacccttctccgctgatgggagggtttggaatgaagcacccgcctcctcagatcctcatcaaaaacacacctgtacctgcggatcctccaacggccttcaacaaggacaagctgaactctttcatcacccagtattctactggccaagtcagcgtggagatcgagtgggagctgcagaaggaaaacagcaagcgctggaacccggagatccagtacacttccaactattacaagtctaataatgttgaatttgctgttaatactgaaggtgtatatagtgaaccccgccccattggcaccagatacctgactcgtaatctg

SEQ ID NO: 614 - DNA, 2208 bp, Artificial Sequence
  Description of Artificial Sequence: Synthetic polynucleotide
atggctgccgatggttatcttccagattggctcgaggacaaccttagtgaaggaattcgcgagtggtgggctttgaaacctggagcccctcaacccaaggcaaatcaacaacatcaagacaacgctcggggtcttgtgcttccgggttacaaataccttggacccggcaacggactcgacaagggggagccggtcaacgcagcagacgcggcggccctcgagcacgacaaggcctacgaccagcagctcaaggccggagacaacccgtacctcaagtacaaccacgccgacgccgagttccaggagcggctcaaagaagatacgtcttttgggggcaacctcgggcgagcagtcttccaggccaaaaagaggcttcttgaacctcttggtccggttgaggaagcggctaagacggctcctggaaagaagaggcctgtagagcagtctcctcaggaaccggactcctccgcgggtattggcaaatcgggtgcacagcccgctaaaaagagactcaatttcggtcagactggcgacacagagtcagtcccagaccctcaaccaatcggagaacctcccgcagccccctcaggtgtgggatctcttacaatggcttcaggtggtggcgcaccagtggcagacaataacgaaggtgccgatggagtgggtagttcctcgggaaattggcattgcgattcccaatggctgggggacagagtcatcaccaccagcacccgaacctgggccctgcccacctacaacaatcacctctacaagcaaatctccaacagcacatctggaggatcttcaaatgacaacgcctacttcggctacagcaccccctgggggtattttgacttcaacagattccactgccacttctcaccacgtgactggcggcgactcatcaacaacaactggggattccggcctaagcgactcaacttcaagctcttcaacattcaggtcaaagaggttacggacaacaatggagtcaagaccatcgccaataaccttaccagcacggtccaggtcttcacggactcagactatcagctcccgtacgtgctcgggtcggctcacgagggctgcctcccgccgttcccagcggacgttttcatgattcctcagtacgggtatctgacgcttaatgatggaagccaggccgtgggtcgttcgtccttttactgcctggaatatttcccgtcgcaaatgctaagaacgggtaacaacttccagttcagctacgagtttgagaacgtacctttccatagcagctacgctcacagccaaagcctggaccgactaatgaatccactcatcgaccaatacttgtactatctctcaaagactattaacggttctggacagaatcaacaaacgctaaaattcagtgtggccggacccagcaacatggctgtccagggaagaaactacatacctggacccagctaccgacaacaacgtgtctcaaccactgtgactcaaaacaacaacagcgaatttgcttggcctggagcttcttcttgggctctcaatggacgtaatagcttgatgaatcctggacctgctatggccagccacaaagaaggagaggaccgtttctttcctttgtctggatctttaatttttggcaaacaaggaactggaagagacaacgtggatgcggacaaagtcatgataaccaacgaagaagaaattaaaactactaacccggtagcaacggagtcctatggacaagtggccacaaaccaccagagtgcccaagcacaggcgcagaccggctgggttcaaaaccaaggaatacttccgggtatggtttggcaggacagagatgtgtacctgcaaggacccatttgggccaaaattcctcacacggacggcaactttcacccttctccgctgatgggagggtttggaatgaagcacccgcctcctcagatcctcatcaaaaacacacctgtacctgcggatcctccaacggccttcaacaaggacaagctgaactctttcatcacccagtattctactggccaagtcagcgtggagatcgagtgggagctgcagaaggaaaacagcaagcgctggaacccggagatccagtacacttccaactattacaagtctaataatgttgaatttgctgttaatactgaaggtgtatatagtgaaccccgccccattggcaccagatacctgactcgtaatctg

SEQ ID NO: 615 - DNA, 2208 bp, Artificial Sequence
  Description of Artificial Sequence: Synthetic polynucleotide
atggctgccgatggttatcttccagattggctcgaggacaaccttagtgaaggaattcgcgagtggtgggctttgaaacctggagcccctcaacccaaggcaaatcaacaacatcaagacaacgctcgaggtcttgtgcttccgggttacaaataccttggacccggcaacggactcgacaagggggagccggtcaacgcagcagacgcggcggccctcgagcacgacaaggcctacgaccagcagctcaaggccggagacaacctgtacctcaagtacaaccacgccgacgccgagttccaggagcggctcaaagaagatacgtcttttgggggcaacctcgggcgagcagtcttccaggccaaaaagaggcttcttgaacctcttggtctggttgaggaagcggctaagacggctcctggaaagaagaggcctgtagagcagtctcctcaggaaccggactcctccgcgggtattggcaaatcgggtgcacagcccgctaaaaagagactcaatttcggtcagactggcgacacagagtcagtcccagaccctcaaccaatcggagaacctcccgcagccccctcaggtgtgggatctcttacaatggcttcaggtggtggcgcaccagtggcagacaataacgaaggtgccgatggagtgggtagttcctcgggaaattggcattgcgattcccaatggctgggggacagagtcatcaccaccagcacccgaacctgggccctgcccacctacaacaatcacctctacaagcaaatctccaacagcacatctggaggatcttcaaatgacaacgcctacttcggctacagcaccccctgggggtattttgacttcaacagattccactgccacttctcaccacgtgactggcagcgactcatcaacaacaactggggattccggcctaagcgactcaacttcaagctcttcaacattcaggtcaaagaggttacggacaacaatggagtcaagaccatcgccaataaccttaccagcacggtccaggtcttcacggactcagactatcagctcccgtacgtgctcgggtcggctcacgagggctgcctcccgccgttcccagcggacgttttcatgattcctcagtacgggtatctgacgcttaatgatggaagccaggccgtgggtcgttcgtccttttactgcctggaatatttcccgtcgcaaatgctaagaacgggtaacaacttccagttcagctacgagtttgagaacgtacctttccatagcagctacgctcacagccaaagcctggaccgactaatgaatccactcatcgaccaatacttgcactatctctcaaagactattaacggttctggacagaatcaacaaacgctaaaattcagtgtggccggacccagcaacatggctgtccagggaagaaactacatacctggacccagctaccgacaacaacgtgtctcaaccactgtgactcaaaacaacaacagcgaatttgcttggcctggagcttcttcttgggctctcaatggacgtaatagcttgatgaatcctggacctgctatggccagccacaaagaaggagaggaccgtttctttcctttgtctggatctttaatttttggcaaacaaggaactggaagagacaacgtggatgcggacaaagtcatgataaccaacgaagaagaaattaaaactactaacccggtagcaacggagtcctatggacaagtggccacaaaccaccagagtgcccaagcacaggcgcagaccggctgggttcaaaaccaaggaatacttccgggtatggtttggcaggacagagatgtgtacctgcaaggacccatttgggccaaaattcctcacacggacggcaactttcacccttctccgctgatgggagggtttggaatgaagcacccgcctcctcagatcctcatcaaaaacacacctgtacctgcggatcctccaacggccttcaacaaggacaagctgaactctttcatcacccagtattctactggccaagtcagcgtggagatcgagtgggagctgcagaaggaaaacagcaagcgctggaacccggagatccagtacacttccaactattacaagtctaataatgttgaatttgctgttaatactgaaggtgtatatagtgaaccccgccccattggcaccagatacctgactcgtaatctg

SEQ ID NO: 616 - DNA, 2208 bp, Artificial Sequence
  Description of Artificial Sequence: Synthetic polynucleotide
atggctgccgatggttatcttccagattggctcgaggacaaccttagtgaaggaattcgcgagtggtgggctttgaaacctggagcccctcaacccaaggcaaatcaacaacatcaagacaacgctcgaggtcttgtgcttccgggttacaaataccttggacccggcaacggactcgacaagggggagccggtcaacgcagcagacgcggcggccctcgagcacgacaaggcctacgaccagcagctcaaggccggagacaacccgtacctcaagtacaaccacgccgacgccgagttccaggagcggctcaaagaagatacgtcttttgggggcaacctcgggcgagcagtcttccaggccaaaaagaggcttcttgaacctcttggtctggttgaggaagcggctaagacggctcctggaaagaagaggcctgtagagcagtctcctcaagaaccggactcctccgcgggtattggcaaatcgggtgcacagcccgctaaaaagagactcaatttcggtcagactggcgacacagagtcagtcccagaccctcaaccaatcggagaacctcccgcagccccctcaggtgtgggatctcttacaatggcttcaggtggtggcgcaccagtggcagacaataacgaaggtgccgatggagtgggtagttcctcgggaaattggcattgcgattcccaatggctgggggacagagtcatcaccaccagcacccgaacctgggccctgcccacctacaacaatcacctctacaagcaaatctccaacagcacatctggaggatcttcaaatgacaacgcctacttcggctacagcaccccctgggggtattttgacttcaacagattccactgccacttctcaccacgtgactggcagcgactcatcaacaacaactggggattccggcctaagcgactcaacttcaagctcttcaacattcaggtcaaagaggttacggacaacaatggagtcaagaccatcgccaataaccttaccagcacggtccaggtcttcacggactcagactatcagctcccgtacgtgctcgggtcggctcacgagggctgcctcccgccgttcccagcggacgttttcatgattcctcagtacgggtatctgacgcttaatgatggaagccaggccgtgggtcgttcgtccttttactgcctggaatatttcccgtcgcaaatgctaagaacgggtaacaacttccagttcagctacgagtttgagaacgtacctttccatagcagctacgctcacagccaaagcctggaccgactaatgaatccactcatcgaccaatacttgcactatctctcaaagactattaacggttctggacagaatcaacaaacgctaaaattcagtgtggccggacccagcaacatggctgtccagggaagaaactacatacctggacccagctaccgacaacaacgtgtctcaaccactgtgactcaaaacaacaacagcgaatttgcttggcctggagcttcttcttgggctctcaatggacgtaatagcttgatgaatcctggacctgctatggccagccacaaagaaggagaggaccgtttctttcctttgtctggatctttaatttttggcaaacaaggaactggaagagacaacgtggatgcggacaaagtcatgataaccaacgaagaagaaattaaaactactaacccggtagcaacggagtcctatggacaagtggccacaaaccaccagagtgcccaagcacaggcgcagaccggctgggttcaaaaccaaggaatacttccgggtatggtttggcaggacagagatgtgtacctgcaaggacccatttgggccaaaattcctcacacggacggcaactttcacccttctccgctgatgggagggtttggaatgaagcacccgcctcctcagatcctcatcaaaaacacacctgtacctgcggatcctccaacggccttcaacaaggacaagctgaactctttcatcacccagtattctactggccaagtcagcgtggagatcgagtgggagctgcagaaggaaaacagcaagcgctggaacccggagatccagtacacttccaactattacaagtctaataatgttgaatttgctgttaatactgaaggtgtatatagtgaaccccgccccattggcaccagatacctgactcgtaatctg

SEQ ID NO: 617 - DNA, 2208 bp, Artificial Sequence
  Description of Artificial Sequence: Synthetic polynucleotide
  modified_base (1325)..(1325): a, t, c, or g
atggctgccgatggttatcttccagattggctcgaggacaaccttagtgaaggaattcgcgagtggtgggctttgaaacctggagcccctcaacccaaggcaaatcaacaacatcaagacaacgctcgaggtcttgtgcttccgggttacaaataccttggacccggcaacggactcgacaagggggagccggtcaacgcagcagacgcggcggccctcgagcacgacaaggcctacgaccagcagctcaaggccggagacaacccgtacctcaagtacaaccacgccgacgccgagttccaggagcggctcaaagaagatacgtcttttgggggcaacctcgggcgagcagtcttccaggccaaaaagaggcttcttgaacctcttggtctggttgaggaagcggctaagacggctcctggaaagaagaggcctgtagagcagtctcctcaggaaccggactcctccgcgggtattggcaaatcgggtgcacagcccgctaaaaagagactcaatttcggtcagactggcgacacagagtcagtcccagaccctcaaccaatcggagaacctcccgcagccccctcaggtgtgggatctcttacaatggcttcaggtggtggcgcaccagtggcagacaataacgaaggtgccgatggagtgggtagttcctcgggaaattggcattgcgattcccaatggctgggggacagagtcatcaccaccagcacccgaacctgggccctgcccacctacaacaatcacctctacaagcaaatctccaccagcacatctggaggatcttcaaatgacaacgcctacttcggctacagcaccccctgggggtattttgacttcaacagattccactgccacttctcaccacgtgactggcagcgactcatcaacaacaactggggattccggcctaagcgactcaacttcaagctcttcaacattcaggtcaaagaggttacggacaacaatggagtcaagaccatcgccaataaccttaccagcacggtccaggtcttcacggactcagactatcagctcccgtacgtgctcgggtcggctcacgagggctgcctcccgccgttcccagcggacgttttcatgattcctcagtacgggtatctgacgcttaatgatggaagccaggccgtgggtcgttcgtccttttactgcctggaatatttcccgtcgcaaatgctaagaacgggtaacaacttccagttcagctacgagtttgagaacgtacctttccatagcagctacgctcacagccaaagcctggaccgactaatgaatccactcatcgaccnatacttgcactatctctcaaagactattaacggttctggacagaatcaacaaacgctaaaattcagtgtggccggacccagcaacatggctgtccagggaagaaactacatacctggacccagctaccgacaacaacgtgtctcaaccactgtgactcaaaacaacaacagcgaatttgcttggcctggagcttcttcttgggctctcaatggacgtaatagcttgatgaatcctggacctgctatggccagccacaaagaaggagaggaccgtttctttcctttgtctggatctttaatttttggcaaacaaggaactggaagagacaacgtggatgcggacaaagtcatgataaccaacgaagaagaaattaaaactactaacccggtagcaacggagtcctatggacaagtggccacaaaccaccagagtgcccaagcacaggcgcagaccggctgggttcaaaaccaaggaatacttccggatatggtttggcaggacagagatgtgtacctgcaaggacccatttgggccaaaattcctcacacggacggcaactttcacccttctccgctgatgggagggtttggaatgaagcacccgcctcctcagatcctcatcaaaaacacacctgtacctgcggatcctccaacggccttcaacaaggacaagctgaactctttcatcacccagtattctactggccaagtcagcgtggagatcgagtgggagctgcagaaggaaaacagcaagcgctggaacccggagatccagtacacttccaactattacaagtctaataatgttgaatttgctgttaatactgaaggtgtatatagtgaaccccgccccattggcaccagatacctgactcgtaatctg

SEQ ID NO: 618 - DNA, 2208 bp, Artificial Sequence
  Description of Artificial Sequence: Synthetic polynucleotide
atggctgccgatggttatcttccagattggctcgaggacaaccttagtgaaggaattcgcgagtggtgggctttgaaacctggagcccctcaacccaaggcaaatcaacaacatcaagacaacgctcgaggtcttgtgcttccgggttacaaataccttggacccggcaacggactcgacaagggggagccggtcaacgcagcagacgcggcggccctcgagcacgacaaggcctacgaccagcagctcaaggccggagacaacccgtacctcaagtacaaccacgccgacgccgagttccaggagcggctcaaagaagatacgtcttttgggggcaacctcgggcgagcagtcttccaggccaaaaagaggcttcttgaacctcttggtctggttgaggaagcggctaagacggctcctggaaagaagaggcctgtagagcagtctcctcaggaaccggactcctccgcgggtattggcaaatcgggtgcacagcccgctaaaaagagactcaatttcggtcagactggcgacacagagtcagtcccagaccctcaaccaatcggagaacctcccgcagccccctcaggtgtgggatctcttacaatggcttcaggtggtggcgcaccagtggcagacaataacgaaggtgccgatggagtgggtagttcctcgggaaattggcattgcgattcccaatggctgggggacagagtcatcaccaccagcacccgaacctgggccctgcccacctacaacaatcacctctacaagcaaatctccaacagcacatctggaggatcttcaaatgacaacgcctacttcggctacagcaccccctgggggtattttgacttcaacagattccactgccacttctcaccacgtgactggcagcgactcatcaacaacaactggggattccggcctaagcgactcaacttcaagctcttcaacattcaggtcaaagaggttacggacaacaatggagtcaagaccatcgccaataaccttaccagcacggtccaggtcttcacggactcagactatcagctcccgtacgtgctcgggtcggctcacgagggctgcctcccgccgttcccagcggacgttttcatgattcctcagtacgggtatctgacgcttaatgatggaagccaggccgtgggtcgttcgtccttttactgcctggaatatttcccgtcgcaaatgctaagaacgggtaacaacttccagttcagctacgagtttgagaacgtacctttccatagcagctacgctcacagccaaagcctggaccgactaatgaatccactcatcgaccaatacttgcactatctctcaaagactattaacggttctggacagaatcaacaaacgctaaaattcagtgtggccggacccagcaacatggctgtccagggaagaaactacatacctggacccagctaccgacaacaacgtgtctcaaccactgtgactcaaaacaacaacagcgaatttgcttggcctggagcttcttcttgggctctcaatggacgtaatagcttgatgaatcctggacctgctatggccagctacaaagaaggagaggacagtttctttcctttgtctggatctttaatttttggcaaacaaggaactggaagagacaacgtggatgcggacaaagtcatgataaccaacgaagaagaaattaaaactactaacccggtagcaacggagtcctatggacaagtggccacaaaccaccagagtgcccaagcacaggcgcagaccggctgggttcaaaaccaaggaatacttccgggtatggtttggcaggacagagatgtgtacctgcaaggacccatttgggccaaaattcctcacacggacggcaactttcacccttctccgctgatgggagggtttggaatgaagcacccgcctcctcagaccctcatcaaaaacacacctgtacctgcggatcctccaacggccttcaacaaggacaagctgaactctttcatcacccagtattctactggccaagtcagcgtggagatcgagtgggagctgcagaaggaaaacagcaagcgctggaacccggagatccagtacacttccaactattacaagtctaataatgttgaatttgctgttaatactgaaggtgtatatagtgaaccccgccccattggcaccagatacctgactcgtaatctg

SEQ ID NO: 619 - DNA, 2208 bp, Artificial Sequence; identical to SEQ ID NO: 602
  Description of Artificial Sequence: Synthetic polynucleotide

SEQ ID NO: 620 - DNA, 2208 bp, Artificial Sequence
  Description of Artificial Sequence: Synthetic polynucleotide
atggctgccgatggttatcttccagattggctcgaggacaaccttagtgaaggaattcgcgagtggtgggctttgaaacctggagcccctcaacccagggcaaatcaacaacatcaagacaacgctcgaggtcttgtgcttccgggttacaaataccttggacccggcaacggactcgacaagggggagccggtcaacgcagccgacgcggcggccctcgagcacgacaaggcctacgaccagcagctcaaggccggagacaacccgtacctcaagtacaaccacgccgacgccgagttccaggagcggctcaaagaagatacgtcttttgggggcaacctcgggcgagcagtcttccaggccaaaaagaggcttcttgaacctcttggtctggttgaggaagcggctaagacggctcctggaaagaagaggcctgtagagcagtctcctcaggaaccggactcctccgcgggtattggcaaatcgggtgcacagcccgctaaaaagagactcaatttcggtcagactggcgacacagagtcagtcccagaccctcaaccaatcggagaacctcccgcagccccctcaggtgtgggatctcttacaatggcttcaggtggtggcgcaccagtggcagacaataacgaaggtgccgatggagtgggtagttcctcgggaaattggcattgcgattcccaatggctgggggacagagtcatcaccaccagcacccgaacctgggccctgcccacctacaacaatcacctctacaagcaaatctccaacagcacatctggaggatcttcaaatgacaacgcctacttcggctacagcaccccctgggggtattttgacttcaacagattccactgccacttctcaccacgtgactggcagcgactcatcaacaacaactggggattccggcctaagcgactcaacttcaagctcttcaacattcaggtcaaagaggttacggacaacaatggagtcaagaccatcgccaataaccttaccagcacggtccaggtcttcacggactcagactgtcagctcccgtacgtgctcgggtcggctcacgagggctgcctcccgccgttcccagcggacgttttcatgattcctcagtacgggtatctgacgcttaatgatggaagccaggccgtgggtcgttcgtccttttactgcctggaatatttcccgtcgcaaatgctaagaacgggtaacaacttccagttcagctacgagtttgagaacgtacctttccatagcagctacgctcacagccaaagcctggaccgactaacgaatccactcatcgaccaatacttgtactatctctcaaagactattaacggttctggacagaatcaacaaacgctaaaattcagtgtggccggacccagcaacatggctgtccagggaagaaactacatacctggacccagctaccgacaacaacgtgtctcaaccactgtgactcaaaacaacaacagcgaatttgcttggcctggagcttcttcttgggctctcaatggacgtaatagcttgatgaatcctggacctgctatggccagccacaaagaaggagaggaccgtttctttcctttgtctggatctttaatttttggcaaacaaggaactggaagagacaacgtggatgcggacaaagtcatgataaccaacgaagaagaaattaaaactactaacccggtagcaacggagtcccatggacaagtggccacaaaccaccagagtgcccaagcacaggcgcagaccggctgggttcaaaaccaaggaatacttccgggtatggtttggcaggacagagatgtgtacctgcaaggacccatttgggccaaaattcctcacacggacggcaactttcacccttctccgctgatgggagggtttggaatgaagcacccgcctcctcagatcctcatcaaaaacacacctgtacctgcggatcctccaacggccttcaacaaggacaagctgaactctttcatcacccagtattctactggccaagtcagcgtggagatcgagtgggagctgcagaaggaaaacagcaagcgctggaacccggagatccagtacacttccaactattacaagtctaataatgttgaatttgctgttaatactgaaggtgtatatagtgaaccccgccccattggcaccagatacctgactcgtaatctg

SEQ ID NO: 621 - DNA, 2208 bp, Artificial Sequence
  Description of Artificial Sequence: Synthetic polynucleotide
atggctgccgatggttatcttccagattggctcgaggacaaccttagtgaaggaattcgcgagtggtgggctttgaaacctggagcccctcaacccaaggcaaatcaacaacatcaagacaacgctcgaggtcttgtgcttccgggttacaaataccttggacccggcaacggactcgacaagggggagccggtcaacgcagcagacgcggcggccctcgagcacgacaaggcctacgaccagcagctcaaggccggagacaacccgtacctcaagtacaaccacgccgacgccgagttccaggagcggctcaaagaagatacgtcttttgggggcaacctcgggcgagcagtcttccaggccaaaaagaggcttcttgaacctcttggtctggttgaggaagcggctaagacggctcctggaaagaagaggcctgtagagcagtctcctcaggaaccggactcctccgcgggtattggcaaatcgggtgcacagcccgctaagaagagactcaatttcggtcagactggcgacacagagtcagtcccagaccctcaaccaatcggagaacctcccgcagccccctcaggtgtgggatctcttacaatggcttcaggtggtggcgcaccagtggcagacaataacgaaggtgccgatggagtgggtagttcctcgggaaattggcattgcgattcccaatggctgggggacagagtcatcaccaccagcacccgaacctgggccctgcccacctacaacaatcacctctacaagcaaatctccaacagcacatctggaggatcttcaaatgacaacgcctacttcggctacagcaccccctgggggtattttgacttcaacagattccactgccacttctcaccacgtgactggcagcgactcatcaacaacaactggggattccggcctaagcgactcaacttcaagctcttcaacattcaggtcaaagaggttacggacaacaatggagtcaagaccatcgccaataaccttaccagcacggtccaggtcttcacggactcagactatcagctcccgtacgtgctcgggtcggctcacgagggctgcctcccgccgttcccagcggacgttttcatgattcctcagtacgggtatctgacgcttaatgatggaagccaggccgtgggtcgttcgtccttttactgcctggaatatttcccgtcgcaaatgctaagaacgggtaacaacttccagttcagctacgagtttgagaacgtacctttccatagcagctacgctcacagccaaagcctggaccgactaatgaatccacccatcgaccaatacttgtactatctctcaaagactattaacggttctggacagaatcaacaaacgctaaaattcagtgtggccggacccagcaacatggctgtccagggaagaaactacatacctggacccagctaccgacaacaacgtgtctcaaccactgtgactcaaaacaacaacagcgaatttgcttggcctggagcttcttcttgggctctcaatggacgtaatagcttgatgaatcctggacctgctatggccagccacaaagaaggagaggaccgtttctttcctttgtctggatctttaatttttggcaaacaaggaactggaagagacaacgtggatgcggacaaagtcatgataaccaacgaagaagaaattaaaactactaacccggtagcaacggagtcctatggacaagtggccacaaaccaccagagtgcccaagcacaggcgcagaccggctgggttcaaaaccaaggaatacttccgggtatggtttggcaggacagagatgtgtacctgcaaggacccatttgggccaaaattcctcacacggacggcaactttcacccttctccgctgatgggagggtttggaatgaagcacccgcctcctcagatcctcatcaaaaacacacctgtacctgcggatcctccaacggccttcaacaaggacaagctgaactctttcatcacccagtattctactggccaagtcagcgtggagatcgagtgggagctgcagaaggaaaacagcaagcgctggaacccggagatccagtacacttccaactattacaagtctaataatgttgaatttgctgttaatactgaaggtgtatatggtgaaccccgccccattggcaccagatacctgactcgtaatctg

SEQ ID NO: 622 - DNA, 2208 bp, Artificial Sequence
  Description of Artificial Sequence: Synthetic polynucleotide
atggctgccgatggttatcttccagattggctcgaggacaaccttagtgaaggaattcgcgagtggtgggctttgaaacctggagcccctcaacccaaggcaaatcaacaacatcaagacaacgctcgaggtcttgtgcttccgggttacaaataccttggacccggcaacggactcgacaagggggagccggtcaacgcagcagacgcggcggccctcgagcacgacaaggcctacgaccagcagctcaaggccggagacaacccgtacctcaagtacaaccacgccgacgccgagttccaggagcggctcaaagaagatacgtcttttgggggcaacctcgggcgagcagtcttccaggccaaaaagaggcttcttgaacctcttggtctggttgaggaagcggctaagacggctcctggaaagaagaggcctgtagagcagtctcctcaggaaccggactcctccgcgggtattggcaaatcgggtgcacagcccgctaaaaagagactcaatttcggtcagactggcgacacagagtcagtcccagaccctcaaccaatcggagaacctcccgcagccccctcaggtgtgggatctcttacaatggcttcaggtggtggcgcaccagtggcagacaataacgaaggtgccgatggagtgggtagttcctcgggaaattggcattgcgattcccaatggctgggggacagagtcatcaccaccagcacccgaacctgggccctgcccacctacaacaatcacctctacaagcaaatctccaacagcacatctggaggatcttcaaatgacaacgcctacttcggctacagcaccccctgggggtattttgacttcaacagattccactgccacttctcaccacgtgaccggcagcgactcatcaacaacaactggggattccggcctaagcgactcaacttcaagctcttcaacattcaggtcaaagaggttacggacaacaatggagtcaagaccatcgccaataaccttaccagcacggtccaggtcttcacggactcagactatcagctcccgtacgtgctcgggtcggctcacgagggctgcctcccgccgttcccagcggacgttttcatgattcctcagtacgggtatctgacgcttaatgatggaagccaggccgtgggtcgttcgtccttttactgcctggaatatttcccgtcgcaaatgctaagaacgggtaacaacttccagttcagctacgagtttgagaacgtacctttccatagcagctacgctcacagccaaagcctggaccgactaatgaatccactcatcgaccaatacttgtactatctctcaaagactattaacggttctggacagaatcaacaaacgctaaaattcagtgtggccggacccagcaacatggctgtccagggaagaaactacatacctggacccagctaccgacaacaacgtgtctcaaccactgtgactcaaaacaacaacagcgaatttgcttggcctggagcttcttcttgggctctcaatggacgtaatagcttgatgaatcctggacctgctatggccagccacaaagaaggagaggaccgtttctttcctttgtctggatctttaatttttggcaaacaaggaactggaagagacaacgtggatgcggacaaagtcatgataaccaacgaagaagaaattaaaactactaacccggtagcaacggagtcctatggacaagtggccacaaaccaccagagtgcccaagcacaggcgcagaccggctgggttcaaaaccaaggaatacttccgggtatggtttggcaggacagagatgtgtacctgcaaggacccatttgggccaaaattcctcacacggacggcaactttcacccttctccgctgatgggagggtttggaatgaagcacccgcctcctcagatcctcatcaaaaacacacctgtacctgcggatcctccaacggccttcaacaaggacaagctgaactctttcatcacccagtattctactggccaagtcagcgtggagatcgagtgggagctgcagaaggaaaacagcaagcgctggaacccggagatccagtacacttccaactattacaagtctaataatgttgaatttgctgttaatactgaaggtgtatatagtgaaccccgccccattggcaccagatacctgactcgtaatctg

SEQ ID NO: 623 - DNA, 2208 bp, Artificial Sequence
  Description of Artificial Sequence: Synthetic polynucleotide
atggctgccgatggttatcttccagattggctcgaggacaaccttagtgaaggaattcgcgagtggtgggctttgaaacctggagcccctcaacccaaggcaaatcaacaacatcaagacaacgctcgaggtcttgtgcttccgggttacaaataccttggacccggcaacggactcgacaagggggagccggtcaacgcagcagacgcggcagccctcgagcacgacaaggcctacgaccagcagctcaaggccggagacaacccgtacctcaagtacaaccacgccgacgccgagttccaggagcggctcaaagaagatacgtcttttgggggcaacctcgggcgagcagtcttccaggccaaaaagaggcttcttgaacctcttggtctggttgaggaagcggctaagacggctcctggaaagaagaggcctgtagagcagtctcctcaggaaccggactcctccgcgggtattggcaaatcgggtgcacagcccgctaaaaagagactcaatttcggtcagactggcgacacagagtcagtcccagaccctcaaccaatcggagaacctcccgcagccccctcaggtgtgggatctcttacaatggcttcaggtggtggcgcaccagtggcagacaataacgaaggtgccgatggagtgggtagttcctcgggaaattggcattgcaattcccaatggctgggggacagagtcatcaccaccagcacccgaacctgggccctgcccacctacaacaatcacctctacaagcaaatctccaacagcacatctggaggatcttcaaatgacaacgcctacttcggctacagcaccccctgggggtattttgacttcaacagattccactgccacttctcaccacgtgactggcagcgactcatcaacaacaactggggattccggcctaagcgactcaacttcaagctcttcaacattcaggtcaaagaggttacggacaacaatggagtcaagaccatcgccaataaccttaccagcacggtccaggtcttcacggactcagactatcagctcccgtacgtgctcgggtcggctcacgagggctgcctcccgccgttcccagcggacgttttcatgattcctcagtacgggtatctgacgcttaatgatggaagccaggccgtgggtcgttcgtccttttactgcctggaatatttcccgtcgcaaatgctaagaacgggtaacaacttccagttcagctacgagtttgagaacgtacctttccatagcagctacgctcacagccaaagcctggaccgactaatgaatccactcatcgaccaatacttgtactatctctcaaagactattaacggttctggacagaatcaacaaacgctaaaattcagtgtggccggacccggcaacatggctgtccagggaagaaactacatacctggacccagctaccgacaacaacgtgtctcaaccactgtgactcaaaacaacaacagcgaatttgcttggcctggagcttcttcttgggctctcaatggacgtaatagcttgatgaatcctggacctgctatggccagccacaaagaaggagaggaccgtttctttcctttgtctggatctttaatttttggcaaacaaggaactggaagagacaacgtggatgcggacaaagtcatgataaccaacgaagaagaaattaaaactactaacccggtagcaacggagtcctatggacaagtggccacaaaccaccagagtgcccaagcacaggcgcagaccggctgggttcaaaaccaaggaatacttccgggtatggtttggcaggacagagatgtgtacctgcaaggacccatttgggccaaaattcctcacacggacggcaactttcacccttctccgctgatgggagggtttggaatgaagcacccgcctcctcagatcctcatcaagaacacacctgtacctgcggatcctccaacggccttcaacaaggacaagctgaactctttcatcacccagtattctactggccaagtcagcgtggagatcgagtgggagctgcagaaggaaaacagcaagcgctggaacccggagatccagtacacttccaactattacaagtctaataatgttgaatttgctgttaatactgaaggtgtatatagtgaaccccgccccattggcaccagatacctgactcgtaatctg

SEQ ID NO: 624 - DNA, 2208 bp, Artificial Sequence
  Description of Artificial Sequence: Synthetic polynucleotide
atggctgccgatggttatcttccagattggctcgaggacaaccttagtgaaggaattcgcgagtggtgggctttgaaacctggagcccctcaacccaaggcaaatcaacaacatcaagacaacgctcgaggtcttgtgcttccgggttacagataccttggacccggcaacggactcgacaagggggagccggtcaacgcagcagacgcggcggccctcgagcacgacaaggcctacgaccagcagctcaaggccggagacaacccgtacctcaagtacaaccacgccgacgccgagttccaggagcggctcaaagaagatacgtcttttgggggtaacctcgggcgagcagtcttccaggccaaaaagaggcttcttgaacctcttggtctggttgaggaagcggctaagacggctcctggaaagaagaggcctgtagagcagtctcctcaggaaccggactcctccgcgggtatcggcaaatcgggtgcacagcccgctaaaaagagactcaatttcggtcagactggcgacacagagtcagtcccagaccctcaaccaatcggagaacctcccgcagccccctcaggtgtgggatctcttacaatggcttcaggtggtggcgcaccagtggcagacaataacgaaggtgccgatggagtgggtagttcctcgggaaattggcattgcgattcccaatggctgggggacagagtcatcaccaccagcacccgaacctgggccctgcccacctacaacaatcacctctacaagcaaatctccaacagcacatctggaggatcttcaaatgacaacgcctacttcggctacagcaccccctgggggtattttgacttcaacagattccactgccacttctcaccacgtgactggcagcgactcatcaacaacaactggggattccggcctaagcgactcaacttcaagctcttcaacattcaggtcaaagaggttacggacaacaatggagtcaagaccgtcgccaataaccttaccagcacggtccaggtcttcacggactcagactatcagctcccgtacgtgctcgggtcggctcacgagggctgcctcccgccgttcccagcggacgttttcatgattcctcagtacgggtatctgacgcttaatgatggaagccaggccgtgggtcgttcgtccttttactgcctggaatatttcccgtcgcaaatgctaagaacgggtaacaacttccagttcagctacgagtttgagaacgtacctttccatagcagctacgctcacagccaaagcctggaccgactaatgaatccactcatcgaccaatacttgtactatctctcaaagactattaacggttctggacagaatcaacaaacgctaaaattcagtgtggccggacccagcaacatggctgtccagggaagaaactacatacctggacccagctaccgacaacaacgtgtctcaaccactgtgactcaaaacaacaacagcgaatttgcttggcctggagcttcttcttgggctctcaatggacgtaatagcttgatgaatcctggacctgctatggccagccacaaagaaggagaggaccgtttctttcctttgtctggatctttaatttttggcaaacaaggaactggaagagacaacgtggatgcggacaaagtcatgataaccaacgaagaagaaattaaaactactaacccggtagcaacggagtcctatggacaagtggccacaaaccaccagagtgcccaagcacaggcgcagaccggctgggttcaaaaccaaggaatacttccgggtatggtttggcaggacagagatgtgtacctgcaaggacccatttgggccaaaattcctcacacggacggcaactttcacccttctccgctgatgggagggtttggaatgaagcacccgcctcctcagatcctcatcaaaaacacacctgtacctgcggatcctccaacggccttcaacaaggacaagctgaactctttcatcacccagtattctactggccaagtcagcgtggagatcgagtgggagctgcagaaggaaaacagcaagcgctggaacccggagatccagtacacttccaactattacaagtctaataatgttgaatttgctgttaatactgaaggtgtatatagtggaccccgccccattggcaccagatacctgactcgtaatctg

SEQ ID NO: 625 - DNA, 2208 bp, Artificial Sequence
  Description of Artificial Sequence: Synthetic polynucleotide
atggctgccgatggttatcttccagattggctcgaggacaaccttagtgaaggaattcgcgagtggtgggctttgaaacctggagcccctcaacccaaggcaaatcaacaacatcaagacaacgctcgaggtcttgtgcttccgggttacaaataccttggacccggcaacggactcgacaagggggagccggtcaacgcagcagacgcggcggccctcgagcacgacaaggcctacgaccagcagctcaaggccggagacaacccgtacctcaagtacaaccacgccgacgccgagttccaggagcggctcaaagaagatacgtcttttgggggcaacctcgggcgagcagtcttccaggccaaaaagaggcttcttgaacctcttggtctggttgaggaagcggctaagacggctcctggaaagaagaggcctgtagagcagtctcctcaggaaccggactcctccgcgggtattggcaaatcgggtgcacagcccgctaaaaagagactcaatttcggtcagactggcgacacagagtcagtcccagaccctcaaccaatcggagaacctcccgcagccccctcaggtgtgggatctcttacaatggcttcaggtggtggcgcaccagtggcagacaataacgaaggtgccgatggagtgggtagttcctcgggaaattggcattgcgattcccaatggctgggggacagagtcatcaccaccagcacccgaacctgggccctgcccacctacaacaatcacctctacaagcaaatctccaacagcacatctggaggatcttcaaatgacaacgcctacttcggctacagcaccccctgggggtattttgacttcaacagattccactgccacttctcaccacgtgactggcagcgactcatcaacaacaactggggattccggcctaagcgactcaacttcaagctcttcaacattcaggtcaaagaggttacggacaacaatggagtcaagaccatcgccaataaccttaccagcacggtccaggtcttcacggactcagactatcagctcccgtacgtgctcgggtcggctcacgagggctgcctcccgccgttcccagcggacgttttcatgattcctcagtacgggtatctgacgcttaatgatggaagccaggccgtgggtcgttcgtccttttactgcctggaatatttcccgtcgcaaatgctaagaacgggtaacaacttccagttcagctacgagtttgagaacgtacctttccatagcagctacgctcacagccaaagcctggaccgactaatgaatccactcatcgaccaatacttgtactatctctcaaagactattaacggttctggacagaatcaacaaacgctaaaattcagtgtggccggacccagcaacatggctgtccagggaagaaactacatacctggacccagctaccgacaacaacgtgtctcaaccactgtgactcaaaacaacaacagcgaatttgcttggcctggagcttcttcttgggctctcaatggacgtaatagcttgatgaatcctggacctgctatggccagccacaaagaaggagaggaccgtttctttcctttgtctggatctttaatttttggcaaacaaggaactggaagagacaacgtggatgcggacaaagtcatgataaccaacgaagaagaaattaaaactactaacccggtagcaacggagtcctatggacaagtggccacaaaccaccagagtgcccaagcacaggcgcagaccggctgggttcaaaaccaaggaatacttccgggtatggtttggcaggacagagatgtgtacctgcaaggacccatttgggccaaaattcctcacacggacggcaactttcacccttctccgctgatgggagggtttggaatgaagcacccgcctcctcagatcctcatcaaaaacacacctgtacctgcggatcctccaacggccttcaacaaggacaagctgaactctttcatcacccagtattctactggccaagtcagcgtggagatcgagtgggagctgcagaaggaaaacagcaagcgctggaacccggagatccagtacacttccaactattacaagtctaataatgttgaatttgctgttaatactgaaggtgtatatagtgaaccccgccccattggcaccagatacctgactcgtaatctg

SEQ ID NO: 626 - DNA, 2208 bp, Artificial Sequence
  Description of Artificial Sequence: Synthetic polynucleotide
atggctgccgatggttatcttccagattggctcgaggacaaccttagtgaaggaattcgcgagtggtgggctttgaaacctggagcccctcaacccaaggcaaatcaacaacgtcaagacaacgctcgaggtcttgtgcttccgggttacaaataccttggacccggcaacggactcgacaagggggagccggtcaacgcagcagacgcggcggccctcgagcacgacaaggcctacgaccagcagctcaaggccggaggcaacccgtgcctcaagtacaaccacgccgacgccgagttccaggagcggctcaaagaagatacgtcttttgggggcaacctcgggcgagcagtcttccaggccaaaaagaggcttcttgaacctcttggtctggttgaggaagcggctaagacggctcctggaaagaagaggcctgtagagcagtctcctcaggaaccggactcctccgcgggtattggcagatcgggtgcacagcccgctaaaaagagactcaatttcggtcagactggcgacacagagtcagtcccagaccctcaaccaatcggagaacctcccgcagccccctcaggtgtgggatctcttacaatggcttcaggtggtggcgcaccagtggcagacaataacgaaggtgccgatggagtgggtagttcctcgggaaattggcattgcgattcccaatggctgggggacagagtcatcaccaccagcacccgaacctgggccctgcccacctacaacaatcacctctacaagcaaatctccaacagcacatctggaggatcttcaaatgacaacgcctacttcggctacagcaccccctgggggtattttgacttcaacagattccactgccacttctcaccacgtgactggcagcgactcatcaacaacaactggggattccggcctaagcgactcaacttcaagctcttcaacattcaggtcaaagaggttacggacaacaatggagtcaaggccatcgccaataaccttaccagcacggtccaggtcttcacggactcagactatcagctcccgtacgtgctcgggtcggctcacgagggctgcctcccgccgttcccagcggacgttttcatgattcctcagtacgggtatctgacgcttaatgatggaagccaggccgtgggtcgttcgtccttttactgcctggaatatttcccgtcgcaaatgctaagaacgggtaacaacttccagttcagctacgagtttgagaacgtacctttccatagcagctacgctcacagccaaagcctggaccgactaatgaatccactcatcgaccaatacttgtactatctctcaaagactattgacggttctggacagaatcaacaaacgctaaaattcagtgtggccggacccagcaacatggctgtccagggaagaaactacatacctggacccagctaccgacaacaacgtgtctcaaccactgtgactcaaaacaacaacagcgaatttgcttggcctggagcttcttcttgggctctcaatggacgtaatagcttgatggatcctggacctgctatggccagccacaaagaaggagaggaccgtttctttcctttgtctggatctttaatttttggcaaacaaggaactggaagagacaacgtggatgcggacaaagtcatgataaccaacgaagaagaaattaaaactactaacccggtagcaacggagtcctatggacaagtggccacaaaccaccagagtgcccaagcacaggcgcagaccggctgggttcaaaaccaaggaatacttccgggtatggtttggcaggacagagatgtgtacctgcaaggacccatttgggccaaaattcctcacacgggcggcaactttcacccttctccgctgatgggagggtttggaatgaagcacccgcctcctcagatcctcatcaaaaacacacctgtacctgcggatcctccaacggccttcaacaaggacaagctgaactctttcatcacccagtattctactggccaagtcagcgtggagatcgagtgggagctgcagaaggaaaacagcaagcgctggaacccggagatccagtacacttccaactattacaagtctaataatgttgaatttgctgttaatactgaaggtgtatatagtgaaccccgccccattggcaccagatacctgactcgtaatctg

SEQ ID NO: 627 - DNA, 2208 bp, Artificial Sequence
  Description of Artificial Sequence: Synthetic polynucleotide
atggctgccgatggttatcttccagattggctcgaggacaaccttagtgaaggaattcgcgagtggtgggctttgaaacctggagcccctcaacccaaggcaaatcaacaacatcaagacaacgctcgaggtcttgtgcttccgggttacaaataccttggacccggcaacggactcgacaagggggagccggtcaacgcagcagacgcggcggccctcgagcacgacaaggcctacgaccagcagctcaaggccggagacaacccgtacctcaagtacaaccacgccgacgccgagttccaggagcggctcaaagaagatacgtcttttgggggcaacctcgggcgagcagtcttccaggccaaaaagaggcttcttgaacctcttggtctggttgaggaagcggctaagacggctcctggaaagaagaggcctgtagagcagtctcctcaggaaccggactcctccgcgggtattggcaaatcgggtgcacagcccgctaaaaagagactcaatttcggtcagactggcgacacagagtcagtcccagaccctcaaccaatcggagaacctcccgcagccccctcaggtgtgggatctcttacaatggcttcaggtggtggcgcaccagtggcagacaataacgaaggtgccgatggagtgggtagttcctcgggaaattggcattgcgattcccaatggctgggggacagagtcatcaccaccagcacccgaacctgggccctgcccacctacaacaatcacctctacaagcaaatctccaacagcacatctggaggatcttcaaatgacaacgcctacttcggctacagcaccccctgggggtattttgacttcaacagattccactgccacttctcaccacgtgactggcagcgactcatcaacaacaactggggattccggcctaagcgactcaacttcaagctcttcaacattcaggtcaaagaggttacggacaacaatggagtcaagaccatcgccaataaccttaccagcacggtccaggtcttcacggactcagactatcagctcccgtacgtgctcgggtcggctcacgagggctgcctcccgccgttcccagcggacgttttcatgattcctcagtacgggtatctgacgcttaatgatggaagccaggccgtgggtcgttcgtccttttactgcctggaatatttcccgtcgcaaatgctaagaacgggtaacaacttccagttcagctacgagtttgagaacgtacctttccatagcagctacgctcacagccaaagcctggaccgactaatgaatccactcatcgaccaatacttgtactatctctcaaagactattaacggttctggacagaatcaacaaacgctaaaattcagtgtggccggacccagcaacatggctgtccagggaagaaactacatacctggacccagctaccgacaacaacgtgtctcaaccactgtgactcaaaacaacaacagcgaatttgcttggcctggagcttcttcttgggctctcaatggacgtaatagcttgatgaatcctggacctgctatggccagccacaaagaaggagaggaccgtttctttcctttgtctggatctttaatttttggcaaacaaggaactggaagagacaacgtggatgcggacaaagtcatgataaccaacgaagaagaaattaaaactactaacccggtagcaacggagtcctatggacaagtggccacaaaccaccagagtgcccaagcacaggcgcagaccggctgggttcaaaaccaaggaatacttccgggtatggtttggcaggacagagatgtgtacctgcaaggacccatttgggccaaaattcctcacacggacggcaactttcacccttctccgctgatgggagggtttggaatgaagcacccgcctcctcagatcctcatcaaaaacacacctgtacctgcggatcctccaacggccttcaacaaggacaagctgaactctttcatcacccagtattctactggccaagtcagcgtggagatcgagtgggagctgcagaaggaaaacagcaagcgctggaacccggagatccagtacacttccaactattacaagcctaataatgttgaatttgctgttaatactgaaggtgtatatagtgaaccccgccccattggcaccagatacctgactcgtaatctg

SEQ ID NO: 628 - DNA, 2208 bp, Artificial Sequence
  Description of Artificial Sequence: Synthetic polynucleotide
atggctgccgatggttatcttccagattggctcgaggacaaccttagtgaaggaattcgcgagtggtgggctttgaaacctggagcccctcaacccaaggcaaatcaacaacatcaagacaacgctcgaggtcttgtgcttccgggttacaaataccttggacccggcaacggactcgacaagggggagccggtcaacgcagcagacgcggcggccctcgagcacaacaaggcctacgaccagcagctcaaggccggagacaacccgtacctcaagtgcaaccacgccgacgccgagttccaggagcggctcaaagaagatacgtcttttgggggcaacctcgggcgagcagtcttccaggccaaaaagaggcctcttgaacctcttggtctggttgaggaagcggctaagacggctcctggaaagaagaggcctgtagagcagtctcctcaggaaccggactcctccgcgggtattggcaaatcgggtgcacagcccgctaaaaagagactcaatttcggtcagactggcgacacagagtcagtcccagaccctcaaccaatcggagaacctcccgcagccccctcaggtgtgagatctcttacaatggcttcaggtggtggcgcaccagtggcagacaataacgaaggtgccgatggagtgggtagttcctcgggaaattggcattgcgattcccaatggctgggggacagagtcatcaccaccagcacccgaacctgggccctgcccacctacaacaatcacctctacaagcaaatctccaacagcacatctggaggatcttcaaatgacaacgcctacctcggctacagcaccccctgggggtattttgacttcaacagattccactgccacttctcaccacgtgactggcagcgactcatcaacaacaactggggattccggcctaagcgactcaacttcaagctcttcaacattcaggtcaaagaggttacggacaacaatggagtcaagaccatcgccaataaccttaccagcacggtccaggtcttcacggactcagactatcagctcccgtacgtgctcgggtcggctcacgagggctgcctcccgccgttcccagcggacgttttcatgattcctcagtacgggtatctgacgcttaatgatggaagccaggccgtgggtcgttcgtccttttactgcctggaatatttcccgtcgcaaatgctaagaacgggtaacaacttccagttcagctacgagtttgagaacgtacctttccatagcagctacgctcacagccaaagcctggaccgactaatgaatccactcatcgaccaatacttgtactatctctcaaagactattaacggttctggacagaatcaacaaacgctaaaattcagtgtggccggacccagcaacatggctgtccagggaagaaactacatacctggacccagctaccgacaacaacgtgtctcaaccactgtgactcaaaacaacaacagcgaatttgcttggcctggagcttcttcttgggctctcaatggacgtaatagcttgatgaatcctggacctactatggccagccacaaagaaggagaggaccgtttctttcctttgtctggatctttaatttttggcaaacaaggaactggaagagacaacgtggatgcggacaaagtcatgataaccaacgaagaagaaattaaaactactaacccggtagcaacggagtcctatggacaagtggccacaaaccaccagagtgcccaagcacaggcgcagaccggctgggttcaaaaccaaggaatacttccgggtatggtttggcaggacagagatgtgtacctgcaaggacccatttgggccaaaattcctcacacggacggcaactttcacccttctccgctgatgggagggtttggaatgaagcacccgcctcctcagatcctcatcaaaaacacacctgtacctgcggatcctccaacggccttcaacaaggacaagctgaactctttcatcacccagtattctactggccaagtcagcgtggagatcgagtgggagctgcagaaggaaaacagcaagcgctggaacccggagatccagtacacttccaactattacaagtctaataatgttgaatttgctgttaatactgaaggtgtatatagtgaaccccgccccattggcaccagatacctgactcgtaatctg

SEQ ID NO: 629 - DNA, 2208 bp, Artificial Sequence
  Description of Artificial Sequence: Synthetic polynucleotide
atggctgccgatggttatcttccagattggctcgaggacaaccttagtgaaggaattcgcgagtggtgggctttgaaacctggagcccctcaacccaaggcaaatcaacaacatcaagacaacgctcgaggtcttgtgcttccgggttacaaataccttggacccggcaacggactcgacaagggggagccggtcaacgcagcagacgcggcggccctcgtgcacgacaaggcctacgaccagcagctcaaggccggagacaacccgtacctcaagtgcaaccacgccgacgccgagttccaggagcggctcaaagaagatacgtcttttgggggcaacctcgggcgagcagtcttccaggccaaaaagaggcttcttgaacctcttggtctggttgaggaagcggctaagacggctcctggaaagaagaggcctgtagagcagtctcctcaggaaccggactcctccgcgggtattggcaaatcgggtgcacagcccgctaaaaagagactcaatttcggtcagactggcgacacagagtcagtcccagaccctcaaccaatcggagaacctcccgcagccccctcaggtgtgggatctcttacaatggcttcaggtggtggcgcaccagtggcagacaataacgaaggtgccgatggagtgggtagttcctcgggaaattggcattgcgattcccaatggctgggggacagagtcatcaccaccagcacccgaacctgggccctgcccacctacaacaatcacctctacaagcaaatctccaacagcacatctggaggatcttcaaatgacaacgcctacctcggctacagcaccccctgggggtattttgacttcaacagattccactgccacttctcaccacgtgactggcagcgactcatcaacaacaactggggattccggcctaagcgactcaacttcaagctcttcaacattcaggtcaaagaggttacggacaacaatggagtcaagaccatcgccaataaccttaccagcacggtccaggtcttcacggactcagactatcagctcccgtacgtgctcgggtcggctcacgagggctgcctcccgccgttcccagcggacgttttcacgattcctcagtacgggtatctgacgcttaatgatggaagccaggccgtgggtcgttcgtccttttactgcctggaatatttcccgtcgcaaatgctaagaacgggtaacaacttccagttcagctacgagtttgagaacgtacctttccatagcagctacgctcacagccaaagcctggaccgactaatgaatccactcatcgaccaatacttgtactatctctcaaagactattaacggttctggacagaatcaacaaacgctaaaattcagtgtggccggacccagcaacatggctgtccagggaagaaactacatacctggacccagctaccgacaacaacgtgtctcaaccactgtgactcaaaacaacaacagcgaatttgcttggcctggagcttcttcttgggctctcaatggacgtaatagcttgatgaatcctggacctgctatggccagccacaaagaaggagaggaccgtttctttcctttgtctggatctttaatttttggcaaacaaggaactggaagagacaacgtggatgcggacaaagtcatgataaccaacgaagaagaaattaaaactactaacccggtagcaacggagtcctatggacaagtggccacaaaccaccagagtgcccaagcacaggcgcagaccggctgggttcaaaaccaaggaatacttccgggtatggtttggcaggacagagatgtgtacctgcaaggacccatttgggccaaaattcctcacacggacggcaactttcacccttctccgctgatgggagggtttggaatgaagcacccgcctcctcagatcctcatcaaaaacacacctgtacctgcggatcctccaacggccttcaacaaggacaagctgaactctttcatcacccagtattctactggccaagtcagcgtggagatcgagtgggagctgcagaaggaaaacagcaagcgctggaacccggagatccagtacacttccaactattacaagtctaataatgttgaatttgctgttaatactgaaggtgtatatagtgaaccccgccccattgggccccgatacctgactcgtaatttt

SEQ ID NO: 630 - DNA, 2208 bp, Artificial Sequence
  Description of Artificial Sequence: Synthetic polynucleotide
atggctgccgatggttatcttccagattggctcgaggacaaccttagtgaaggaattcgcgagtggtgggctttgaaacctggagcccctcaacccaaggcaaatcaacaacatcaagacaacgctcgaggtcttgtgcttccgggttacaaataccttggacccggcaacggactcgacaagggggagccggtcaacgcagcagacgcggcggccctcgagcacaacaaggcctacgaccagcagctcaaggccggagacaacccgtacctcaagtgcaaccacgccgacgccgagttccaggagcggctcaaagaagatacgtcttttgggggcaacctcgggcgagcagtcttccaggccaaaaagaggcttcttgaacctcttggtctggttgaggaagcggctaagacggctcctggaaagaagaggcctgtagagcagtctcctcaggaaccggactcctccgcgggtattggcaaatcgggtgcacagcccgctaaaaagagactcaatttcggtcagactggcgacacagagtcagtcccagaccctcaaccaatcggagaacctcccgcagccccctcaggtgtgagatctcttacaatggcttcaggtggtggcgcaccagtggcagacaataacgaaggtgccgatggagtgggtagttcctcgggaaattggcattgcgattcccaatggctgggggacagagtcatcaccaccagcacccgaacctgggccctgcccacctacaacaatcacctctacaagcaaatctccaacagcacatctggaggatcttcaaatgacaacgcctacctcggctacagcaccccctgggggtattttgacttcaacagattccactgccacttctcaccacgtgactggcagcgactcatcaacaacaactggggattccggcctaagcgactcaacttcaagctcttcaacattcaggtcaaagaggttacggacaacaatggagtcaagaccatcgccaataaccttaccagcacggtccaggtcttcacggactcagactatcagctcccgtacgtgctcgggtcggctcacgagggctgcctcccgccgttcccagcggacgttttcatgattcctcagtacgggtatctgacgcttaatgatggaagccaggccgtgggtcgttcgtccttttactgcctggaatatttcccgtcgcaaatgctaagaacgggtaacaacttccagttcagctacgagtttgagaacgtacctttccatagcagctacgctcacagccaaagcctggaccgactaatgaatccactcatcgaccaatacttgtactatctctcaaagactattaacggttctggacagaatcaacaaacgctaaaattcagtgtggccggacccagcaacatggctgtccagggaagaaactacatacctggacccagctaccgacaacaacgtgtctcaaccactgtgactcaaaacaacaacagcgaatttgcttggcctggagcttcttcttgggctctcaatggacgtaatagcttgatgaatcctggacctgctatggccagccacaaagaaggagaggaccgtttctttcctttgtctggatctttaatttttggcaaacaaggaactggaagagacaacgtggatgcggacaaagtcatgataaccaacgaagaagaaattaaaactactaacccggtagcaacggagtcctatggacaagtggccacaaaccaccagagtgcccaagcacaggcgcagaccggctgggttcaaaaccaaggaatacttccgggtatggtttggcaggacagagatgtgtacctgcaaggacccatttgggccaaaattcctcacacggacggcaactttcacccttctccgctgatgggagggtttggaatgaagcacccgcctcctcagatcctcatcaaaaacacacctgtacctgcggatcctccaacggccttcaacaaggacaagctgaactctttcatcacccagtattctactggccaagtcagcgtggagatcgagtgggagctgcagaaggaaaacagcaagcgctggaacccggagatccagtacacttccaactattacaagtctaataatgttgaatttgctgttaatactgaaggtgtatatagtgaaccccgccccattggcaccagatacctgactcgtaatctg

SEQ ID NO: 631 - DNA, 2208 bp, Artificial Sequence
  Description of Artificial Sequence: Synthetic polynucleotide
atggctgccgatggttatcttccagattggctcgaggacaaccttagtgaaggaattcgcgagtggtgggctttgaaacctggagcccctcaacccaaggcaaatcaacaacatcaagacaacgctcgaggtcttgtgcttccgggttacaaataccttggacccggcaacggactcgacaagggggagccggtcaacgcagcagacgcggcggccctcgagcacgacaaggcctacgaccagcagctcaaggccggagacaacccgtacctcaagtgcaaccacgccgacgccgagttccaggagcggctcaaagaagatacgtcttttgggggcaacctcgggcgagcagtcttccaggccaaaaagaggcttcttgaacctcttggtctggttgaggaagcggctaagacggctcctggaaagaagaggcctgtagagcagtctcctcaggaaccggactcctccgcgggtattggcaaatcgggtgcacagcccgctaaaaagagactcaatttcggtcagactggcgacacagagtcagtcccagaccctcaaccaatcggagaacctcccgcagccccctcaggtgtgggatctcttacaatggcttcaggcggtggcgcaccagtggcagacaataacgaaggtgccgatggagtgggtagttcctcgggaaattggcattgcgattcccaatggctgggggacagagtcatcaccaccagcacccgaacctgggccctgcccacctacaacaatcacctctacaagcaaatctccaacagcacatctggaggatcttcaaatgacaacgcctacctcggctacagcaccccctgggggtattttgacttcaacagattccactgccacttctcaccacgtgactggcagcgactcatcaacaacaactggggattccggcctaagcgactcaacttcgagctcttcaacattcaggtcaaagaggttacggacaacaatggagtcaagaccatcgccaataaccttaccagcacggtccaggtcttcacggactcagactatcagctcccgtacgtgctcgggtcggctcacgagggctgcctcccgccgttcccagcggacgttttcatgattcctcagtacgggtatctgacgcttaatgatggaagccaggccgtgggtcgttcgtccttttactgcctggaatatttcccgtcgcaaatgctaagaacgggtaacaacttccagtccagctacgagtttgagaacgtacctttccatagcagctacgctcacagccaaagcctggaccgactaatgaatccactcatcgaccaatacttgtactatctctcaaagactattaacggttctggacagaatcaacaaacgctaaaattcagtgtggccggacccagcaacatggctgtccagggaagaaactacatacctggacccagctaccgacaacaacgtgcctcaaccactgtgactcaaaacaacaacagcgaatttgcttggcctggagcttcttcttgggctctcaatggacgtaatagcttgatgaatcctggacctgctatggccagccacaaagaaggggaggaccgtttctttcctttgtctggatctttaatttttggcaaacaaggaactggaagagacaacgtggatgcggacaaagtcatgataaccaacgaagaagaaattaaaactactaacccggtagcaacggagtcctatggacaagtggccacaaaccaccagagtgcccaagcacaggcgcagaccggctgggttcaaaaccaaggaatacttccgggtatggtttggcaggacagagatgtgtacctgcaaggacccatttgggccaaaattcctcacacggacggcaactttcacccttctccgctgatgggagggtttggaatgaagcacccgcctcctcagatcctcatcaaaaacacacctgtacctgcggatcctccaacggccttcaacaaggacaagctgaactctttcatcacccagtattctactggccaagtcagcgtggagatcgagtgggagctgcagaaggaaaacagcaagcgctggaacccggagatccagtacacttccaactattacaagtctaataatgttgaatttgctgttaatactgaaggtgtatatagtgaaccccgccccattggcaccagatacctgactcgtaatctg

SEQ ID NO: 632 - DNA, 2208 bp, Artificial Sequence
  Description of Artificial Sequence: Synthetic polynucleotide
atggctgccgatggttatcttccagattggctcgaggacaaccttagtgaaggaattcgcgagtggtgggctttgaaacctggagcccctcaacccaaggcaaatcaacaacatcaagacaacgctcgaggtcttgtgcttccgggttacaaataccttggacccggcaacggactcgacaagggggagccggtcaacgcagcagacgcggcggccctcgagcacgacaaggcctacgaccagcagctcaaggccggagacaacccgtacctcaagtgcaaccacgccgacgccgagttccaggagcggctcaaagaagatacgtcttttgggggcaacctcgggcgagcagtcttccaggccaaaaagaggcttcttgaacctcttggtctggttgaggaagcggctaagacggctcctggaaagaagaggcctgtagagcagtctcctcaggaaccggactcctccgcgggtattggcaaatcgggtgcacagcccgctaaaaagagactcaatttcggtcagactggcgacacagagtcagtcccagaccctcaaccaatcggagaacctcccgcagcccccccaggtgtgggatctcttacaatggcttcaggtggtggcgcaccagtggcggacaataacgaaggtgccgatggagtgggtagttcctcgggaaattggcattgcgattcccaatggctgggggacagagtcatcaccaccagcacccgaacctgggccctgcccacctacaacaatcacctctacaagcaaatctccaacagcacatctggaggatcttcaaatgacaacgcctacctcggctacagcaccccctgggggtattttgacttcaacagattccactgccacttctcaccacgtgactggcagcgactcatcaacaacaactggggattccggcctaagcgactcaacttcaagctcttcaacattcaggtcaaagaggttacggacaacaatggagtcaagaccatcgccaataaccttaccagcacggtccaggtcttcacggactcagactatcagctcccgtacgtgctcgggtcggctcacgagggctgcctcccgccgttcccagcggacgttttcatgattcctcagtacgggtatctgacgcttaatgatggaagccaggccgtgggtcgttcgtccttttactgcctggaatatttcccgtcgcaaatgctaagaacgggtaacaacttccagttcagctacgagtttgagaacgtacctttccatagcagctacgctcacagccaaagcctggaccgactaatgaatccactcatcgaccaatacttgtactatctctcaaagactattagcggttctggacagaatcaacaaacgctaaaattcagtgtggccggacccagcaacatggctgtccagggaagaaactacatacctggacccagctaccgacaacaacgtgtctcaaccactgtgactcaaaacaacagcagcgaatttgcttggcctggagcttcttcttgggctctcaatggacgtaatagcttgatgaatcctggacctgctatggccagccacaaagaaggagaggaccgtttctttcctttgtctggatctttaatttttggcaaacaaggaactggaagagacaacgtggatgcggacaaagtcatgataaccaacgaagaagaaattaaaactactaacccggtagcaacggagtcctatggacaagtggccacaaaccaccagagtgcccaagcacaggcgcagaccggctgggttcaaaaccaaggaatactttcgggtatggtttggcaggacagagatgtgtacctgcaaggacccatttgggccaaaattcctcacacggacggcaactttcacccttctccgctgatgggagggtttggaatgaagcacccgcctcctcagatcctcatcaaaaacacacctgtacctgcggatcctccaacggccttcaacaaggacaagctgaactctttcatcacccagtattctactggccaagtcagcgtggagatcgagtgggagctgcagaaggaaaacagcaagcgctggaacccggagatccagtacacttccaactattacaagtctaataatgttgaatttgctgttaatactgaaggtgtatatagtgaaccccgccccattggcaccagatacctgactcgtaatctg

SEQ ID NO: 633 - DNA, 2208 bp, Artificial Sequence
  Description of Artificial Sequence: Synthetic polynucleotide
atggctgccgatggttatcttccagattggctcgaggacaaccttagtgaaggaattcgcgagtggtgggctttgaaacctggagcccctcaacccaaggcaaatcaacaacatcaagacaacgctcgaggtcttgtgcttccgggttacaaataccttggacccggcaacggactcgacaagggggagccggtcaacgcagcagacgcggcggccctcgagcacgacaaggcctacgaccagcagctcaaggccggagacaacccgtacctcaagtgcaaccacgccgacgccgagttccaggagcggctcaaagaagatacgtcttttgggggcaacctcgggcgagcagtcttccaggccaaaaagaggcttcttgaacctcttggtctggttgaggaagcggctaagacggctcctggaaagaagaggcctgtagagcagtctcctcaggaaccggactcctccgcgggtattggcaaatcgggtgcacagcccgctaaaaagagactcaatttcggtcagactggcgacacagagtcagtcccagaccctcaaccaatcggagaacctcccgcagccccctcaggtgtgggatctcttacaatggcttcaggtggtggcgcaccagtggcagacaataacgaaggtgccgatggagtgggtagttcctcgggaaattggcattgcgattcccaatggctgggggacagagtcatcaccaccagcacccgaacctgggccctgcccacctacaacaatcacctctacaagcaaatctccaacagcacatctggaggatcttcaaatgacaacgcctacctcggctacagcaccccctgggggtattttgacttcaacagattccactgccacttctcaccacgtgactggcagcgactcatcaacaacaactggggattccggcctaagcgactcaacttcaagctcttcaacattcaggtcaaagaggttacggacaacaatggagtcaagaccatcgccaataaccttaccagcacggtccaggtcttcacggactcagactatcagctcccgtacgtgctcgggtcggctcacgagggctgcctcccgccgttcccagcggacgttttcatgattcctcagtacgggtatctgacgcttaatgatggaagccaggccgtgggtcgttcgtccttttactgcctggaatatttcccgtcgcaaatgctaagaacgggtaacaacttccagttcagctacgagtttgagaacgtacctttccatagcagctacgctcacagccaaagcctggaccgactaatgaatccactcatcgaccaatacttgtactatctctcaaagactattaacggttctggacagaatcaacaaacgctaaaattcagtgtggccggacccagcaacatggctgtccagggaagaaactacatacctggacccagctaccgacaacaacgtgtctcaaccactgtgactcaaaacaacaacagcgaatttgcttggcctggagcttcttcttgggctctcaatggacgtaatagcttgatgaatcctggacctgctatggccagccacaaagaaggagaggaccgtttctttcctttgtctggatctttaatttttggcaaacaaggaactggaagagacaacgtggatgcggacaaagtcatgataaccaacgaagaagaaattaaaactactaacccggtagcaacggagtcctatggacaagtggccacaaaccaccagagtgcccaagcacaggcgcagaccggctgggttcaaaaccaaggaatacttccgggtatggtttggcaggacagagatgtgtacctgcaaggacccatttgggccaaaattcctcacacggacggcaactttcacccttctccgctgatgggagggtttggaatgaagcacccgcctcctcagatcctcatcaaaaacacacctgtacctgcggatcctccaacggccttcaacaaggacaagctgaactctttcatcacccagtattctactggccaagtcagcgtggagatcgagtgggagctgcagaaggaaaacagcaagcgctggaacccggagatccagtacacttccaactattacaagtctaataatgttgaatttgctgttaatactgaaggtgtatatagtgaaccccgccccattggcaccagatacctgactcgtaatctg

SEQ ID NO: 634 - DNA, 2208 bp, Artificial Sequence; identical to SEQ ID NO: 633
  Description of Artificial Sequence: Synthetic polynucleotide

SEQ ID NO: 635 - DNA, 2208 bp, Artificial Sequence
  Description of Artificial Sequence: Synthetic polynucleotide
atggctgccgatggttatcttccagattggctcgaggacaaccttagtgaaggaattcgcgagtggtgggctttgaaacctggagcccctcaacccaaggcaaatcaacaacatcaagacaacgctcgaggtcttgtgcttccgggttacaaataccttggacccggcaacggactcgacaagggggagccggtcaacgcagcagacgcggcggccctcgagcacgacaaggcctacgaccagcagctcaaggccggagacaacccgtacctcaagtgcaaccacgccgacgccgagttccaggagcggctcaaagaagatacgtcttttgggggcaacctcgggcgagcagtcttccaggccaaaaagaggcttcttgaacctcttggtctggttgaggaagcggctaagacggctcctggaaagaagaggcctgtagagcagtctcctcaggaaccggactcctccgcgggtattggcaaatcgggtgcacagcccgctaaaaagagactcaatttcggtcagactggcgacacagagtcagtcccagaccctcaaccaatcggagaacctcccgcagccccctcaggtgtgggatctcttacaatggcttcaggtggtggcgcaccagtggcagacaataacgaaggtgccgatggagtgggtagttcctcgggaaattggcattgcgattcccaatggctgggggacagagtcatcaccaccagcacccgaacctgggccctgcccacctacaacaatcacctctacaagcaaatctccaacagcacatctggaggatcttcaaatgacaacgcctacctcgactacagcaccccctgggggtattttgacttcaacagattccactgccacttctcaccacgtgactggcagcggctcatcaacaacaactggggattccggcctaagcgactcaacttcaagctcttcaacattcaggtcaaagaggttacggacaacaatggagtcaagaccatcgccaataaccttaccagcacggtccaggtcttcacggactcagactatcagctcccgtacgtgctcgggtcggctcacgagggctgcctcccgccgttcccagcggacgttttcatgattcctcagtacgggtatctgacgcttaatgatggaagccaggccgtgggtcgttcgtccttttactgcctggaatatttcccgtcgcaaatgctaagaacgggtaacaacttccagttcagctacgagtttgagaacgtacctttccatagcagctacgctcacagccaaagcctggaccgactaatgaatccactcatcgaccaatacttgtactatctctcaaagactattaacggttctggacagaatcaacaaacgctaaaattcagtgtggccggacccagcaacatggctgtccagggaagaaactacatacctggacccagctaccgacaacaacgtgtctcaaccactgtgactcaaaacaacaacagcgaatttgcttggcctggagcttcttcttgggctctcaatggacgtaatagcttgatgaatcctggacctgctatggccagccacaaagaaggagaggaccgtttctttcctttgtctggatctttaatttttggcaaacaaggaactggaagagacaacgtggatgcggacaaagtcatgataaccaacgaagaagaaattaaaactactaacccggtagcaacggagtcctatggacaagtggccacaaaccaccagagtgcccaagcacaggcgcagaccggctgggttcaaaaccaaggaatacttccgggtatggtttggcagggcagagatgtgtacctgcaaggacccatttgggccaaaattcctcacacggacggcaactttcacccttctccgctgatgggagggtttggaatgaagcacccgcctcctcagatcctcatcaaaaacacacctgtacctgcggatcctccaacggccttcaacaaggacaagctgaactctttcatcacccagtattctactggccaagtcagcgtggagatcgagtgggagctgcagaaggaaaacagcaagcgctggaacccggagatccagtacacttccaactattacaagtctaataatgttgaatttgctgttaatactgaaggtgtatatagtgaaccccgccccattggcaccagatacctgactcgtaatctg

SEQ ID NO: 636 - DNA, 2208 bp, Artificial Sequence; identical to SEQ ID NO: 633
  Description of Artificial Sequence: Synthetic polynucleotide

SEQ ID NO: 637 - DNA, 2208 bp, Artificial Sequence
  Description of Artificial Sequence: Synthetic polynucleotide
atggctgccgatggttatcctccagattggctcgaggacaaccttagtgaaggaattcgcgagtggtgggctttgaaacctggagcccctcaacccaaggcaaatcaacaacatcaagacaacgctcgaggtcttgtgcttccgggttacaaataccttggacccggcaacggactcgacaagggggagccggtcaacgcagcagacgcggcggccctcgagcacgacaaggcctacgaccagcagctcaaggccggggacaacccgcacctcaagtacaaccacgccgacgccgagttccaggagcggctcaaagaagatacgtcttttgggggcaacctcgggcgagcagtcttccaggccaaaaagaggcttcttgaacctcttggtctggttgaggaagcggctaagacggctcctggaaagaagaggcccgtagagcagtctcctcaggaaccggactcctccgcgggtattggcaaatcgggtgcacagcccgctaagaagagactcaatttcggtcagactggcgacactgagtcagtcccagaccctcaaccaatcggagaacctcccgcagccccctcaggtgtgggatctcttacaatggcttcaggtggtggcgcaccagtggcagacaataacgaaggtgccgatggagtgggtagttcctcgggaaattggcattgcgattcccaatggctgggggacagagtcatcaccaccagcacccgaacctgggccctgcccacctacaacaatcacctctacaagcaaatctccaacagcacatctggaggatcttcaaatgacaacgcctacttcggctacagcaccccctgggggtattttgacttcaacagattccactgccacttctcaccacgtgactggcagcgactcatcaacaacaactggggattccggcctaagcgactcaacttcaagctcttcaacattcaggtcaaagaggttacggacaacaatggagtcaagaccatcgccaataaccttaccagcacggtccaggtcttcacggactcagactatcagctcccgtacgtgctcgggtcggctcacgagggctgcctcccgccgttcccagcggacgttttcatgattcctcagtacgggtatctgacgcttaatgatggaagccaggccgtgggtcgttcgtccttttactgcctggaatatttcccgtcgcaaatgctaagaacgggtaacaacttccagttcagctacgagtttgagaacgtacctttccatagcagctacgctcacagccaaagcctggaccgactaatgaatccactcatcgaccaatacttgtactatctctcaaagactattaacggttctggacagaatcaacaaacgctaaaattcagtgtggccggacccagcaacatggctgtccagggaagaaactacatacctggacccagctaccgacaacaacgtgtctcaaccactgtgactcaaaacaacaacagcgaatttgcttggcctggagcttcttcttgggctctcaatggacgtaatagcttgatgaatcctggacctgctatggccagccacaaagaaggagaggaccgtttctttcctttgtctggatctttaatttttggcaaacaaggaactggaagagacaacgtggatgcggacaaagtcatgataaccaacgaagaagaaattaaaactactaacccggtagcaacggagtcctatggacaagtggccacaaaccaccagagtgcccaagcacaggcgcagaccggctgggttcaaaaccaaggaatacttccgggtatggtttggcaggacagagatgtgtacctgcaaggacccatttgggccaaaattcctcacacggacggcaactttcacccttctccgctgatgggagggtttggagtgaagcacccgcctcctcagatcctcatcaaaaacacacctgtacctgcggatcctccaacggccttcaacaaggacaggctgaactctttcatcacccagtattctactggccaagtcagcgtggagatcgagtgggagctgcagaaggaaaacagcaagcgctggaacccggagatccagtacacttccaactattacaagtctaataatgttgaatttgctgttaatactgaaggtgtatatagtgaaccccgccccattggcaccagatacctgactcgtaatctg

SEQ ID NO: 638 - DNA, 2208 bp, Artificial Sequence
  Description of Artificial Sequence: Synthetic polynucleotide
atggctgccgatggttatcttccagattggctcgaggacaaccttagtgaaggaattcgcgagtggtgggctttgaaacctggagcccctcaacccaaggcaaatcaacaacatcaagacaacgctcgaggtcttgtgcttccgggttacaaataccttggacccggcaacggactcgacaagggggagccggtcaacgcagcagacgcggcggccctcgagcacgacaaggcctacgaccagcagctcaaggccggagacaacccgtacctcaagtacaaccacgccgacgccgagttccaggagcggctcaaagaagatacgtcttttgggggcaacctcgggcgagcagtcttccaggccaaaaagaggcttcttgaacctcttggtctggttgaggaagcggctaagacggctcctggaaagaagaggcctgtagagcagtctcctcaggaaccggactcctccgcgggtattggcaaatcgggtgcacagcccgctaaaaagagactcaatttcggtcagactggcgacacagagtcagtcccagaccctcaaccaatcggagaacctcccgcagccccctcaggtgtgggatctcttacaatggcttcaggtggtggcgcaccagtggcggacaataacgaaggtgccgatggagtgggtagttcctcgggaaattggcattgcgattcccaatggctgggggacagagtcatcaccaccagcacccgaacctgggccctgcccacctacaacaatcacctctacaagcaaatctccaacagcacatctggaggatcttcaaatgacaacgcctacttcggctacagcaccccctgggggtattttgacttcaacagattccactgccacttctcaccacgtgactggcagcgactcatcaacaacaactggggattccggcctaagcgactcaacttcaagctcttcaacattcaggtcaaagaggttacggacaacaatggagtcaagaccatcgccaataaccttaccagcacggtccaggtcttcacggactcagactatcagctcccgtacgtgctcgggtcggctcacgagggctgcctcccgccgttcccagcggacgttttcatgattcctcagtacgggtatctgacgcttaatgatggaagccaggccgtgggtcgttcgtccttttactgcctggaatatttcccgtcgcaaatgctaagaacgggtaacaacttccagttcagctacgagtttgagaacgtacctttccatagcagctacgctcacagccaaagcctggaccgactaatgaatccactcatcgaccaatacttgtactatctctcaaagactattaacggttctggacagaatcaacaaacgctaaaattcagtgtggccggacccagcaacatggctgtccagggaagaaactacatacctggacccagctaccgacaacaacgtgtctcaaccactgtgactcaaaacaacaacagcgaatttgcttggcctggagcttcttcttgggctctcaatggacgtaatagtttgatgaatcctggacctgctatggccagccacaaagaaggagaggaccgtttctttcctttgtctggatctttaatttttggcaaacaaggaactggaagagacaacgtggatgcggacaaagtcatgataaccaacgaagaagaaattaaaactactaacccggtagcaacggagtcctatggacaagtggccacaaaccaccagagtgcccaagcacaggcgcagaccggctgggttcaaaaccaaggaatacttccgggtatggtttggcaggacagagatgtgtacctgcaaggacccatttgggccaaaattcctcacacggacggcaactttcacccttctccgctgatgggagggtttggagtgaagcacccgcctcctcagatcctcatcaaaaacacacctgtacctgcggatcctccaacggccttcaacaaggacaagctgaactctttcatcacccagtattctactggccaagtcagcgtggagatcgagtgggagctgcagaaggaaaacagcaagcgctggaacccggagatccagtacacttccaactattacaagtctaataatgttgaatttgctgttaatactgaaggtgtatatagtgaaccccgccccattggcaccagatacctgactcgtaatctg

SEQ ID NO: 639 - DNA, 2208 bp, Artificial Sequence
  Description of Artificial Sequence: Synthetic polynucleotide
atggctgccgatggttatcttccagattggctcgaggacaaccttagtgaaggaattcgcgagtggtgggctttgaaacctggagcccctcaacccaaggcaaatcaacaacatcaagacaacgctcgaggtcttgtgcttccgggttacaaataccttggacccggcaacggactcgacaagggggagccggtcaacgcagcagacgcggcggccctcgagcacgacaaggcctacgaccagcagctcaaggccggagacaacccgtacctcaagtacaaccacgccgacgccgagttccaggagcggctcaaagaagatacgtcttttgggggcaacctcgggcgagcagtcttccaggccaaaaagaggcttcttgaacctcttggtctggttgaggaagcggctaagacggctcctggaaagaagaggcctgtagagcagtctcctcaggaaccggactcctccgcgggtattggcaaatcgggtgcacagcccgctaaaaagagactcaatttcggtcagactggcgacacagagtcagtcccagaccctcaaccaatcggagaacctcccgcagccccctcaggtgtgggatctcttacaatggcttcaggtggtggcgcaccagtggcagacaataacgaaggtgccgatggagtgggtagttcctcgggaaattggcattgcgattcccaatggctgggggacagagtcatcaccaccagcacccgaacctgggccctgcccacttacaacaatcacctctacaagcaaatctccaacagcacatctggaggatcttcaaatgacaacgcctacttcggctacagcaccccctgggggtattttgacttcaacagattccactgccacttctcaccacgtgactggcagcgactcaccaacaacaactggggattccggcctaagcgactcaacttcaagctcttcaacattcaggtcaaagaggttacggacaacaatggagtcaagaccatcgccaataaccttaccagcacggtccaggtcttcacggactcagactatcagctcccgtacgtgctcgggtcggctcacgagggctgcctcccgccgttcccagcggacgttttcatgattcctcagtacgggtatctgacgcttaatgatggaagccaggccgtgggtcgttcgtccttttactgcctggaatatatcccgtcgcaaatgctaagaacgggtaacaacttccagttcagctacgagtttgagaacgtacctttccatagcagctacgctcacagccaaagcctggaccgactaatgaatccactcatcgaccaatacttgtactatctctcaaagactattaacggttctggacagaatcaacaaacgctaaaattcagtgtggccggacccagcaacatggctgtccagggaagaaactacatacctggacccagctaccgacaacaacgtgtctcaaccactgtgactcaaaacaacaacagcgaatttgcttggcctggagcttcttcttgggctctcaatggacgtaatagcttgatgaatcctggacctgctatggccagccacaaagaaggagaggaccgtttctttcctttgtctggatctttaatttttggcaaacaaggaactggaagagacaacgtggatgcggacaaagtcatgataaccaacgaagaagaaattaaaactactaacccggtagcaacggagtcctatggacaagtggccacaaaccaccagagtgcccaagcacaggcgcagaccggctgggttcaaaaccaaggaatacttccgggtatggtttggcaggacagagatgtgtacctgcaaggacccatttgggccaaaattcctcacacggacggcaactttcacccttctccgctgatgggagggtttggagtgaagcacccgcctcctcagatcctcatcaaaaacacacctgtacctgcggatcctccaacggccttcaacaaggacaagctgaactctttcatcacccagtattctactggccaagtcagcgtggagatcgagtgggagctgcagaaggaaaacagcaagcgctggaacccggagatccagtacacttccaactattacaagtctaataatgttgaatttgctgttaatactgaaggtgtatatagtgaaccccgccccattggcaccagatacctgactcgtaatctg

SEQ ID NO: 640 - DNA, 2208 bp, Artificial Sequence
  Description of Artificial Sequence: Synthetic polynucleotide
atggctgccgatggttatcttccagattggctcgaggacaaccttagtgaaggaattcgcgagtggtgggctttgaaacctggagcccctcaacccaaggcaaatcaacaacatcaagacaacgctcgaggtcttgtgcttccgggttacaaataccttggacccggcaacggactcgacaagggggagccggtcaacgcagcagacgcggcggccctcgagcacgacaaggcctacgaccagcagctcaaggccggagacaacccgtacctcaagtacaaccacgccgacgccgagttccaggagcggctcaaagaagatacgtcttttgggggcaacctcgggcgagcagtcttccaggccaaaaagaggcttcttgaacctcttggtctggttgaggaagcggctaagacggctcctggaaagaagaggcctgtagagcagtctcctcaggaaccggactcctccgcgggtattggcaaatcgggtgcacagcccgctaaaaagagactcaatttcggtcagactggcgacacagagtcagtcccagaccctcaaccaatcggagaacctcccgcagccccctcaggtgtgggatctcttacaatggcttcaggtggtggcgcaccagtggcagacaataacgaaggtgccgatggagtgggtagttcctcgggaaattggcattgcgattcccaatggctgggggacagagtcatcaccaccagcacccgaacctgggccctgcccacctacaacaatcacctctacaagcaaatctccaacagcacatctggaggatcttcaaatgacaacgcctacttcggctacagcaccccctgggggtattttgacttcaacagattccactgccacttctcaccacgtgactggcagcgactcatcaacaacaactggggattccggcctaagcgactcaacttcaagctcttcaacattcaggtcaaagaggttacggacaacaatggagtcaagaccatcgccaataaccttaccagcacggtccaggtcttcacggactcagactatcagctcccgtacgtgctcgggtcggctcacgagggctgcctcccgccgttcccagcggacgttttcatgattcctcagtacgggtatctgacgcttaatgatggaagccaggccgtgggtcgttcgtccttttactgcctggaatatttcccgtcgcaaatgctaagaacgggtaacaacttccagtttagctacgagtttgagaacgtacctttccatagcagctacgctcacagccaaagcctggaccgactaatgaatccactcatcgaccaatacttgtactatctctcaaagactattaacggttctggacagaatcaacaaacgctaaaattcagtgtggccggacccagcaacatggctgtccagggaagaaactacatacctggacccagctaccgacaacaacgtgtctcaaccactgtgactcaaaacaacaacagcgaatttgcttggcctggagcttcttcttgggctctcaatggacgtaatagcttgatgaatcctggacctgctatggccagccacaaagaaggagaggaccgtttctttcctttgtctggatctttaatttctggcaaacaaggaactggaagagacaacgtggatgcgaacaaagtcatgataaccaacgaagaagaaattaaaactactaacccggtagcaacggagtcctatggacaagtggccacaaaccaccagagtgcccaagcacaggcgcagaccggctgggttcaaaaccaaggaatacttccgggtatggtttggcaggacagagatgtgtacctgcaaggacccatttgggccaaaattcctcacacggacggcaactttcacccttctccgctgatgggagggtttgaaatgaagcacccgcctcctcagatcctcatcaaaaacacacctgtacctgcggatcctccaacggccttcaacaaggacaagctgaactctttcatcacccagtattctactggccaagtcagcgtggagatcgagtgggagctgcagaaggaaaacagcaagcgctggaacccggagatccagtacacttccaactattacaagtctaataatgttgaatttgctgttaatactgaaggtgtatatagtgaaccccgccccattggcaccagatacctgactcgtaatctg

SEQ ID NO: 641 - DNA, 2208 bp, Artificial Sequence
  Description of Artificial Sequence: Synthetic polynucleotide
atggctgccgatggttatcttccagattggctcgaggacaaccttagtgaaggaattcgcgagtggtgggctttgaaacctggagcccctcaacccaaggcaaatcaacaacatcaagacaacgctcgaggtcttgtgcttccgggttacaaataccttggacccggcaacggactcgacaagggggagccggtcaacgcagcagacgcggcggccctcgagcacgacaaggcctacgaccagcagctcaaggccggagacaacccgtacctcaagtacaaccacgccgacgccgagttccaggagcggctcaaagaagatacgtcttttgggggcaacctcgggcgagcagtcttccaggccaaaaagaggcttcttgaacctcttggtctggttgaggaagcggctaagacggctcctggaaagaagaggcctgtagagcagtctcctcaggaaccggactcctccgcgggtattggcaaatcgggtgcacagcccgctaaaaagagactcaatttcggtcagactggcgacacagagtcagtcccagaccctcaaccaatcggagaacctcccgcagccccctcaggtgtgggatctcttacaatagcttcaggtggtggcgcaccagtggcagacaataacgaaggtgccgatggagtgggtagttcctcgggaaattggcattgcgattcccaatggctgggggacagagtcatcaccaccagcacccgaacctgggccctgcccacctacaacaatcacctctacaagcgaatctccaacagcacatctggaggatcttcaaatgacaacgcctacttcggctacagcaccccctgggggtattttgacttcaacagattccactgccacttctcaccacgtgactggcagcgactcatcaacaacaactggggattccggcctaagcgactcaacttcaagcttttcaacattcgggtcaaagaggttacggacaacaatggagtcaagaccatcaccaataaccttaccagcacggtccaggtcttcacggactcagactatcagctcccgtacgtgcttgggtcggctcacgagggctgcctcccgccgttcccagcggacgttttcatgattcctcagtacgggtatctgacgcttaatgatggaagccaggccgtgggtcgttcgtccttttactgcctggaatatttcccgtcgcaaatgctaagaacgggtaacaacttccagttcagctacgagtttgagaacgtacctttccatagcagctacgctcacagccaaagcctggaccgactaatgaatccactcatcgaccaatacttgtactatctctcaaagactattaacggttctggacagaatcaacaaacgctaaaattcagtgtggccggacccagcaacatggctgtccagggaagaaactacatacctggacccagctaccgacaacaacgtgtctcaaccactgtgactcgaaacaacaacagcgaatttgcttggcctggagcttcttcttgggctctcaatggacgtaatagcttgatgaatcctggacctgctatggccagccacaaagaaggagaggaccgtttctttcctttgtctggatctttaatttttggcaaacaaggaactggaagagacaacgtggatgcggacaaagtcatgataaccaacgaagaagaaattaaaactactaacccggtagcaacggagtcctatggacaagtggccacaaaccaccagagtgcccaagcacaggcgcagaccggctgggttcaaaaccaaggaatacttccgggtatggtttggcaggacagagatgtgtacctgcaaggacccatttgggccaaaattcctcacacggacggcaactttcacccttctccgctgatgggagggtttggagtgaagcacccgcctcctcagatcctcatcaaaaacacacctgtacctgcggatcctccaacggccttcaacaaggacaagctgaactctttcatcacccagtattctactggccaagtcagcgtggagatcgagtgggagctgcagaaggaaaacagcaagcgctggaacccggagatccagtacacttccaactattacaagtctaataatgttgaatttgctgttaatactgaaggtgtatatagtgaaccccgccccattggcaccagatacctgactcgtaatctg

SEQ ID NO: 642 - DNA, 2208 bp, Artificial Sequence
  Description of Artificial Sequence: Synthetic polynucleotide
atggctgccgatggttatcttccagattggctcgaggacaaccttagtgaaggaattcgcgagtggtgggctttgaaacctggagcccctcaacccaaggcaaatcaacaacatcaagacaacgctcgaggtcttgtgcttccgggttacaaataccttggacccggcaacggactcgacaagggggagccggtcaacgcagcagacgcggcggccctcgagcacgacaaggcctacgaccagcagctcaaggccggagacaacccgtacctcaagtacaaccacgccgacgccgagttccaggagcggctcaaagaagatacgtcttttgggggcaacctcgggcgagcagtcttccaggccaaaaagaggcttcttgaacctcttggtctggttgaggaagcggctaagacggctcctggaaagaagaggcctgtagagcagtctcctcaggaaccggactcctccgcgggtattggcaaatcgggcgcacagcccgctaaaaagagactcaatttcggtcagactggcgacacagagccagtcccagaccctcaaccaatcggagaacctcccgcagccccctcaggtgtgggatctcttacaatggcttcaggtggtggcgcaccagtggcagacaataacgaaggtgccgatggagtgggtagttcctcgggaaattggcattgcgattcccaatggctgggggacagagtcatcaccaccagcacccgaacctgggccctgcccacctacaacaatcacctctacaagcaaatctccaacagcacatctggaggatcttcaaatgacaacgcctacttcggctacagcaccccctgggggtattttgacttcaacagattccactgccacttctcaccacgtgactggcagcgactcatcaacaacaactggggattccggcctaagcgactcaacttcaagctcttcaacattcaggtcaaagaggttacggacaacaatggagtcaagaccatcgccaataaccttaccagcacggtccaggtcttcacggactcagactatcagctcccgtacgtgctcgggtcggctcacgagggctgcctcccgccgttcccagcgggcgttttcatgattcctcagtacgggtatctgacgcttaatgatggaagccaggccgtgggtcgttcgtccttttactgcctggaatatttcccgtcgcaaatgctaagaacgggtaacaacttccagttcagctacgagtttgagaacgtacctttccatagcagctacgctcacagccaaagcctggaccgactaatgaatccactcatcgaccaatacttgtactatctctcaaagactattaacggttctggacagaatcaacaaacgctaaaattcagtgtggccggacccagcaacatggctgtccagggaagaaactacatacctggacccagctaccgacaacaacgtgtctcaaccactgcgactcaaaacaacaacagcgaatttgcttggcctggagcttcttcttgggctctcaatggacgtaatagcttgatgaatcctggacctgctatggccagccacaaagaaggagaggaccgtttctttcctttgtctggatctttaatttttggcaaacaaggaactggaagagacaacgtggatgcggacaaagtcatgataaccaacgaagaagaaattaaaactactaacccggtagcaacggagtcctatggacaagtggccacaaaccaccagagtgcccaagcacaggcgcagaccggctgggttcaaaaccaaggaatacttccgggtatggtttggcaggacagagatgtgtacctgcaaggacccatttgggccaaaattcctcacacggacggcaactttcacccttctccgctgatgggagggtttggaatgaagcacccgcctcctcagatcctcatcaaaaacacacctgtacctgcggatcctccaacggccttcaacaaggacaagctgaactctttcatcacccagtattctactggccaagtcagcgtggagatcgagtgggagctgcagaaggaaaacagcaagcgctggaacccggagatccagtacacttccaactattacaagtctaataatgttgaatttgctgttaatactgaaggtgtatatagtgaaccccgccccattggcaccagatacctgactcgtaatctg

SEQ ID NO: 643 - DNA, 2208 bp, Artificial Sequence
  Description of Artificial Sequence: Synthetic polynucleotide
atggctgccgatggttatcttccagattggctcgaggacaaccttagtgaaggaattcgcgagtggtgggctttgaaacctggagcccctcaacccaaggcaaatcaacaacatcaagacaacgctcgaggtcttgtgcttccgggttacaaataccttggacccggcaacggactcgacaagggggagccggtcaacgcagcagacgcggcggccctcgagcacgacaaggcctacgaccagcagctcaaggccggagacaacccgtacctcaagtacaaccacgccgacgccgggttccaggagcggctcaaagaagatacgtcttttgggggcaacctcgggcgagcagtcttccaggccaaaaagaggcttcttgaacctcttggtctggttgaggaagcggctaagacggctcctggaaagaagaggcctgtagagcagtctcctcaggaaccggactcctccgcgggtattggcaaatcgggtgcacagcccgctaaaaagagactcaatttcggtcagactggcgacacagagtcagtcccagtccctcaaccaatcggagaacctcccgcagccccctcaggtgtgggatctcttacaatggcttcaggtggtggcgcaccagtggcagacaataacgaaggtgccgatggagtgggtagttcctcgggaaattggcattgcgattcccaatggctgggggacagagtcatcaccaccagcacccgaacctgggccctgcccacctacaacaatcacctctacaagcaaatctccaacagcacatctggaggatcttcaaatgacaacgcctacttcggctacagcaccccctgggggtattttgacttcaacagattccactgccacttctcaccacgtgactggcagcgactcatcaacaacaactggggattccggcctaagcgactcaacttcaagctcttcaacattcaggtcaaagaggttacggacaacaatggagtcaagaccatcgccaataaccttaccagcacggtccaggtcttcacggactcagactatcagctcccgtacgtgctcgggtcggctcacgagggctgcctcccgccgttcccagcggacgttttcatgattcctcagtacgggtatctgacgcttaatgatggaagccaggccgtgggtcgttcgtccttttactgcctggaatatttcccgtcgcaaatgctaagaacgggtaacaacttccagttcagctacgagtttgagaacgtacctttccatagcagctacgctcacagccaaagcctggaccgactaatgaatccactcatcgaccaatacttgtactatctctcaaagactattaacggttctggacagaatcaacaaacgctaaaattcagtgtggccggacccagcaacatggctgtccagggaagaaactacatacctggacccagctaccgacaacaacgtgtctcaaccactgtgactcaaaacaacaacagcgaatttgcttggcctggagcttcttcttgggctctcaatggacgtaatagcttgatgaatcctggacctgctatggccagccacaaagaaggagaggaccgtttctttcctttgtctggatctttaatttttggcaaacaaggagctggaagagacaacgtggatgcggacaaagtcatgataaccaacgaagaagaaattaaaactactaacccggtagcaacggagtcctatggacaagtggccacaaaccaccagagtgcccaagcacaggcgcagaccggctgggttcaaaaccaaggaatacttccgggtatggtttggcaggacagagatgtgtacctgcaaggacccatttgggccaaaattcctcacacggacggcaactttcacccttctccgctgatgggagggtttggaatgaagcacccgcctcctcagatcctcatcaaaaacacacctgtacctgcggatcctccaacggccttcaacaaggacaagctgaactctttcatcacccagtattctactggccaagtcagcgtggagatcgagtgggagctgcagaaggaaaacagcaagcgctggaacccggagatccagtacacttccaactattacaagtctaataatgttgaatttgctgttaatactgaaggtgtatatagtgaaccccgccccattggcaccagatacctgactcgtaatctg

SEQ ID NO: 644 - DNA, 2208 bp, Artificial Sequence
  Description of Artificial Sequence: Synthetic polynucleotide
  modified_base (377)..(377): a, t, c, or g
atggctgccgatggttatcttccagattggctcgaggacaaccttagtgaaggaattcgcgagaggtgggctttgaaacctggagcccctcaacccaaggcaaatcaacaacatcaagacaacgctcgaggtcttgtgcttccgggttacaaataccttggacccggcaacggactcgacaagggggagccggtcaacgcagcagacgcggcggccctcgagcacgacaaggcctacgaccagcagctcaaggccggagacaacccgtacctcaagtacaaccacgccgacgccgagttccaggagcggctcaaagaagatacgtcttttgggggcaacctcgggcgagcagtcttccaggccaaaaagaggcttcntgaacctcttggtctggttgaggaagcggctaagacggctcctggaaagaagaggcctgtagagcagtctcctcaggaaccggactcctccgcgggtattggcaaatcgggtgcacagcccgctaaaaagagactcaatttcggtcagactggcgacacagagtcagtcccagaccctcaaccaatcggagaacctcccgcagccccctcaggtgtgggatctcttacaatggcttcaggtggtggcgcaccagtggcagacaataacgaaggtgccgatggagtgggtagttcctcggggaattggcattgcgattcccaatggctgggggacagagtcatcaccaccagcacccgaacctgggccctgcccacctacaacaatcacctctacaagcaaatctccaacagcacatctggaggatcttcaaatgacaacgcctacttcggctacagcaccccctgggggtattttgacttcaacagattccactgccacttctcaccacgtgactggcagcgactcatcaacaacaactggggattccggcctaagcgactcaacttcaagctcttcaacattcaggtcaaagaggttacggacaacaatggagtcaagaccatcgccaataaccttaccagcacggtccaggtcttcacggactcagactatcagctcccgtacgtgctcgggtcggctcacgagggctgcctcccgccgttcccagcggacgttttcatgattcctcagtacgggtatctgacgcttaatgatggaagccaggccgtgggtcgttcgtccttttactgcctggaatatttcccgtcgcaaatgctaagaacgggtaacaacttccagttcagctacgagtttgagaacgtacctttccatagcagctacgctcacagccaaagcccggaccgactaatgaatccactcatcgaccaatacttgtactatctctcaaagactattaacggttctggacagaatcaacaaacgctaaaattcagtgtggccggacccagcaacatggctgtccagggaagaaactacatacctggacccagctaccgacaacaacgtgtctcaaccactgtgactcaaaacaacaacagcgaatttgcttggcctggagcttcttcttgggctctcaatggacgtaatagcttgatgaatcctggacctgctatggccagccacaaagaaggagaggaccgtttctttcctttgtctggatctttaatttttggcaaacaaggaactggaagagacaacgtggatgcggacaaagtcatgataaccaacgaagaagaaattaaaactactaacccggtagcaacggagtcctatggacaagtggccacaaaccaccagagtgcccaagcacaggcgcagaccggctgggttcaaaaccaaggaatacttccgggtatggtttggcaggacagagatgtgtacctgcaaggacccatttgggccaaaattcctcacacggacggcaactttcacccttctccgctgatgggagggtttggagtgaagcacccgcctcctcagatcctcatcaaaaacacacctgtacctgcggatcctccaacggccttcaacaaggacaagctgaactctttcatcacccagtattctactggccaagtcagcgtggagatcgagtgggagctgcagaaggaaaacagcaagcgctggaacccggagatccagtacacttccaactattacaagtctaataatgttgaatttgctgttaatactgaaggtgtatatagtgaaccccgccccattggcaccagatacctgactcgtaatctg

SEQ ID NO: 645 - DNA, 2208 bp, Artificial Sequence
  Description of Artificial Sequence: Synthetic polynucleotide
atggctgccgatggttatcttccagattggctcgaggacaaccttagtgaaggaattcgcgagtggtgggctttgaaacctggagcccctcaacccaaggcaaatcaacaacatcaagacaacgctcgaggtcttgtgcttccgggttacaaataccttggacccggcaacggactcgacaagggggagccggtcaacgcagcagacgcggcggccctcgagcacgacaaggcctacgaccagcagctcaaggccggagacaacccgtacctcaagtacaaccacgccgacgccgagttccaggagcggctcaaagaagatacgtcttttgggggcaacctcgggcgagcagtcttccaggccaaaaagaggcttcttgaacctcttggtctggttgaggaagcggctaagacggctcctggaaagaagaggcctgtagagcagtctcctcaggaaccggactcctccgcgggtattggcaaatcgggtgcacagcccgctaaaaagagactcaatttcggtcagactggcgacacagagtcagtcccagaccctcaaccaatcggagaacctcccgcagccccctcaggtgtgggatctcttacaatggcttcaggtggtggcgcaccagtggcagacaataacgaaggtgccgatggagtgggtagttcctcgggaaattggcattgcgattcccaatggctgggggacagagtcatcaccaccagcacccgaacctgggccctgcccacctacaacaatcacctctacaagcaaatctccaacagcacatctggaggatcttcaaatgacaacgcctacctcggctacagcaccccctgggggtattttgacttcaacagattccactgccacttctcaccacgtgactggcagcgactcatcaacaacaactggggattccggcctaagcgactcaacttcaagctcttcaacattcaggtcaaagaggttacggacaacaatggagtcaagaccatcgccaataaccttaccagcacggtccaggtcttcacggactcagactatcagctcccgtacgtgctcgggtcggctcacgagggctgcctcccgccgttcccagcggacgttttcatgattcctcagtacgggtatctgacgcttaatgatggaagccaggccgtgggtcgttcgtccttttactgcctggaatatttcccgtcgcaaatgctaagaacgggtaacaacttccagttcagctacgagtttgagaacgtacctttccatagcagctacgctcacagccaaagcctggaccgactaatgaatccactcatcgaccaatacttgtactatctctcaaagactattaacggttctggacagaatcaacaaacgctaaaattcagtgtggccggacccagcaacatggctgtccagggaagaaactacatacctggacccagctaccgacaacaacgtgtctcaaccactgtgactcaaaacaacaacagcgaatttgcttggcctggagcttcttcttgggctctcaatggacgtaatagcttgatgaatcctggacctgctatggccagccacaaagaaggagaggaccgtttctttcctttgtctggatctttaatttttggcaaacaaggaactggaagagacaacgtggatgcggacaaagtcatgataaccaacgaagaagaaattaaaactactaacccggtagcaacggagtcctatggacaagtggccacaaaccaccagagtgcccaagcacaggcgcagaccggctgggttcaaaaccaaggaatacttccgggtatggtttggcaggacagagatgtgtacctgcaaggacccatttgggccaaaattcctcacacggacggcaactttcacccttctccgctgatgggagggtttggaatgaagcacccgcctcctcagatcctcatcaaaaacacacctgtacctgcggatcctccaacggccttcaacaaggacaagctgaactctttcatcacccagtattctactggccaagtcagcgtggagatcgagtgggagctgcagaaggaaaacagcaagcgctggaacccggagatccagtacacttccaactattacaagtctaataatgttgaatttgctgttaatactgaaggtgtatatagtgaaccccgccccattggcaccagatacctgactcgtaatctg

SEQ ID NO: 646 - DNA, 2208 bp, Artificial Sequence
  Description of Artificial Sequence: Synthetic polynucleotide
atggctgccgatggttatcttccagattggctcgaggacaaccttagtgaaggaattcgcgagtggtgggctttgaaacctggagcccctcaacccaaggcaaatcaacaacatcaagacaacgctcgaggtcttgtgcttccgggttacaaataccttggacccggcaacggactcgacaagggggagccggtcaacgcagcagacgcggcggccctcgagcacgacaaggcctacgaccagcagctcaaggccggagacaacccgtacctcaagtacaaccacgccgacgccgagttccaggagcggctcaaagaagatacgtcttttgggggcaacctcgggcgagcagtcttccaggccaaaaagaggcttcttgaacctcttggtctggttgaggaagcggctaagacggctcctggaaagaagaggcctgtagagcagtctcctcaggaaccggactcctccgcgggtattggcaaatcgggtgcacagcccgctaaaaagagactcaatttcggtcagactggcgacacagagtcagtcccagaccctcaaccaatcggagaacctcccgcagccccctcaggtgtgggatctcttacaatggcttcaggtggtggcgcaccagtggcagacaataacgaaggtgccgatggagtgggtagttcctcgggaaattggcattgcgattcccaatggctgggggacagagtcatcaccaccagcacccgaacctgggccctgcccacctacaacaatcacctctacaagcaaatctccaacagcacatctggaggatcttcaaatgacaacgcctacttcggctacagcaccccctgggggtattttgacttcaacagattccactgccacttctcaccacgtgactggcagcgactcatcaacaacaactggggattccggcctaagcgactcaacttcaagctcttcaacattcaggtcaaagaggttacggacaacaatggagtcaagaccatcgccaataaccttaccagcacggtccaggtcttcacggactcagactatcagctcccgtacgtgctcgggtcggctcacgagggctgcctcccgccgttcccagcggacgttttcatgattcctcagtacgggtatctgacgcttaatgatggaagccaggccgtgggtcgttcgtccttttactgcctggaatatttcccgtcgcaaatgctaagaacgggtaacaacttccagttcagctacgagtttgagaacgtacctttccatagcagctacgctcacagccagagcctggaccgactaatgaatccactcatcgaccaatacttgtactatctctcaaagactattaacggttctggacagaatcaacaaacgctaaaattcagtgtggccggacccagcaacatggctgtccagggaagaaactacatacctggacccagctaccgacaacaacgtgtctcaaccactgtgactcaaaacaacaacagcgaatttgcttggcctggagcttcttcttgggctctcaatggacgtaatagcttgatgaatcctggacctgctatggccagccacaaagaaggagaggaccgtttctttcctttgtctggatctttaatttttggcaaacaaggaactggaagagacaacgtggatgcggacaaagtcatgataaccaacgaagaagaaattaaaactactaacccggtagcaacggagtcctatggacaagtggccacaaaccaccagagtgcccaagcacaggcgcagaccggctgggttcaaaaccaaggaatacttccgggtatggtttggcaggacagagatgtgtacctgcaaggacccatttgggccaaaattcctcacacggacggcaactttcacccttctccgctgatgggagggtttggaatgaagcacccgcctcctcagatcctcatcaaaaacacacctgtacctgcggatcctccaacggccttcaacaaggacaagctggactctttcatcacccagtattctactggccaagtcagcgtggagatcgagtgggagctgcagaaggaaaacagcaagcgctggaacccggtgatccagtacacttccaactattacaagtctaataatgttgaatttgctgttaatactgaaggtgtatatagtgaaccccgccccattggcaccagatacctgactcgtaatctg

SEQ ID NO: 647 - DNA, 2208 bp, Artificial Sequence
  Description of Artificial Sequence: Synthetic polynucleotide
atggctgccgatggttatcttccagattggctcgaggacaacctctctgagggcattcgcgagtggtgggacttgaaacctggagccccgaagcccaaagccaaccagcaaaagcaggacgacggccggggtctggtgcttcctggctacaagtacctcggacccttcaacggactcgacaagggggagcccgtcaacgcggcggacgcagcggccctcgagcacgacaaggcctacgaccagcagctcaaagcgggtgacaatccgtacctgcggtataaccacgccgacgccgagtttcaggagcgtctgcaagaagatacgtcttttgggggcaacctcgggcgagcagtcttccaggccaagaagcgggttctcgaacctctcggtctggttgaggaaggcgctaagacggctcctggaaagaaacgtccggtagagcagtcgccacaagagccagactcctcctcgggcatcggcaagacaggccagcagcccgctaaaaagagactcaattttggtcagactggcgactcagagtcagtccccgatccacaacctctcggagaacctccagcaacccccgctgctgtggggcctactacaatggcttcaggcggtggcgcaccaatggcagacaataacgaaggcgtcgacggagtgggtaatgcctcaggaaattggcattgcgattccacatggctgggcgacagagtcatcaccaccagcacccgcacctgggccttgcccacctacaataaccacctctacaagcaaatctccagtgcttcaacgggggccagcaacgacaaccactacttcggctacagcaccccctgggggtattttgatttcaacagattccactgccacttttcaccacgtgactggcagcgactcatcaacaacaattggggattccggcccaagagactcaacttcaaactcttcaacatccaagtcaaggaggtcacgacgaatgatggcgttacaaccatcgctaataaccttaccagcacggttcaagtcttctcggactcggagtaccagcttccgtacgtcctcggctctgcgcaccagggctgcctccctccgttcccggcggacgtgttcatgattccgcaatacggctacctgacgctcaacaatggcagccaagccgtgggacgttcatccttttactgcctggaatatttcccttctcagatgctgagaacgggcaacaactttaccttcagctacacctttgaggaagtgcctttccacagcagctacgcgcacagccagagcctggaccggctgatgaatcctctcatcgaccaatacctgtattacctgaacagaactcaaaatcagtccggaagtgcccaaaacaaggacttgctgtttagccgtgggtctccagctggcatgtctgttcagcccaaaaactggctacctggaccctgttatcggcagcagcgcgtttctaaaacaaaaacagacaacaacaacagcaattttacctggactggtgcttcaaaatataacctcaatgggcgtgaatccatcatcaaccctggcactgctatggcctcacacaaagacgacgaagacaagttctttcccatgagcggtgtcatgatttttggaaaagagagcgccggagcttcaaacactgcattggacaatgtcatgattacagacgaagaggaaattaaagccactaaccctgtggccaccgaaagatttgggaccgtggcagtcaatttccagagcagcagcacagaccctgcgaccggagatgtgcatgctatgggagcattacctggcatggtgtggcaagatagagacgtgtacctgcagggtcccatttgggccaaaattcctcacacagatggacactttcacccgtctcctcttatgggcggctttggactcaagaacccgcctcctcagatcctcatcaaaaacacgcctgttcctgcgaatcctccggcggagttttcagccacaaagcttgcttcattcatcacccaatactccacaggacaagtgagtgtggaaattgaatgggagctgcagaaagaaaacagcaagcgctggaatcccgaagtgcagtacacatccaattatgcaaaatctgccaacgttgattttactgtggacaacaatggactttatactgagcctcgccccattggcacccgttaccttacccgtcccctg

SEQ ID NO: 648 - DNA, 2208 bp, Artificial Sequence
  Description of Artificial Sequence: Synthetic polynucleotide
atggctgccgatggttatcttccagattggctcgaggacaacctctctgagggcattcgcgagtggtgggacttgaaacctggagccccgaagcccaaagccaaccagcaaaagcaggacgacggccggggtctggtgcttcctggctacaagtacctcggacccttcaacggactcgacaagggggagcccgtcaacgcggcggacgcagcggccctcgagcacgacaaggcctacgaccagcagctcaaagcgggtgacaatccgtacctgcggtataaccacgccgacgccgagtttcaggagcgtctgcaagaagatacgtcttttgggggcaacctcgggcgagcagtcttccaggccaagaagcgggttctcgaacctctcggtctggttgaggaaggcgctaagacggctcctggaaagagacgtccggtagagcagtcgccacaagagccagactcctcctcgggcatcggcaagacaggccagcagcccgctaaaaagagactcaattttggtcagactggcgactcagagtcagtccccgatccacaacctctcggagaacctccagcaacccccgctgctgtgggacctactacaatggcttcaggcggtggcgcaccaatggcagacaataacgaaggcgccgacggagtgggtaatgcctcaggaaattggcattgcgattccacatggctgggcgacagagtcatcaccaccagcacccgcacctgggccttgcccacctacaataaccacctctacaagcaaatctccagtgcttcaacgggggccagcaacgacaaccactacttcggctacagcaccccctgggggtattttgatttcaacagattccactgccacttttcaccacgtgactggcagcgactcatcaacaacaattggggattccggcccaagagactcaacttcaaactcttcaacatccaagtcaaggaggtcacgacgaatgatggcgtcacaaccatcgctaataaccttaccagcacggttcaagtcttctcggactcggagtaccagcttccgtacgtcctcggctctgcgcaccagggctgcctccctccgttcccggcggacgtgttcatgattccgcaatacggctacctgacgctcaacaatggcagccaagccgtgggacgttcatccttttactgcctggaatatttcccttctcagatgctgagaacgggcaacaactttaccttcagctacacctttgaggaagtgcctttccacagcagctacgcgcacagccagagcctggaccggctgatgaatcctctcatcgaccaatacctgtattacctgaacagaactcaaaatcagtccggaagtgcccaaaacaaggacttgctgtttagccgtgggtctccagctggcatgtctgttcagcccaaaaactggctacctggaccctgttatcggcagcagcgcgtttctaaaacaaaaacagacaacaacaacagcaattttacctggactggtgcttcaaaatataacctcaatgggcgtgaatccatcatcaaccctggcactgctatggcctcacacaaagacgacgaagacaagttctttcccatgagcggtgtcatgatttttggaaaagagagcgccggagcttcaaacactgcattggacaatgtcatgattacagacgaagaggaaattaaagccactaaccctgtggccaccgaaagatttgggaccgtggcagtcaatttccagagcagcagcacagaccctgcgaccggagatgtgcatgctatgggagcattacctggcatggtgtggcaagatagagacgtgtacctgcagggtcccatttgggccaaaattcctcacacagatggacactttcacccgtctcctcttatgggcggctttggactcaagaacccgcctcctcagatcctcatcaaaaacacgcctgttcctgcgaatcctccggcggagttttcagctacaaagtttgcttcgttcatcacccaatactccacaggacaagtgagtgtggaaattgaatgggagctgcagaaagaaaacagcaagcgctggaatcccgaagtgcagtacacatccaattatgcaaaatctgccaacgttgattttactgtggacaacaatggactttatactgagcctcgccccattggcacccgttaccttacccgtcccctg

SEQ ID NO: 649 - DNA, 2208 bp, Artificial Sequence
  Description of Artificial Sequence: Synthetic polynucleotide
atggctgccgatggttatcttccagattggctcgaggacaacctctctgagggcattcgcgagtggtgggacttgaaacctggagccccgaagcccaaagccaaccagcaaaagcaggacgacggccggggtctggtgcttcctggctacaagtacctcggacccttcaacggactcgacaagggggagcccgtcaacgcggcggacgcagcggccctcgagcacgacaaggcctacgaccagcagctcaaagcgggtgacaatccgtacccgcggtataaccacgccgacgccgagtttcaggagcgtctgcaagaagatacgtcttttgggggcaacctcgggcgagcagtcttccaggccaagaagcgggttctcgaacctctcggtctggttggggaaggcgctaagacggctcctggaaagaaacgtccggtagagcagtcgccacaagagccagactcctcctcgggcatcggcaagacaggccagcagcccgctaaaaagagactcaattttggtcagactggcgactcagagtcagtccccgatccacaacctctcggagaacctccagcaacccccgctgctgtgggacctactacaatggcttcaggcggtggcgcaccaatggcagacaataacgaaggcgccgacggagtgggtaatgcctcaggaaattggcattgcgattccacatggctgggcgacagagtcatcaccaccagcacccgcacctgggccttgcccacctacaataaccacctctacaagcaaatctccagtgcttcaacgggggccagcaacgacaaccactacttcggctacagcaccccctgggggtattttgatttcaacagattccactgccacttttcaccacgtgactggcagcgactcatcaacaacaattggggattccggcccaagagactcaacttcaaactcttcaacatccaagtcaaggaggtcacgacgaatgatggcgtcacaaccatcgctaataaccttaccagcacggttcaagtcttctcggactcggagtaccagcttccgtacgtcctcggctctgcgcaccagggctgcctccctccgttcccggcggacgtgttcatgattccgcaatacggctacctgacgctcaacaatggcagccaagccgtgggacgttcatccttttactgcctggaatatttcccttctcagatgctgagaacgggcaacaactttaccttcagctacacctttgaggaagtgcctttccacagcagctacgcgcacagccagagcctggaccggctgatgaatcctcccatcgaccaatacctgtattacctgaacagaactcaaaatcagtccggaagtgcccaaaacaaggacttgctgtttagccgtgggtctccagctggcatgtctgttcagcccaaaaactggctacctggaccctgttatcggcagcagcgcgtttctaaaacaaaaacagacaacaacaacagcaattttacctggactggtgcttcaaaatataacctcaatgggcgtgaatccatcatcaaccctggcactgctatggcctcacacaaagacgacgaagacaagttctttcccatgagcggtgtcatgatttttggaaaagagagcgccggagcttcaaacactgcattggacaatgtcatgattacagacgaagaggaaattaaagccactaaccctgtggccaccgaaagatttgggaccgtggcagtcaatttccagagcagcagcacagaccctgcgaccggagatgtgcatgctatgggagcattacctggcatggtgtggcaagatagagacgtgtacctgcagggtcccatttgggccaaaattcctcacacagatggacactttcacccgtctcctcttatgggcggctttggactcaagaacccgcctcctcagatcctcatcaaaaacacgcctgttcctgcgaatcctccggcggagttttcagctacaaagtttgcttcattcatcacccaatactccacaggacaagtgagtgtggaaattgaatgggagctgcagaaagaaaacagcaagcgctggaatcccgaagtgcagtacacatccaattatgcaaaatctgccaacgttgattttactgtggacaacaatggactttatactgagcctcgccccattggcacccgttaccttacccgtcccctg

SEQ ID NO: 650 - DNA, 2208 bp, Artificial Sequence
  Description of Artificial Sequence: Synthetic polynucleotide
atggctgccgatggttatcttccagattggctcgaggacaacctctctgagggcattcgcgagtggtgggacttgaaacctggagccccgaagcccaaagccaaccagcaaaagcaggacgacggccggggtctggtgcttcctggctacaagtacctcggacccttcaacggactcgacaagggggagcccgtcaacgcggcggacgcagcggccctcgagcacgacaaggcctacgaccagcagctcaaagcgggtgacaatccgtacctgcggtataaccacgccgacgccgagtttcaggagcgtctgcaagaagatacgtcttttgggggcaacctcgggcgagcagtcttccaggccaagaagcgggttctcgaacctctcggtctggttgaggaaggcgctaagacggctcctggaaagaaacgtccggtagagcagtcgccacaagagccagactcctcctcgggcatcggcaagacaggccagcagcccgctaaaaagagactcaattttggtcagactggcgactcagagtcagtccccgatccacgacctctcggagaacctccagcaacccccgctgctgtgggacctactacaatggcttcaggcggtggcgcaccaatggcagacaataacgaaggcgccgacggagtgggtaatgcctcaggaaattggcattgcgattccacatggctgggcgacagagtcatcaccaccagcacccgcacctgggccttgcccacctacaataaccacctctacaagcaaatctccagtgcttcaacgggggccagcaacgacaaccactacttcggctacagcaccccctgggggtattttgatttcaacagattccactgccacttttcaccacgcgactggcagcgactcatcaacaacaattggggattccggcccaagagactcaacttcaaactcttcaacatccaagtcaaggaggtcacgacgaatgatggcgtcacaaccatcgctaataaccttaccagcacggttcaagtcttctcggactcggagtaccagcttccgtacgtcctcggctctgcgcaccagggctgcctccctccgttcccggcggacgtgttcatgattccgcaatacggctacctgacgctcaacaatggcagccaagccgtgggacgttcatccttttactgcctggaatatttcccttctcagatgctgagaacgggcaacaactttaccttcagctacacctttgaggaagtgcctttccacagcagctacgcgcacagccagagcctggaccggctgatgaatcctctcatcgaccaatacctgtattacctgaacagaactcaaaatcagtccggaagtgcccaaaacaaggacttgctgtttagccgtgggcctccagctggcatgtctgttcagcccaaaaactggctacctggaccctgttatcggcagcagcgcgtttctaaaacaaaaacagacaacaacaacagcaattttacctggactggtgcttcaaaatataacctcaatgggcgtgaatccatcatcaaccctggcactgctatggcctcacacaaagacgacgaagacaagttctttcccatgagcggtgtcatgatttttggaaaagagagcgccggagcttcaaacactgcattggacaatgtcatgattacggacgaagaggaaattaaagccactaaccctgtggccaccgaaagatttgggaccgtggcagtcaatttccagagcagcagcacagaccctgcgaccggagatgtgcatgctatgggagcattacctggcatggtgtggcaagatagagacgtgtacctgcagggtcccatttgggccaaaattcctcacacagatggacactttcacccgtctcctcttatgggcggctttggactcaagaacccgcctcctcagatcctcatcaaaaacacgcctgttcctgcgaatcctccggcggagttttcagctacaaagtttgcttcattcatcacccaatactccacaggacaagtgagtgtggaaattgaatgggagctgcagaaagaaaacagcaagcgctggaatcccgaagtgcagtacacatccaattatgcaaaatctgccaacgttgattttactgtggacaacaatggactttatactgagcctcgccccattggcacccgttaccttacccgtcccctg

SEQ ID NO: 651 - DNA, 2208 bp, Artificial Sequence
  Description of Artificial Sequence: Synthetic polynucleotide
atggctgccgatggttatcttccagattggctcgaggacaacctctctgagggcattcgcgagtggtgggacttgaaacctggagccccgaagcccaaagccaaccagcaaaagcaggacgacggccggggtctggtgcttcctggctacaagtacctcggacccttcaacggactcgacaagggggagcccgtcaacgcggcggacgcagcggccctcgagcacgacaaggcctacgaccagcagctcaaagcgggtgacaatccgtacctgcggtataaccacgccgacgccgagtttcaggagcgtctgcaagaagatacgtcttttgggggcaacctcgggcgagcagtcttccaggccaagaagcgggttctcgaacctctcggtctggttgaggaaggcgctaagacggctcctggaaagaaacgtccggtagagcagtcgccacaagagccagactcctcctcgggcatcggcaagacaggccagcagcccgctaaaaagagactcaattttggtcagactggcggctcagagtcagtccccgatccacaacctctcggagaacctccagcaacccccgctgctgtgggacctactacaatggcttcaggcggtggcgcaccaatggcagacaataacgaaggcgccgacggagtgggtaatgcctcaggaaattggcattgcgattccacatggctgggcgacagagtcatcaccaccagcacccgcacctgggccttgcccacctacaataaccacctctacaagcaaatctccagtgcttcaacgggggccagcaacgacaaccactacttcggctacagcaccccctgggggtattttgatttcaacagattccactgccacttttcaccacgtgactggcagcgactcatcaacaacaattggggattccggcccaagagactcaacttcaaactcttcaacatccaagtcaaggaggtcacgacgaatgatggcgtcacaaccatcgctaataaccttaccagcacggttcaagtcttctcggactcggagtaccagcttccgtacgtcctcggctctgcgcaccagggctgcctccctccgttcccggcggacgtgttcatgattccgcaatacggctacctgacgctcaacaatggcagccaagccgtgggacgttcatccttttactgcctggaatatttcccttctcagatgctgagaacgggcaacaactttaccttcagctacacctttgaggaagtgcctttccacagcagctacgcgcacagccagagcctggaccggctgatgaatcctcccatcgaccaatacctgtattacctgaacagaactcaaaatcagtccgggagtgcccaaaacaaggacttgctgtttagccgtgggtctccagctggcatgtctgttcagcccaaaaactggctacctggaccctgttatcggcagcagcgcgtttctaaaacaaaaacagacaacaacaacagcaattttacctggactggtgcttcaaaatataacctcaatgggcgtgaatccatcatcaaccctggcactgctatggcctcacacaaagacgacgaagacaagttctttcccatgagcggtgtcatgatttttggaaaagagagcgccggagcttcaaacactgcattggacaatgtcatgattacagacgaagaggaaattaaagccactaaccctgtggccaccgaaagatttgggaccgtggcagtcaatttccagagcagcagcacagaccctgcgaccggagatgtgcatgctatgggagcattacctggcatggtgtggcaagatagagacgtgtacctgcagggtcccatttgggccaaaattcctcacacagatggacactttcacccgtctcctcttatgggcggctttggactcaagaacccgcctcctcagatcctcatcaaaaacacgcctgttcctgcgaatcctccggcggagttttcagctacaaagtttgcttcattcatcacccaatactccacaggacaagtgagtgtggaaattgaatgggagctgcagaaagaaaacagcaagcgctggaatcccgaagtgcagtacacatccaattatgcaaaatctgccaacgttgactttactgtggacaacaatggactttatactgagcctcgccccattggcacccgttaccttacccgtcccctg

SEQ ID NO: 652 - DNA, 2208 bp, Artificial Sequence
  Description of Artificial Sequence: Synthetic polynucleotide
atggctgccgatggttatcttccagattggctcgaggacaacctctctgagggcattcgcgagtggtgggacttgaaacctggagccccgaagcccaaagccaaccagcaaaagcaggacgacggccggggtctggtgcttcctggctacaagtacctcggacccttcaacggactcgacaagggggagcccgtcaacgcggcggacgcagcggccctcgagcacgacaaggcctacgaccagcagctcaaagcgggtgacaatccgtacctgcggtataaccacgccgacgccgagtttcaagagcgtctgcaagaagatacgtcttttgggggcaacctcgggcgagcagtcttccaggccaagaagcgggttctcgaacctctcggtctggttgaggaaggcgctaagacggctcctggaaagaaacgtccggtagagcagtcgccacaagagccagactcctcctcgggcatcggcaagacaggccagcagcccgctaaaaagagactcaattttggtcagactggcgactcagagtcagtccccgatccgcaacctctcggagaacctccagcaacccccgctgctgtgggacctactacaatggcttcaggcggtggcgcaccaatggcagacaataacgaaggcgccgacggagtgggtaatgcctcaggaaattggcattgcgattccacatggctgggcgacagagtcatcaccaccagcacccgcacctgggccttgcccacctacaataaccacctctacaagcaaatctccagtgcttcaacgggggccagcaacgacaaccactacttcggctacagcaccccctgggggtattttgatttcaacagattccactgccacttttcaccacgtgactggcagcgactcatcaacaacaattggggattccggcccaagagactcaacttcaaactcttcaacatccaagtcaaggaggtcacgacgaatgatggcgtcacaaccatcgctaataaccttaccagcacggttcaagtcttctcggactcggagtaccagcttccgtacgtcctcggctctgcgcaccagggctgcctccctccgttcccggcggacgtgttcatgattccgcaatacggctacctgacgctcaacaatggcagccaagccgtgggacgttcatccttttactgcctggaatatttcccttctcagatgctgagaacgggcaacaactttaccttcagctacacctttgaggaagtgcctttccacagcagctacgcgcacagccagagcctggaccggctgatgaatcctctcatcgaccaatacctgtattacctgaacagaactcaaaatcagtccggaagtgcccaaaacaaggacttgctgtttagccgtgggtctccagctggcatgtctgttcagcccaaaaactggctacctggaccctgttatcggcagcagcgcgtttctaaaacaaaaacagacaacaacaacagcaattttacctggactggtgcttcaaaatataacctcaatgggcgtgaatccatcatcaaccctggcactgctgtggcctcacacaaagacgacgaagacaagttctttcccatgagcggtgtcatgatttttggaaaagagagcgccggagcttcaaacactgcattggacaatgtcatgattacagacgaagaggaaattaaagccactaaccctgtggccaccgaaagatttgggaccgtggcagtcaatttccagagcagcagcacagaccctgcgaccggagatgtgcatgctatgggagcattacctggcatggtgtggcaagatagagacgtgtacctgcagggtcccatttgggccaaaattcctcacacagatggacactttcacccgtctcctcttatgggcggctttggactcaagaacccgcctcctcagatcctcatcaaaaacacgcctgttcctgcgaatcctccggcggagttttcagctacaaagtttgcttcattcatcacccaatactccacaggacaagtgagtgtggaaattgaatgggagctgcagaaagaaaacagcaagcgctggaatcccgaagtgcagtacacatccaattatgcaaaatctgccaacgttgattttactgtggacaacaatggactttatactgagcctcgccccattggcacccgttaccttacccgtcccctg

SEQ ID NO: 653 - DNA, 2208 bp, Artificial Sequence
  Description of Artificial Sequence: Synthetic polynucleotide
atggctgccgatggttatcttccagattggctcgaggacaacctctctgagggcattcgcgagtggtgggacttgaaacctggagccccgaagcccaaagccaaccagcaaaagcaggacgacggccggggtctggtgcttcctggctacaagtacctcggacccttcaacggactcgacaagggggagcccgtcaacgcggcggacgcagcggccctcgagcacgacaaggcctacgaccagcagctcaaagcgggtgacaatccgtacctgcggtataaccacgccgacgccgagtttcaggagcgtctgcaagaagatacgtcttttgggggcaacctcgggcgagcagtcttccaggccaagaagcgggttctcgaacctctcggtctggttgaggaaggcgctaagacggctcctggaaagaaacgtccggtagagcagtcgccacaagagccagactcctcctcgggcatcggcaagacaggccagcagcccgctaaaaagagactcaattttggtcagactggcgactcagagtcagtccccgatccacaacctctcggagaacctccagcaacccccgctgctgtgggacctactacaatggcttcaggcggtggcgcaccaatggcagacaataacgaaggcgccgacggagtgggtaatgcctcaggaaattggcattgcgattccacatggctgggcgacagagtcatcaccaccagcacccgcacctgggccttgcccacctacaataaccacctctacaagcaaatctccagtgcttcaacgggggccagcaacgacaaccactacttcggctacagcaccccctgggggtattttgatttcaacagattccactgccacttttcaccacgtgactggcagcaactcatcaacaacaattggggattccggcccaagagactcaacttcaaactcttcaacatccaagtcaaggaggtcacgacgaatgatggcgtcacaaccatcgctaataaccttaccagcacggttcaagtcttctcggactcggagtaccagcttccgtacgtcctcggctctgcgcaccagggctgcctccctccgttcccggcggacgtgttcatgattccgcaatacggctacctgacgctcaacaatggcagccaagccgtgggacgttcatccttttactgcctggaatatttcccttctcagatgctgagaacgggcaacaactttaccttcagctacacctttgaggaagtgcctttccacagcagctacgcgcacagccagagcctggaccggctgatgaatcctctcatcgaccaatacctgtattacctgaacagaactcaaaatcagtccggaagtgcccaaaacaaggacttgctgtttagccgtgggtctccagctggcatgtctgttcagcccaaaaactggctacctggaccctgttatcggcagcagcgcgtttctaaaacaaaaacagacaacaacaacagcaattttacctggactggtgcttcaaaatataacctcaatgggcgtgaatccatcatcaaccctggcactgctatggcctcacacaaagacgacgaagacaagttctttcccatgagcggtgtcatgatttttggaaaagagagcgccggagcttcaaacactgcattggacaatgtcatgattacagacgaagaggaaattaaagccactaaccctgtggccaccgaaagatttgggaccgtggcagtcaatttccagagcaccagcacagaccctgcgaccggagatgtgcatgctatgggagcattacctggcatggtgtggcaagatagagacgtgtacctgcagggtcccatttgggccaaaattcctcacacagatggacactttcacccgtctcctcttatgggcggctttggactcaagaacccgcctcctcagatcctcatcaaaaacacgcctgttcctgcgaatcctccggcggagttttcagctacaaagtttgcttcattcatcacccaatactccacaggacaagtgagtgtggaaattgaatgggagctgcagaaagaaaacagcaagcgctggaatcccgaagtgcagtacacatccaattatgcaaaatctgccgacgttgattttactgtggacaacaatggactttatactgagcctcgccccattggcacccgttaccttacccgtcccctg

SEQ ID NO: 654 - DNA, 2208 bp, Artificial Sequence
  Description of Artificial Sequence: Synthetic polynucleotide
atggctgccgatggttatcttccagattggctcgaggacaacctctctgagggcattcgcgagtggtgggacttgaaacctggagccccgaagcccaaagccaaccagcaaaagcaggacgacggccggggtctggtgcttcctggctacaagtacctcggacccttcaacggactcgacaagggggagcccgtcaacgcggcggacgcagcggccctcgagcacgacaaggcctacgaccagcagctcaaagcgggtgacaatccgtacctgcggtataaccacgccgacgccgagtttcaagagcgtctgcaagaagatacgtcttttgggggcaacctcgggcgagcagtcttccaggccaagaagcgggttctcgaacctctcggtctggttgaggaaggcgctaagacggctcctggaaagaaacgtccggtagagcagtcgccacaagagccagactcctcctcgggcatcggcaagacaggccagcagcccgctaaaaagagactcaattttggtcagactggcgactcagagtcagtccccgatccgcaacctctcggagaacctccagcaacccccgctgctgtgggacctactacaatggcttcaggcggtggcgcaccaatggcagacaataacgaaggcgccgacggagtgggtaatgcctcaggaaattggcattgcgattccacatggctgggcgacagagtcatcaccaccagcacccgcacctgggccttgcccacctacaataaccacctctacaagcaaatctccagtgcttcaacgggggccagcaacgacaaccactacttcggctacagcaccccctgggggtattttgatttcaacagattccactgccacttttcaccacgtgactggcagcgactcatcaacaacaattggggattccggcccaagagactcaacttcaaactcttcaacatccaagtcaaggaggtcacgacgaatgatggcgtcacaaccatcgctaataaccttaccagcacggttcaagtcttctcggactcggagtaccagcctccgtacgtcctcggctctgcgcaccagggctgcctccctccgttcccggcggacgtgttcatgattccgcaatacggccacctgacgctcaacaatggcagccaagccgtgggacgttcatccttttactgcctggaatatttcccttctcagatgctgagaacgggcaacaactttaccttcagctacacctttgaggaagtgcctttccacagcagctacgcgcacagccagagcctggaccggctgacgaatcctctcatcgaccaatacctgtattacctgaacagaactcaaaatcagtccggaagtgcccaaaacaaggacttgctgtttagccgtgggtctccagctggcatgtctgttcagcccaaaaactggctacctggaccctgttatcggcagcagcgcgtttctaaaacaaaaacagacaacaacaacagcaattttacctggactggtgcttcaaaatataacctcaatgggcgtgaatccatcatcaaccctggcactgctatggcctcacacaaagacgacgaagacaagttctttcccatgagcggtgtcatgatttttggaaaagagagcgccggagcttcaaacactgcattggacaatgtcatgattacagacgaagaggaaattaaagccactaaccctgtggccaccgaaagatttgggaccgtggcagtcaatttccagagcagcagcacagaccctgcgaccggagatgtgcatgctatgggagcattacctggcatggtgtggcaagatagagacgtgtacctgcagggtcccatttgggccaaaattcctcacacagatggacactttcacccgtctcctcttatgggcggctttggactcaagaacccgcctcctcagatcctcatcaaaaacacgcctgttcctgcgaatcctccggcggagttttcagctacaaagtttgcttcattcatcacccaatactccacaggacaagtgagtgtggaaattgaatgggagctgcagaaagaaaacagcaagcgctggaatcccgaagtgcagtacacatccaattatgcaaaatctgccaacgttgattttactgtggacaacaatggactttatactgagcctcgccccattggcacccgttaccttacccgtcccctg

SEQ ID NO: 655 - DNA, 2208 bp, Artificial Sequence
  Description of Artificial Sequence: Synthetic polynucleotide
atggctgccgatggttatcttccagattggctcgaggacaacctctctgagggcattcgcgagtggtgggacttgaaacctggagccccgaagcccaaagccaaccagcaagagcaggacgacggccggggtctggtgcttcctggctacaagtacctcggacccttcaacggactcgacaagggggagcccgtcaacgcggcggacgcagcggccctcgagcacgacaaggcctacgaccagcagctcaaagcgggtgacaatccgtacctgcggtataaccacgccgacgccgagtttcaggagcgtctgcaagaagatacgtcttttgggggcaacctcgggcgagcagtcttccaggccaagaagcgggttctcgaacctctcggtctggttgaggaaggcgctaagacggctcctggaaagaaacgtccggtagagcagtcgccacaagagccagactcctcctcgggcatcggcaagacaggccagcagcccgctaaaaagagactcaattttggtcagactggcgactcagagtcagtccccgatccacaacctctcggagaacctccagcaacccccgctgctgtgggacctactacaatggcttcaggcggtggcgcaccaatggcagacaataacgaaggcgccgacggagtgggtaatgcctcaggaaattggcattgcgattccacatggctgggcgacagagtcatcaccaccagcacccgcacctgggccttgcccacctacaataaccacctctacaagcaaatctccagtgcttcaacgggggccagcaacgacaaccactacttcggctacagcaccccctgggggtattttgatttcaacagattccactgccacttttcaccacgtgactggcagcgactcatcaacaacaattggggattccggcccaagagactcaacttcaaactcttcaacatccaagtcaaggaggtcacgacgaatgatggcgtcacaaccatcgctaataaccttaccagcacggttcaagtcttctcggactcggagtaccagcttccgtacgtcctcggctctgcgcaccagggctgcctccctccgttcccggcggacgtgttcatgattccgcaatacggctacctgacgctcaacaatggcagccaagccgtgggacgttcatccttttactgcctggaatatttcccttctcagatgctgagaacgggcaacaactttaccttcagctacacctttgaggaagtgcctttccacagcagctacgcgcacagccagagcctggaccggctgatgaatcctctcatcgaccaatacctgtattacctgaacagaactcaaaatcagtccggaagtgcccaaaacaaggacttgctgtttagccgtgggtctccagctggcatgtctgttcagcccaaaaactggctacctggaccctgttatcggcagcagcgcgtttctaaaacaaaaacagacaacaacaacagcaattttacctggactggtgcttcaaaatataacctcaatgggcgtgaatccatcatcaaccctggcactgctatggcctcacacaaagacgacgaagacaagttctttcccatgagcggtgtcatgatttttggaaaagagagcgccggagcttcaaacactgcattggacaatgtcatgattacagacgaagaggaaattaaagccactaaccctgtggccaccgaaagatttgggaccgtggcagtcaatttccagagcagcagcacagaccctgcgaccggagatgtgcatgctacgggaacattacctggcatggtgtggcaagatagagacgtgtacctgcagggtcccatttgggccaaaattcctcacacagatggacactttcacccgtctcctcttatgggcggctttggactcaagaacccgcctcctcagatcctcatcaaaaccacgcctgttcctgcgaatcctccggcggagttttcagctacaaagtttgcttcattcatcacccagtactccacaggacaagtgagtgtggaaattgaatgggagctgcagaaagaaaacagcaagcgctggaatcccgaagtgcagtacacatccaattatgcaaaatctgccaacgttgattttactgtggacgacaatggactttatactgagcctcgccccattggcacccgttaccttacccgtcccctg

SEQ ID NO: 656 - DNA, 2208 bp, Artificial Sequence
  Description of Artificial Sequence: Synthetic polynucleotide
atggctgccgatggttatcttccagattggctcgaggacaacctctctgagggcattcgcgagtggtgggacttgaaacctggagccccgaagcccaaagccaaccagcaaaagcaggacgacggccggggtctggtgcttcctggctacaagtacctcggacccttcaacggactcgacaagggggagcccgtcaacgcggcggacgcagcggccctcgagcacgacaaggcctacgaccagcagctcaaagcgggtgacaatccgtacctgcggtataaccacgccgacgccgagtttcaggagcgtctgcaagaagatacgtcttttgggggcaacctcgggcgagcagtcttccaggccaagaagcgggttctcgaacctctcggtctggttgaggaaggcgctaagacggctcctggaaagaaacgtccggtagagcagtcgctacaagagccagactcctcctcgggcatcggcaagacaggccagcagcccgctaaaaagagactcaattttggtcagactggcgactcagagtcagtccccgatccacaacctctcggagaacctccagcaacccccgctgctgtgggacctactacaatggcttcaggcggtggcgcaccaatggcagacaataacgaaggcgccgacggagtgggtaatgcctcaggaaattggcattgcgattccacatggctgggcgacagagtcatcaccaccagcacccgcacctgggccttgcccacctacaataaccacctctacaagcaaatctccagtgcttcaacgggggccagcaacgacaaccactacttcggctacagcaccccctgggggtattttgatttcaacagattccactgccacttttcaccacgtgactggcagcgactcatcaacaacaattggggattccggcccaagagactcaacttcaaactcttcaacatccaagtcaaggaggtcacgacgaatgatggcgtcacaaccatcgctaataaccttaccagcacggttcaagtcttctcggactcggagtaccagcttccgtacgtcctcggctctgcgcaccagggctgcctccctccgttcccggcggacgtgttcatgattccgcaatacggctacctgacgctcaacaatggcagccaagccgtgggacgttcatccttttactgcctggaatatttcccttctcagatgctgagaacgggcaacaactttaccttcagctacacctttgaggaagtgcctttccacagcagctacgcgcacagccagagcctggaccggctgatgaatcctctcatcgaccaatacctgtattacctgaacagaactcaaaatcagtccggaagtgcccaaaacaaggacttgctgtttagccgtgggtctccagctggcatgtctgttcagcccaaaaactggctacctggaccctgttatcggcagcagcgcgtttctaaaacaaaaacagacaacgacaacagcaattttacctggactggtgcttcaaaatataacctcaatgggcgtgaatccatcatcaaccctggcactgctatggcctcacacaaagacgacgaagacaagttctttcccatgagcggtgtcatgatttttggaaaagagagcgccggagcttcaaacactgcattggacaatgtcatgattacagacgaagaggaaattaaagccactaaccctgtggccaccgaaagatttgggaccgtggcagtcaatttccagagcagcagcacagaccctgcgaccggagatgtgcatgctatgggagcattacctggcatggtgtggcaagatagagacgtgtacctgcagggtcccatttgggccaaaattcctcacacagatggacactttcacccgtctcctcttatgggcggctttggactcaagaacccgcctcctcagatcctcatcaaaaacacgcctgttcctgcgaatcctccggcggagttttcagctacaaagtttgcttcattcatcacccaatactccacaggacaagtgagtgtggaaattgaatgggagctgcagaaagaaaacagcaagcgctggaatcccgaagtgcagtacacatccaattatgcaaaatctgccaacgttgattttactgtggacaacaatggactttatactgagcctcgccccattggcacccgttaccttacccgtcccctg

SEQ ID NO: 657 - DNA, 2208 bp, Artificial Sequence
  Description of Artificial Sequence: Synthetic polynucleotide
atggctgccgatggttatcttccagattggctcgaggacaacctctctgagggcattcgcgagtggtgggacttgaaacctggagctccgaagcccaaagccaaccagcaaaagcaggacgacggccggggtctggtgcttcctggctacaagtacctcggacccttcaacggactcgacaagggggagcccgtcaacgcggcggacgcagcggccctcgagcacgacaaggcctacgaccagcagctcaaagcgggtgacaatccgtacctgcggtataaccacgccgacgccgagtttcaggagcgtctgcaagaagatacgtcttttgggggcaacctcgggcgagcagtcttccaggccaagaagcgggttctcgaacctctcggtctggttgaggaaggcgctaagacggctcctggaaagaaacgtccggtagagcagtcgccacaagagccagactcctcctcgggcatcggcaagacaggccagcagcccgctaaaaagagactcaattttggtcagactggcgactcagagtcagtccccgatccacaacctctcggagaacctccagcaacccccgctgctgtgggacctactacaatggcttcaggcggtggcgcaccaatggcagacaataacgaaggcgccgacggagtgggtaatgcctcaggaaattggcattgcgattccacatggctgggcgacagagtcatcaccaccagcacccgcacctgggccttgcccacctacaataaccacctctacaagcaaatctccagtgcttcaacgggggccagcaacgacaaccactacttcggctacagcaccccctgggggtattttgatttcaacagattccactgccacttttcaccacgtgactggcagcgactcatcaacaacaattggggattccggcccaagagactcaacttcaaactcttcaacatccaagtcaaggaggtcacgacgaatgatggcgtcacaaccatcgctaataaccttaccagcacggttcaagtcttctcggactcggagtaccagcttccgtacgtcctcggctctgcgcaccagggctgcctccctccgttcccggcggacgtgttcatgattccgcaatacggctacctgacgctcaacaatggcagccaagccgtgggacgttcatccttttactgcctggaatatttcccttctcagatgctgagaacgggcaacaactttaccttcagctacacctttgaggaagcgcctttccacagcagctacgcgcacagccagagcctggaccggctgatgaatcctctcatcgaccaatacctgtattacctgaacagaactcaaaatcagtccggaagtgcccaaaacaaggacttgctgtttagccgtgggtctccagctggcatgtctgttcagcccaaaaactggctacctggaccctgttatcggcagcagcgcgtttctaaaacaaaaacagacaacaacaacagcaattttacctggactggtgcttcaaaatataacctcaatgggcgtgaatccatcatcaaccctggcactgctatggcctcacacaaagacgacgaagacaagttctttcccatgagcggtgtcatgatttttggaaaagagagcgccggagcttcaaacactgcattggacaatgtcatgattacagacgaagaggaaattaaagccactaaccctgtggccaccgaaagatttgggaccgtggcagtcaatttccagagcagcagcacagaccctgcgaccggagatgtgcatgctatgggagcattacctggcatggtgtggcaagatagagacgtgtacctgcagggtcccatttgggccaaaattcctcacacagatggacactttcacccgtctcctcttatgggcggctttggactcaagaacccgcctcctcagatcctcatcaaaaacacgcctgttcctgcgaatcctccggcggagttttcagctacaaagtttgcttcattcatcacccaatactccacaggacaagtgagtgtggaaattgaatgggagctgcagaaagaaaacagcaagcgctggaatcccgaagtgcagtacacatccaattatgcgaaatctgccaacgttgattttactgtggacaacaatggactttatactgagcctcgccccgttggcacccgttaccttacccgtcccctg

SEQ ID NO: 658 - DNA, 2208 bp, Artificial Sequence
  Description of Artificial Sequence: Synthetic polynucleotide
atggctgccgatggttatcttccagattggctcgaggacaacctctctgagggcattcgcgagtggtgggacttgaaacctggagccccgaagcccaaagccaaccagcaaaagcaggacgacggccggggtctggtgcttcctggctacaagtacctcggacccttcaacggactcgacaagggggagcccgtcaacgcggcggacgcagcggccctcgagcacgacaaggcctacgaccagcagctcaaagcgggtgacaatccatacctgcggtataaccacgccgacgccgagtttcaggagcgtctgcaagaaaatacgtcttttgggggcaacctcgggcgagcagtcttccaggccaagaagcgggttctcgaacctctcggtctggttgaggaaggcgctaagacggctcctggaaagaaacgtccggtagagcagtcgccacaagagccagactcctcctcgggcatcggcaagacaggccagcagcccgctaaaaagagactcaattttggtcagactggcgactcagagtcagtccccgatccacaacctctcggagaacctccagcaacccccgctgctgtgggacctactacaatggcttcaggcggtggcgcaccaatggcagacaataacgaaggcgccgacggagtgggtaatgcctcaggaaattggcattgcgattccacatggctgggcgacagagtcatcaccaccagcacccgcacctgggccttgcccacctacaataaccacctctacaagcaaatctccagtgcttcaacgggggccagcaacgacaaccactacttcggctacagcaccccctgggggtattttgatttcaacagattccactgccactttccaccacgtgactggcagcgactcatcaacaacaattggggattccggcccaagagactcaacttcaaactcttcaacatccaagtcaaggaggtcacgtcgaatgatggcgtcacaaccatcgctaataaccttaccagcacggttcaagtcttctcggactcggagtaccagcttccgtacgtcctcggctctgcgcaccagggctgcctccctccgttcccggcggacgtgttcatgattccgcaatacggctacctgacgctcaacaatggcagccaagccgtgggacgttcatccttttactgcctggaatatttcccttctcagatgctgagaacgggcaacaactttaccttcagctacacctttgaggaagtgcctttccacagcagctacgcgcacagccagagcctggaccggctgatgaatcctctcatcgaccaatacctgtattacctgaacagaactcaaaatcagtccggaagtgcccaaaacaaggacttgctgtttagccgtgggtctccagctggcatgtctgttcagcccaaaaactggctacctggtccctgttatcggcagcagcgcgtttctaaaacaaaaacagacaacaacaacagcaattttacctggactggtgcttcaaaatataacctcaatgggcgtgaatccatcatcaaccctggcactgctatggcctcacacaaagacgacgaagacaagttctttcccatgagcggtgtcatgatttttggaaaagagagcgccggagcttcaaacactgcattggacaatgtcatgattacagacgaagaggaaattaaagccactaaccctgtggccaccgaaagatttgggaccgtggcagtcaatttccagagcagcagcacagaccctgcgaccggagatgtgcatgctatgggagcattacctggcatggtgtggcaagatagagacgtgtacctgcagggtcccatttgggccaaaattcctcacacagatggacactttcacccgtctcctcttatgggcggctttggactcaagaacccgcctcctcagatcctcatcaaaaacacgcctgttcctgcgaatcctccggcggagttttcagctacaaagtttgcttcattcatcacccaatactccacaggacaagtgagtgtggaaattgaatgggagctgcagaaagaaaacagcaagcgctggaatcccgaagtgcagtacacatccaattatgcaaaatctgccaacgttgattttactgtggacaacaatggactttatactgagcctcgccccattggcacccgttaccttacccgtcccctg

SEQ ID NO: 659 - DNA, 2208 bp, Artificial Sequence
  Description of Artificial Sequence: Synthetic polynucleotide
atggctgccgatggttatcttccagattggctcgaggacaacctctctgagggcattcgcgagtggtgggacttgaaacctggagccccgaagcccaaagccaaccagcaaaagcaggacgacggccggggtctggtgcttcctggctacaagtacctcggacccttcaacggactcgacaagggggagcccgtcaacgcggcggacgcagcggccctcgagcacgacaaggcctacgaccagcagctcaaagcgggtgacaatccgtacctgcggtataaccacgccgacgccgagtttcaggagcgtctgcaagaagatacgtcttttgggggcaacctcgggcgagcagtcttccaggccaagaagcgggttctcgaacctctcggtctggttgaggaaggcgctaagacggctcctggaaagaaacgtccggtagagcagtcgccacaagagccagactcctcctcgggcatcggcaagacaggccagcagcccgctaaaaagagactcaattttggtcagactggcgactcagagtcagtccccgatccacaacctctcggagaacctccagcaacccccgctgctgtgggacctactacaatggcttcaggcggtggcgcaccaatggcagacaataacgaaggcgccgacggagtgggtaatgcctcaggaaattggcattgcgattccacatggctgggcgacagagtcatcaccaccagcacccgcacctgggccttgcccacctacaataaccacctctacaagcaaatctccagtgcttcaacgggggccagcaacgacaaccactacttcggctacagcaccccctgggggtattttgatttcaacagattccactgccacttttcaccacgtgactggcagcgactcatcaacaacaattggggattccggcccaagagactcaacttcaaactcttcaacatccaagtcaaggaggtcacgacgaatgatggcgtcacaaccatcgctaataaccttaccagcacggttcaagtcttctcggactcggagtaccagcttccgtacgtcctcggctctgcgcaccagggctgcctccctccgttcccggcggacgtgttcatgattccgcaatacggctacctgacgctcaacaatggcagccaagccgtgggacgttcatccttttactgcctggaatatttcccttctcagatgctgagaacgggcaacaactttaccttcagctacacctttgaggaagtgcctttccacagcagctacgcgcacagccagagcctggaccggctgatgaatcctctcatcgaccaatacctgtattacctgaacagaactcaaaatcagtccggaagtgcccaaaacaaggacttgctgtttagccgtgggtctccagctggcacgtctgttcagcccaaaaactggctacctggaccctgttatcggcagcagcgcgtttctaaaacaaaaacagacaacaacaacagcaattttacctggactggtgcttcaaaatataacctcaatgggcgtgaatccatcatcaaccctggcactgctatggcctcacacaaagacgacgaagacaagttctttcccatgagcggtgtcatgatttttggaaaagagagcgccggagcttcaaacactgcattggacaatgtcatgattacagacgaagaggaaattaaagccactaaccctgtggccaccgaaagatttgggaccgtggcagtcaatttccagagcagcagcacagaccctgcgaccggagatgtgcatgctatgggagcattacctggcatggtgtggcaagatagagacgtgtacctgcagggtcccatttgggccaaaattcctcacacagatggacactttcacccgtctcctcttatgggcggctttggactcaagaacccgcctcctcagatcctcatcaaaaacacgcctgttcctgcgaatcctccggcggagttttcagctacaaagtttgcttcattcatcacccaatactccacaggacaagtgagtgtggaaattgaatgggagctgcagaaagaaaacagcaagcgctggaatcccgaagtgcagtacacatccaattatgcaaaatctgccaacgttgattttactgtggacaacaatggactttatactgggcctcgccccattggcacccgttaccttacccgtcccctg

SEQ ID NO: 660 - DNA, 2208 bp, Artificial Sequence
  Description of Artificial Sequence: Synthetic polynucleotide
atggctgccgatggttatcttccagattggctcgaggacaacctctctgagggcattcgcgagtggtgggacttgaaacctggagccccgaagcccaaagccaaccagcaaaagcaggacgacggccggggtctggtgcttcctggctacaagtacctcggacccttcaacggactcgacaagggggagcccgtcaacgcggcggacgcagcggccctcgagcacgacaaggcctacgaccagcagctcaaagcgggtgacaatccgtacctgcggtataaccacgccgacgccgagtttcaggagcgtctgcaagaagatacgtcttttgggggcaacctcgggcgagcagtcttccaggccaagaagcgggttctcgaacctctcggtctggttgaggaaggcgctaagacggctcctggaaagaaacgtccggtagagcagtcgccacaagagccagactcctcctcgggcatcggcaagacaggccagcagcccgctaaaaagagactcaattttggtcagactggcgactcagagtcagtccccgatccacaacctctcggagaacctccagcaacccccgctgctgtgggacctactacaatggcttcaggcggtggcgcaccaatggcagacaataacgaaggcgccgacggagtgggtaatgccccaggaaattggcattgcgactccacatggctgggcgacagagtcatcaccaccagcacccgcacctgggccttgcccacctacaataaccacctctacaagcaaatctccagtgcttcaacgggggccagcaacgacaaccactacttcggctacagcaccccctgggggtattttgatttcaacagattccactgccacttttcaccacgtgactggcagcgactcatcaacaacaattggggattccggcccaagagactcaacttcaaactcttcaacatccaagtcaaggaggtcacgacgaatgatggcgtcacaaccatcgctaataaccttaccagcacggttcaagtcttctcggactcggagtaccagcttccgtacgtcctcggctctgcgcaccagggctgcctccctccgttcccggcggacgtgttcatgattccgcaatacggctacctgacgctcaacaatggcagccaagccgtgggacgttcatccttttactgcctggaatatttcccttctcagatgctgagaacgggcaacaactttaccttcagctacacctttgaggaagtgcctttccacagcagctacgcgcacagccagagcctggaccggctgatgaatcctctcatcgaccaatacctgtattacctgaacagaactcaaaatcagtccggaagtgcccaaaacaaggacttgctgtttagccgtgggtctccagctggcatgtctgttcagcccaaaaactggctacctggaccctgttatcggcagcagcgcgtttctaaaacaaaaacagacaacaacaacagcaattttacctggactggtgcttcaaaatataacctcaatgggcgtgaatccatcatcaaccctggcacagctatggcctcacacaaagacgacgaagacaagttctttcccatgagcggtgtcatgatttttggaaaagagagcgccggagcttcaaacactgcattggacaatgtcatgattacaggcgaagaggaaattaaagccactaaccctgtggccaccgaaagatttgggaccgtggcagtcaatttccagagcagcagcacagaccctgcgaccggagatgtgcatgctatgggagcattacctggcatggtgtggcaagatagagacgtgtacctgcagggtcccatttgggccaaaattcctcacacagatggacactttcacccgtctcctcttatgggcggctttggactcaagaacccgcctcctcagatcctcatcaaaaacacgcctgttcctgcgaatcctccggcggagttttcagctacaaagtttgcttcattcatcacccaatactccacaggacaagtgagtgtggaaattgaatgggagctgcagaaagaaaacagcaagcgctggaatcccgaagtgcagtacacatccaattatgcaaaatctgccaacgttgattttactgtggacaacaatggactttatactgagcctcgccccattggcacccgttaccttacccgtcccctg

SEQ ID NO: 661 - DNA, 2208 bp, Artificial Sequence
  Description of Artificial Sequence: Synthetic polynucleotide
atggctgccgatggttatcttccagattggctcgaggacaacctctctgagggcattcgcgagtggtgggacttgaaacctggagccccgaagcccaaagccaaccagcaaaagcaggacgacggccggggtctggtgcttcctggctacaagtacctcggacccttcaacagactcgacaagggggagcccgtcaacgcggcggacgcagcggccctcgagcacgacaaggcctacgaccagcagctcaaagcgggtgacaatccgtacctgcggtataaccacgccgacgccgagtttcaggagcgtctgcaagaagatacgtcttttgggggcaacctcgggcgagcagtcttccaggccaagaagcgggttctcgaacctctcggtctggttgaggaaggcgctaagacggctcctggaaggaaacgtccggtagagcagtcgccacaagagccagactcctcctcgggcatcggcaagacaggccagcagcccgctaaaaagagactcaattttggtcagactggcgactcagagtcagtccccgatccacaacctctcggagaacctccagcaacccccgctgctgtgggacctactacaatggcttcaggcggtggcgcgccaatggcagacaataacgaaggcgccgacggagtgggtaatgcctcaggaaattggcattgcgattccacatggctgggcgacagagtcatcaccaccagcacccgcacctgggccttgcccacctacaataaccacctctacaagcaaatctccagtgcttcaacgggggccagcaacgacaaccactacttcggctacagcaccccctgggggtattttgatttcaacagattccactgccacttttcaccacgtgactggcagcgactcatcaacaacaattggggattccggcccaagagactcaacttcaaactcttcaacatccaagtcaaggaggtcacgacgaatgatggcgtcacaaccatcgctaataaccttaccagcacggttcaagtcttctcggactcggagtaccagcttccgtacgtcctcggctctgcgcaccagggctgcctccctccgttcccggcggacgtgttcatgattccgcaatacggctacctgacgctcaacaatggcggccaagccgtgggacgttcatccttttactgcctggaatatttcccttctcagatgctgagaacgggcaacaactttaccttcagctacacctttgaggaagtgcctttccacagcagctacgcgcacagccagagcctggaccggctgatgaatcctctcatcgaccaatacctgtattacctgaacagaactcaaaatcagtccggaagtgcccaaaacaaggacttgctgtttagccgtgggtctccagctggcatgtctgttcagcccaaaaactggctacctggaccctgttatcggcagcagcgcgtttctaaaacaaaaacagacaacaacaacagcaattttacctggactggtgcttcaaaatatagcctcaatgggcgtgaatccatcatcaaccctggcactgctatggcctcacacaaagacgacgaagacaagttctttcccatgggcggtgtcatgatttttggaaaagagagcgccggagcttcaaacactgcattggacaatgccatgattacagacgaagaggaaattaaagccactaaccctgtggccaccgaaagatttgggaccgtggcagtcaatttccagagcagcagcacagaccctgcgaccggagatgtgcatgctatgggagcattacctggcatggtgtggcaagatagagacgtgtacctgcagggtcccatttgggccaaaattcctcacacagatggacactttcacccgtctcctcttatgggcggctttggactcaagaacccgcctcctcagatcctcatcaaaaacacgcctgttcctgcgaatcctccggcggagttttcagctacaaagtttgcttcattcatcacccaatactccacaggacaagtgagtgtggaaattgaatgggagctgcagaaagaaaacagcaagcgctggaatcccgaagtgcagtacacatccaattatgcaaaatctgccaacgttgattttactgtggacaacaatggactttatactgagcctcgccccattggcacccgttaccttacccgtcccctg

SEQ ID NO: 662 - DNA, 2208 bp, Artificial Sequence
  Description of Artificial Sequence: Synthetic polynucleotide
atggctgccgatggttatcttccagattggctcgaggacaacctctctgagggcattcgcgagtggtgggacttgaaacctggagccccgaagcccaaagccaaccagcaaaagcaggacgacggccggggtctggtgcttcctggctacaagtacctcggacccttcaacggactcgacaagggggagcccgtcaacgcggcggacgcagcggccctcgagcacgacaaggcctacgaccagcagctcaaagcgggtgacaatccgtacctgcggtataaccacgccgacgccgagtttcaggagcgtctgcaagaagatacgtcttttgggggcaacctcgggcgagcagtcttccaggccaagaagcgggttctcgaacctctcggtctggttgaggaaggcgctaagacggctcctggaaagaaacgtccggtagagcagtcgccacaagagccagactcctcctcgggcatcggcaagacaggccagcagcccgctaaaaagagactcaattttggtcagactggcgactcagagtcagtccccgatccacaacctctcggagaacctccagcaacccccgctgctgtgggacctactacaatggcttcaggcggtggcgcaccaatggcagacaataacgaaggcgccgacggagtgggtaatgcctcaggaaattggcattgcgattccacatggctgggcggcagagtcatcaccaccagcacccgcacctgggccttgcccacctacaataaccacctctacaagcaaatctccagtgcttcaacgggggccagcaacgacaaccactacttcggctacagcaccccctgggggtattttgatttcaacagattccactgccacttttcaccacgtgactggcagcgactcatcaacaacaattggggattccggcccaagagactcaacttcaaactcttcaacatccaagtcaaggaggtcacgacgaatgatggcgtcacaaccatcgctaataaccttaccagcacggttcaagtcttctcggactcggagtaccagcttccgtacgtcctcggctctgcgcaccagggctgcctccctccgttcccggcggacgtgttcatgattccgcaatacggctacctgacgctcaacaatggcagccaagccgtgggacgttcatccttttactgcctggaatatttcccttctcagatgctgagaacgggcaacaactctaccttcagctacacctttgaggaagtgcctttccacagcagctacgcgcacagccagagcctggaccggctgatgaatcctctcatcgaccaatacctgtattacctgaacagaactcaaaatcagtccggaagtgcccaaaacaaggacttgctgtttagccgtgggtctccagctggcatgtctgttcagcccaaaaactggctacctggaccctgttatcggcagcagcgcgtttctaaaacaaaaacagacaacaacaacagcaattttacctggactggtgcttcaaaatataacctcaatgggcgtgaatccatcatcaaccctggcactgctatggcctcacacaaagacgacgaagacaagttctttcccatgagcggtgtcatgatttttggaaaagagagcgccggagcttcaaacactgcattggacaatgtcatgattacagacgaagaggaaattaaagccactaaccctgtggccaccgaaagatttgggaccgtggcagtcaatttccagagcagcagcacagaccctgcgaccggagatgtgcatgctatgggaacattacctggcatggtgtggcaagatagagacgtgtacctgcagggtcccatttgggccaaaattcctcacacagatggacactttcacccgtctcctcttatgggcggctttggactcaagaacccgcctcctcagatcctcatcaaaaacacgcctgttcctgcgaatcctccggcggagttttcagctacaaagtttgcttcattcatcacccaatactccacaggacaagtgagtgtggaaattgaatgggagctgcagaaagaaaacagcaagcgctggaatcccgaagtgcagtacacatccaattatgcaaaatctgccaacgttgattttactgtggacaacaatggactttatactgagcctcgccccattggcacccgttaccttacccgtcccctg

SEQ ID NO: 663 - DNA, 2208 bp, Artificial Sequence
  Description of Artificial Sequence: Synthetic polynucleotide
atggctgccgatggttatctcccagattggctcgaggacaacctctctgagggcattcgcgagtggtgggacttgaaacctggagccccgaagcccaaagccaaccagcaaaagcaggacgacggccggggtctggtgcttcctggctacaagtacctcggacccttcaacggactcgacaagggggagcccgtcagcgcggcggacgcagcggccctcgagcacgacaaggcctacgaccagcagctcaaagcgggtgacaatccgtacctgcggtataaccacgccgacgccgagtttcaggagcgtctgcaagaagatacgtcttttgggggcaacctcgggcgagcagtcttccaggccaagaagcgggttctcgaacctctcggtctggttgaggaaggcgctaagacggctcctggaaagaaacgtccggtagagcagtcgccacaagagccagactcctcctcgggcatcggcaagacaggccagcagcccgctaaagagagactcaattttggtcagactggcgactcagagtcagtccccgatccacaacctctcggagaacctccagcaacccccgctgctgtgggacctactacaatggcttcaggcggtggcgcaccaatggcagacaataacgaaggcgccgacggagtgggtaatgcctcaggaaattggcattgcgattccacatggctgggcgacagagtcatcaccaccagcacccgcacctgggccttgcccacctacaataaccacctctacaagcaaatctccagtgcttcaacgggggccagcaacgacaaccactacttcggctacagcaccccctgggggtattttgatttcaacagattccactgccacttttcaccacgtgactggcagcgactcatcaacaacaattggggattccggcccaagagactcaacttcaaactcttcaacatccaagtcaaggaggtcacgacgaatgatggcgtcacaaccatcgccaataaccttaccagcacggttcaagtcttctcggactcggagtaccagcttccgtacgtcctcggctctgcgcaccagggctgcctccctccgttcccggcggacgtgttcatgattccgcaatacggctacctgacgctcaacaatggcagccaagccgtgggacgttcatccttttactgcctggaatatttcccttctcagatgctgagaacgggcaacaactttaccttcagctacacctttgaggaagtgcctttccacagcagctacgcgcacagccagagcctggaccggctgatgaatcctctcatcgaccaatacctgtattacctgaacagaactcaaaatcagtccggaagtgcccaaaacaaggacttgctgtttagccgtgggtctccagctggcatgtctgttcagcccaaaaactggctacctggaccctgttatcggcagcagcgcgtttctaaaacaaaaacagacaacaacaacagcaattttacctggactggtgcttcaaaatataacctcaatgggcgtgaatccatcatcaaccctggcactgctatggcctcacacaaagacgacgaagacaagttctttcccatgagcggtgtcatgatttttggaaaagagagcgccggagcttcaaacactgcattggacaatgtcatgattacagacgaagaggaaattaaagccactaaccctgtggccaccgaaagatttgggaccgtggcagtcaatttccagagcagcagcacagaccctgcgaccggagatgtgcatgctatgggagcattacctggcatggtgtggcaagatagagacgtgtacctgcagggtcccatttgggccaaaattcctcacacagatggacactttcacccgtctcctcttatgggcggctttggactcaagaacccgcctcctcagatcctcatcaaaaacacgcctgttcctgcgaatcctccggcggagttttcagctacaaagtttgcttcattcatcacccaatactccacaggacaagtgagtgtggaaattgaatgggagctgcagaaagaaaacagcaagcgctggaatcccgaagtgcagtacacatccaattatgcaaaatctgccaacgttgattttactgtggacaacaatggactttatactgagcctcgccccattggcacccgttaccttacccgtcccctg

SEQ ID NO: 664 - DNA, 2208 bp, Artificial Sequence
  Description of Artificial Sequence: Synthetic polynucleotide
atggctgccgatggttatcttccagattggctcgaggacaacctctctgagggcattcgcgagtggtgggacttgaaacctggagccccgaagcccaaagccaaccagcaaaagcaggacgacggccggggtctggtgcttcctggctacaagtacctcggacccttcaacggactcgacaagggggagcccgtcaacgcggcggacgcagcggccctcgagcacgacaaggcctacgaccagcagctcaaagcgggtgacaatccgtacctgcggtataaccacgccgacgccgagtttcaggagcgtctgcaagaagatacgtcttttgggggcaacctcgggcgagcagtcttccaggccaagaagcgggttctcgaacctctcggtctggttgaggaaggcgctaagacggctcctggaaagaaacgtccggtagagcagtcgccacaagagccagactcctcctcgggcatcggcaagacaggccagcagcccgctaaaaagagactcaattttggtcagactggcgactcagagtcagtccccgatccacaacctctcggagaacctccagcaacccccgctgctgtgggacctactacaatggcttcaggcggtggcgcaccaatggcagacaataacgaaggcgccgacggagtgggtaatgcctcaggaaattggcattgcgattccacatggctgggcgacagagtcatcaccaccagcacccgcacctgggccttgcccacctacaataaccacctctacaagcaaatctccagtgcttcaacgggggccagcaacgacaaccactacttcggctacagcaccccctgggggtattttgatttcaacagattccactgccacttttcaccacgtgactggcagcgactcatcaacaacaattggggattccggcccaagagactcaacttcaaactcttcaacatccaagtcaaggaggtcacgacgaatgatggcgtcacaaccatcgctaataaccttaccagcacggttcaagtcttctcggactcggagtaccagcttccgtacgtcctcggctctgcgcaccagggctgcctccctccgttcccggcggacgtgttcatgattccgcaatacggctacctgacgctcaacaatggcagccaagccgtgggacgttcatccttttactgcctggaatatttcccttctcagatgctgagaacgggcaacaactttaccttcagctacacctttgaggaagtgcctttccacagcagctacgcgcacagccagagcctggaccggctgatgaatcctctcatcgaccaatacctgtattacctgaacagaactcaaaatcagtccggaagtgcccaaaacaaggacttgctgtttagccgtgggtctccagctggcatgtctgttcagcccaaaaactggctacctggaccctgttatcggcagcagcgcgtttctaaaacaaaaacagacaacaacaacagcaattttacctggactggtgcttcaaaatataacctcaatgggcgtgaatccatcatcaaccctggcactgctatggcctcacacaaagacgacgaagacaagttctttcccatgagcggtgtcatgatttttggaaaagagagcgccggagcttcaaacactgcattggacaatgtcatgattacagacgaaggggaaattaaagccactaaccctgtggccaccgaaagatttgggaccgtggcagtcaatttccagagcagcagcacagaccctgcgaccggagatgtgcatgctatgggagcattacctggcatggtgtggcaagatagagacgtgtacctgcagggtcccatttgggccaaaattcctcacacagatggacactttcacccgtctcctcttatgggcggctttggactcaagaacccgcctcctcagatcctcatcaaaaacacgcctgttcctgcgaatcctccggcggagttttcagctacaaagtttgcttcattcatcacccaatactccacaggacaagtgagtgtggaaattgaatgggagctgcagaaagaaaacagcaagcgctggaatcccgaagtgcagtacacatccaattatgcaaaatctgccaacgttgattttactgtggacaacaatggactttatactgagcctcgccccattggcacccgttaccttacccgtcccctg

SEQ ID NO: 665 - DNA, 2208 bp, Artificial Sequence
  Description of Artificial Sequence: Synthetic polynucleotide
atggctgccgatggttatcttccagattggctcgaggacaacctctctgagggcattcgcgagtggtgggacttgaaacctggagccccgaaacctaaagccaaccagcaaaagcaggacgacggccggggtctggtgcttcctggctacaagtacctcggacccttcaacggactcgacaagggggagcccgtcaacgcggcggacgcagcggccctcgagcacgacaaggcctacgaccagcagctcaaagcgggtgacaatccgtacctgcggtataaccacgccgacgccgagtttcaggagcgtctgcaagaagatacgtcttttgggggcaacctcgggcgagcagtcttccaggccaagaagcgggttctcgaaccttttggtctggttgaggaaggcgctaagacggctcctggaaagaaacgtccggtagagcagtcgccacaagagccagactcctcctcgggcatcggcaagacaggccagcagcccgctaaaaagagactcaattttggtcagactggcgactcagagtcagtccccgacccacaacctctcggagaacctccagcaacccccgctgctgtgggacctactacaatggcttcaggcggtggcgcaccaatggcagacaataacgaaggcgccgacggagtgggtaatgcctcaggaaattggcattgcgattccacatggctgggcgacagagtcatcaccaccagcacccgcacctgggccttgcccacctacaataaccacctctacaagcaaatctccagtgcttcaacgggggccagcaacgacaaccactacttcggctacagcaccccctgggggtattttgatttcaacagattccactgccacttttcaccacgtgactggcagcgactcatcaacaacaattggggattccggcccaagagactcaacttcaagctcttcaacatccaagtcaaggaggtcacgacgaacgatggcgtcacgaccatcgctaataaccttaccagcacggttcaagtcttctcggattcagagtaccaactgccgtacgtcctcggctctgcgcaccagggctgcctccctccgttcccggcggacgtgtttatgattccgcagtacggctacctaacgctcaacaatggcagccaggccgtgggacgttcatccttttactgcccggaatatttcccttctcagatgctgagaacgggcaacaactttaccttcagctacacctttgaggaagtgcctttccacagcagctacgcgcacagccagagcctggaccggctgatgaatcctctcatcgaccaatacctgtattacctgaacagaactcaaaatcagtccggaagtgcccaaaacaaggacttgctgtttagccgtgggtctccagctggcatgtctgttcagcccaaaaactggctacctggaccctgttatcggcagcagcgcgtttctaaaacaaaaacagacaacaacaacagcaattttacctggactggtgcttcaaaatataacctcaatgggcgtgaatccatcatcaaccctggcactgctatggcctcacacaaagacgacaaagacaagttctttcccatgagcggtgtcatgatttttggaaaagagagcgccggagcttcaaatactgcattggacaatgtcatgatcacagatgaagaggaaattaaagccactaaccctgtggccaccgaaagatttgggaccgtggcagtcaatttccagagcagcaacacagaccccgcgaccggagatgtgcatgttatgggagccttacctggcatggtgtggcaagacagagacgtatacctgcagggtcccatttgggccaaaattcctcacacggatggacactttcacccgtctcctctcatgggcggctttggacttaagcacccgcctcctcaaatcctcatcaaaaacacgcctgttcctgcgaatcctccggcagagttttcggctacaaagtttgcttcattcatcacccagtactccacaggacaagtgagtgtggaaattgaatgggagctgcagaaagaaaacagcaagcgctggaatcccgaagtgcagtacacatccaattatgcaaaatctgccaacgttgatttcactgtggacaacaatggactttatactgagcctcgccccattggcacccgttaccttacccgtcccttg

SEQ ID NO: 666 - DNA, 2208 bp, Artificial Sequence
  Description of Artificial Sequence: Synthetic polynucleotide
atggctgccgatggttatcttccagattggctcgaggacaacctctctgagggcattcgcgagtggtgggacttgaaacctggagccccgaaacctaaagccaaccagcaaaagcaggacgacggccggggtctggtgcttcctggctacaagtacctcggacccttcaacggactcgacaagggggagcccgtcaacgcggcggacgcagcggccctcgagcacgacaaggcctacgaccagcagctcaaagcgggtgacaatccgtacctgcggtataaccacgccgacgccgagtttcaggagcgtctacaagaagatacgtcttttgggggcaacctcgggcgagcagtcttccaggccaagaagcgggttctcgaaccttttggtctggttgaggaaggcgctaagacggctcctggaaagaaacgtccggtagagcagtcgccacaagagccagactcctcctcgggcatcggcaagacaggccagcagcccgctaaaaagagactcaattttggtcagactggcgactcagagtcagtccccgacccacaacctctcggagaacctccagcaacccccgctgctgtgggacctactacaatggcttcaggcggtggcgcaccaatggcagacaataacgaaggcgccgacggagtgggtaatgcctcaggaaattggcattgcgattccacatggctgggcgacagagtcatcaccaccagcacccgcacctgggccttgcccacctacaataaccacctctacaagcaaatctccagtgcttcaacgggggccagcaacgacaaccactacttcggctacagcaccccctgggggtattttgatttcaacagattccactgccacttttcaccacgtgactggcagcgactcatcaacaacaattggggattccggcccaagagactcaacttcaagctcttcaacatccaagtcaaggaggtcacgacgaacgatggcgtcacgaccatcgctaataaccttaccagcacggttcaagtcttctcggattcagagtaccaactgccgtacgtcctcggctctgcgcaccagggctgcctccctccgttcccggcggacgtgttcatgattccgcagtacggctacctaacgctcaacaatggcagccaggccgtgggacgttcatccttttactgcctggaatatttcccttctcagatgctgagaacgggcaacaactttaccttcagctacacctttgaggaagtgcctttccacagcagctacgcgcacagccagagcctggaccggctgatgaatcctctcatcgaccaatacctgtattacctgaacagaactcaaaatcagtccggaagtgcccaaaacaaggacttgctgtttagccgtgggtctccagctggcatgtctgttcagcccaaaaactggctacctggaccctgttatcggcagcagcgcgtttctaaaacaaaaacagacaacaacaacagcaattttacctggactggtgcttcaaaatataacctcaatgggcgtgaatccatcatcaaccctggcactgctatggcctcacacaaagacgacaaagacaagttctttcccatgagcggtgtcatgatttttggaaaagagagcgccggagcttcaaatactgcattggacaatgtcatgatcacagatgaagaggaaattaaagccactaaccctgtggccaccgaaagatttgggaccgtggcagtcaatttccagagcagcgacacagaccccgcgaccggagatgtgcatgttatgggagccttacctggcatggtgtggcaagacagagacgtatacctgcagggtcccatttgggccaaaattcctcacacggatggacactttcacccgtctcctctcatgggcggctttggacttaagcacccgcctcctcaaatcctcatcaaaaacacgcctgttcctgcgaatcctccggcagagttttcggctacaaagtttgcttcattcatcacccagtactccacaggacaagtgagtgtggaaattgaatgggagctgcagaaagaaaacagcaagcgctggaatcccgaagtgcagtacacatccaattatgcaaaatctgccaacgttgatttcactgtggacaacaatggactttatactgagcctcgccccattggcacccgttaccttacccgtcccttg

SEQ ID NO: 667 - DNA, 2208 bp, Artificial Sequence
  Description of Artificial Sequence: Synthetic polynucleotide
atggctgccgatggttatcttccagattggctcgaggacaacctctctgagggcattcgcgagtggtgggacttgaaacctggagccccgaaacctaaagccaaccagcaaaagcagggcgacggccggggtctggtgcttcctggctacaagtacctcggacccttcaacggactcgacaagggggagcccgtcaacgcggcggacgcagcggccctcgagcacgacaaggcctacgaccagcagctcaaagcgggtgacaatccgtacctgcggtataaccacgccgacgccgagtttcaggagcgtctgcaagaagatacgtcttttgggggcaacctcgggcgagcagtcttccaggccaagaagcgggttctcgaaccttttggtctggttgaggaaggcgctaagacggctcctggaaagaaacgtccggtagagcagtcgccacaagagccagactcctcctcgggcatcggcaagacaggccagcagcccgctaaaaagagactcaattttggtcagactggcgactcagagtcagtccccgacccacaacctctcggagaacctccagcaacccccgctgctgtgggacctactacaatggcttcaggcggtggcgcaccaatggcagacaataacgaaggcgccgacggagtgggtaatgcctcaggaaattggcattgcgattccacatggctgggcgacagagtcatcaccaccaacactcgcacctgggccttgcccacctacaataaccacctctacaagcaaatctccagtgcttcaacgggggccagcaacgacaaccactacttcggctacagcaccccctgggggtattttgatttcaacagattccactgccacttttcaccacgtgactggcagcgactcatcaacaacaattggggattccggcccaagagactcaacttcaagctcttcaacatccaagtcaaggaggtcacgacgaacgatggcgtcacgaccatcgctaataaccttaccagcacggttcaagtcttctcggattcagagtaccaactgccgtacgtcctcggctctgcgcaccagggctgcctccctccgttcccggcggacgtgttcatgattccgcagtacggctacctaacgctcaacaatggcagccaggccgtgggacgttcatccttttactgcctggaatatttcccttctcagatgctgagaacgggcaacaactttaccttcagctacacctttgaggaagtgcctttccacagcagttacgggcacagccagagcctggaccggctgatgaatcttctcatcgaccaatacctgtattacctgaacagaactcaaaatcagtccggaagtgcccaaaacaaggacttgctgtttagccgtgggtctccagctggcatgtttgttcagcccaaaaactggctacctggaccctgttatcggcagcagcgcgtttctaaaacaaaaacagacaacaacaacagcaattttacctggactggtgcttcaaaatataacctcaatgggcgtgaatccatcatcaaccctggcactgctatggcctcacacaaagacgacgaagacaagttctttcccatgagcggtgtcatgatttttggaaaagagagcgccggagcttcaaatactgcattggacaatgtcatgatcacagatgaagaggaaattaaagccactaaccctgtggccaccgaaagatttgggaccgtggcagtcaatttccagagcagcagcacagaccccgcgaccggagatgtgcatgttatgggagccttacctggcatggtgtggcaagacagagacgtatacctgcagggtcccatttgggccaaaattcctcacacggatggacactttcacccgtctcctctcatgggcggctttggacttaagcacccgcctcctcaaatcctcatcaaaaacacgcctgttcctgcgaatcctccggcagagttttcggctacaaagtttgcttcattcatcacccagtactccacaggacaagtgagtgtggaaattgaatgggagctgcagaaagaaaacagcaagcgctggaatcccgaagtgcagtacacatccaattatgcaaaatctgccaacgttgatttcactgtggacaacaatggactttatactgagcctcgccccattggcacccgttaccttacccgtcccttg

SEQ ID NO: 668 - DNA, 2208 bp, Artificial Sequence
  Description of Artificial Sequence: Synthetic polynucleotide
atggctgccgatggttatcttccagattggctcgaggacaacctctctgagggcattcgcgagtggtgggacttgaaacctggagccccgaaacctaaagccaaccagcaaaagcaggacgacggccggggtctggtgcttcctggctacaagtacctcggacccttcaacggactcgacaagggggagcccgtcaacgcggcggacgcagcggccctcgagcacgacaaggcctacgaccagcagctcaaagcgggtgacaatccgtacctgcggtataaccacgccgacgccgagtttcaggagcgtctgcaagaagatacgtcttttgggggcaacctcgggcgagcagtcttccaggccaagaagcgggttctcgaaccttttggtctggttgaggaaggcgctaagacggctcctggaaagaaacgtccggtagagcagtcgccacaagagccagactcctcctcgggcatcggcaagacaggccagcagcccgctaaaaagagactcaattttggtcagactggcgactcagagtcagtccccgacccacaacctctcggagaacctccagcaacccccgctgctgtgggacctactacaatggcttcaggcggtggcgcaccaatggcagacaataacgaaggcgccgacggagtgggtaatgcctcaggaaattggcattgcgattccacatggctgggcgacagagtcatcaccaccaacacccgcacctgggccttgcccacctacaataaccacctctacaagcaaatctccagtgcttcaacgggggccagcaacgacaaccactacttcggctacagcaccccctgggggtattttgatttcaacagattccactgccacttttcaccacgtgactggcagcgactcatcaacaacaattggggattccggcccaagagactcaacttcaagctcttcaacatccaagtcaaggaggtcacgacgaacgatggcgtcacgaccatcgctaataaccttaccagcacggttcaagtcttctcggattcagagtaccaactgccgtacgtcctcggctctgcgcaccagggctgcctccctccgttcccggcggacgtgttcatgattccgcagtacggctacctaatgctcaacaatggcagccaggccgtgggacgttcatccttttactgcctggaatatttcccttctcagatgctgagaacgggcaacaactttaccttcagctacacctttgaggaagtgcctttccacagcagctacgcgcacagccagagcctggaccggctgatgaatcctctcatcgaccaatacctgtattacctgaacagaactcaaaatcagtccggaagtgcccaaaacaaggacttgctgtttagccgtgggtctccagctggcatgtctgttcagcccaaaaactggctacctggaccctgttatcggcagcagcgcgtttctaaaacaaaaacagacaacaacaacagcaattttacctggactggtgcttcaaaatataacctcaatgggcgtgaatccatcatcaaccctggcactgctatggcctcacacaaagacgacgaagacaagttctttcccatgagcggtgtcatgatttttggaaaagagagcgccggagcttcaaatactgcattggacaatgtcatgatcacagatgaagaggaaattaaagccactaaccctgcggccaccgaaagatttgggaccgtggcagtcaatttccagagcagcagcacagaccccgcgaccggagatgtgcatgttatgggagccttacctggcatggtgtggcaagacagagacgtatacctgcagggtcccatttgggccaaaattcctcacacggatggacactttcacccgtctcctctcatgggcggctttggacttaagcacccgcctcctcaaatcctcatcaaaaacacgcctgttcctgcgaatcctccggcagagttttcggctacaaagtttgcttcattcatcacccagtactccacaggacaagtgagtgtggaaattgaatgggagctgcagaaagaaaacagcaagcgctggaatcccgaagtgcagtacacatccaattatgcaaaatctgccaacgttgatttcactgtggacaacaatggactttatactgagcctcgccccattggcacccgttaccttacccgtcccttg

SEQ ID NO: 669 - DNA, 2208 bp, Artificial Sequence
  Description of Artificial Sequence: Synthetic polynucleotide
atggctgccgatggttatcttccagattggctcgaggacaacctctctgagggcattcgcgagtggtgggacttgaaacctggagccccgaaacctaaagccaaccagcaaaagcaggacgacggccggggtctggtgcttcctggctacaagtacctcggacccttcaacggactcgacaagggggagcccgtcaacgcggcggacgcagcggccctcgagcacgacaaggcctacgaccagcagctcaaagcgggtgacaatccgtacctgcggtataaccacgccgacgccgagtttcaggagcgtctgcaagaagatacgtcttttgggggcaacctcgggcgagcagtcttccaggccaagaagcgggttctcgaaccttttggtctggttgaggaaggcgctaagacggctcctggaaagaaacgtccggtagagcagtcgccacaagagccagactcctcctcgggcatcggcaagacgggccagcagcccgctaaaaagagactcaattttggtcagactggcgactcagagtcagtccccgacccacaacctctcggagaacctccagcaacccccgctgctgtgggacctactacaatggcttcaggcggtggcgcaccaatggcagacaataacgaaggcgccgacggagtgggtaatgcctcaggaaattggcattgcgattccacatggctgggcgacagagtcatcaccaccagcacccgcacctgggccttgcccacctacaataaccacctctacaagcaaatctccagtgcttcaacgggggccagcaacgacaaccactacttcggctacagcaccccctgggggtattttgatttcaacagattccactgccacttttcaccacgtgactggcagcgactcatcaacaacaattggggattccggcccaagagactcaacttcaagctcttcaacatccaagtcaaggaggtcacgacgaacgatggcgtcacgaccatcgctaataaccttaccagcacggttcaagtcttctcggattcagagtaccaactgccgtacgtcctcggctctgcgcaccagggctgcctccctccgttcccggcggacgtgttcatgattccgcagtacggctacctaacgctcaacaatggcagccaggccgtgggacgttcatccttttactgcctggaatatttcccttctcagatgctgagaacgggcaacaactttaccttcagctacacctttgaggaagtgcctttccacagcagctacgcgcacagccagagcctggaccggctgatgaatcctctcatcgaccaatacctgtattacctgaacagaactcaaaatcagtccggaagtgcccaaaacaaggacttgctgtttagccgtgggtctccagctggcatgtccgttcagcccaaaaactggctacctggaccctgttatcggcagcagcgcgtttctaaaacaaaaacagacaacaacaacagcaattttacctggactggtgcttcaaaatataacctcaatgggcgtgaatccatcatcaaccctggcactgctatggcctcacacaaagacgacgaagacaagttctttcccatgagcggtgtcatgatttttggaaaagagagcgccggagcttcaaatactgcattggacaatgtcatgatcacagatgaagaggaaattaaagccactaaccctgtggccaccgaaagatttgggaccgtggcagtcaatttccagagcagcagcacagaccccgcgaccggagatgtgcatgttatgggagccttacctggcatggtgtggcaagacagagacgtatacctgcagggtcccatttgggccaaaattcctcacacggatggacactttcacccgtctcctctcatgggcggctttggacttaagcacccgcctcctcaaatcctcatcaaaaacacgcctgttcctgcgaatcctccggcagagttttcggctacaaagtttgcttcattcatcacccagtactccacaggacaagtgagtgtggaaattgaatgggagctgcagaaagaaaacagcaagcgctggaatcccgaagtgcagtacacatccaattatgcaaaatctgccaacgttgatttcactgtggacaacaatggactttatactgagcctcgccccattggcacccgttaccttacccgtcccttg

SEQ ID NO: 670 - DNA, 2208 bp, Artificial Sequence
  Description of Artificial Sequence: Synthetic polynucleotide
  modified_base (305)..(305): a, t, c, or g
atggctgccgatggttatcttccagattggctcgaggacaacctctctgagggcattcgcgagtggtgggacttgaaacctggagccccgaaacctaaagccaaccagcaaaagcaggacgacggccggggtctggtgcttcctggctacaagtacctcggacccttcaacggactcgacaagggggagcccgtcaacgcggcggacgcagcggccctcgagcacgacaaggcctacgaccagcagctcaaagcgggtgacaatccgtacctgcggtataaccacgccgacgccgagtttcaggngcgtctgcaagaagatacgtcttttgggggcaacctcgggcgagcagtcttccaggccaagaagcgggttctcgaaccttttggtctggttgaggaaggcgctaagacggctcctggaaagaaacgtccggtagagcagtcgccacaagagccagactcctcctcgggcatcggcaagacaggccagcagcccgctaaaaagagactcaattttggtcagactggcgactcagagtcagtccccgacccacaacctctcggagaacctccagcaacccccgctgctgtgggacctactacaatggcttcaggcggtggcgcaccaatggcagacaataacgaaggcgccgacggagtgggtaatgcctcaggaaattggcattgcgattccacatggctgggcggcagagtcatcaccaccagcacccgcacctgggccttgcccacctacaataaccacctctacaagcaaatctccagtgcttcaacgggggccagcaacgacaaccactacttcggccacagcaccccctgggggtattttgatttcaacagattccactgccacttttcaccacgtgactggcagcgactcatcaacaacaattggggattccggcccaagagactcaacttcaagctcttcaacatccaagtcaaggaggtcacgacgaacgatggcgtcacgaccatcgctaataaccttaccagcacggttcaagtcttctcggattcagagtaccaactgccgtacgtcctcggctctgcgcaccagggctgcctccctccgtccccggcggacgtgttcatgattccgcagtacggctacctaacactcaacaatggcagccaggccgtgggacgttcatccttttactgcctggaatatttcccttctcagatgctgagaacgggcaacaactttaccttcagctacacctttgaggaagtgcctttccacagcagctacgcgcacagccagagcctggaccggctgatgaatcctctcatcgaccaatacctgtattacctgaacagaactcaaaatcagtccggaagtgcccaaaacaaggacttgctgtttagccgtgggtctccagctggcatgtctgttcagcccaaaaactggctacctggaccctgttatcggcagcagcgcgtttctaaaacaaaaacagacaacaacaacagcaattttacctggactggtgcttcaaaatataacctcaatgggcgtgaatccatcatcaaccctggcactgctatggcctcacacaaagacgacaaagacaagttctttcccatgagcggtgtcatgatttttggaaaagagagcgccggagcttcaaatactgcattggacaatgtcatgatcacagatgaagaggaaattaaagccactaaccctgtggccaccgaaagatttgggaccgtggcagtcaatttccagagcagcaacacagaccccgcgaccggagatgtgcatgttatgggagccttacctggcatggtgtggcaagacagagacgtatacctgcagggtcccatttgggccaaaattcctcacacggatggacactttcacccgtctcctctcatgggcggctttggacttaagcacccgcctcctcaaatcctcatcaaaaacacgcctgttcctgcgaatcctccggcagagttttcggctacaaagtttgcttcattcatcacccagtactccacaggacaagtgagtgtggaaattgaatgggagctgcagaaagaaaacagcaagcgctggaatcccgaagtgcagtacacatccaattatgcaaaatctgccaacgttgatttcactgtggacaacaatggactttatactgagcctcgccccattggcacccgttaccttacccgtcccttg

SEQ ID NO: 671 - DNA, 2208 bp, Artificial Sequence
  Description of Artificial Sequence: Synthetic polynucleotide
atggctgccgatggttattttccagattggctcgaggacaacctttctgagggcattcgcgagtggtgggacttgaaacctggagccccgaaacctaaagccaaccagcaaaagcaggacgacggccggggtctggtgcttcctggctacaagtacctcggacccttcaacggactcgacaagggggagcccgtcaacgcggcggacgcagcggccctcgagcacgacaaggcctacgaccagcagctcaaagcgggtgacaatccgtacctgcggtataaccacgccgacgccgagtttcaggagcgtctgcaagaagatacgtcttttgggggcaacctcgggcgagcagtcttccaggccaagaagcgggttctcgaaccttttggtctggttgaggaaggcgctaagacggctcctggaaagaaacgtccggtagagcagtcgccacaagagccagactcctcctcgggcatcggcaggacaggccagcagcccgctaaaaagagactcaattttggtcagactggcgactcagagtcagtccccgacccacaacctctcggagaacctccagcgacccccgctgctgtgggacctactacaatggcttcaggcggtggcgcaccaatggcagacaataacgaaggtgccgacggagtgggtaatgcctcaggaaattggcattgcgattccacatggctgggcgacagagtcatcaccaccagcacccgcacctgggccttgcccacctacaataaccacctctacaagcaaatctccagtgcttcaacgggggccagcaacgacaaccactacttcggctacagcaccccctgggggtattttgatttcaacagattccactgccacttttcaccacgtgactggcagcgactcatcaacaacaattggggattccggcccaagagactcaacttcaagctcttcaacatccaagtcaaggaggtcacgacgaacgatggcgtcacgaccatcgctaataaccttaccagcacggttcaagtcttctcggattcagagtaccaactgccgtacgtcctcggctctgcgcaccagggctgcctccctccgttcccggcggacgtgttcatgattccgcagtacggctacctaacgctcaacaatggcagccaggccgtgggacgttcatccttttactgcctggaatatttcccttctcagatgctgagaacgggcaacaactttaccttcagctacacctttgaggaagtgcctttccacagcagctacgcgcacagccagagcctggaccggctgatgaatcctctcatcgaccaatacctgtattacctgaacagaactcaaaatcagtccggaagtgcccaaaacaaggacttgctgtttagccgtgggtctccagctggcatgtctgttcagcccaaaaactggctacctggaccctgttatcggcagcagcgcgtttctaaaacaaaaacagacaacaacaacagcaattttacctggactggtgcttcaaaatataacctcaatgggcgtgaatccatcatcaaccctggcactgctatggcctcacacaaagacgacgaagacaagttctttcccatgagcggtgtcatgatttttggaaaagagagcgccggagcttcaaatactgcattggacaatgtcatgatcacagatgaagaggaaattaaagccactaaccctgtggccaccgaaagatttgggaccgtggcagtcaatttccagagcagcagcccagaccccgcgaccggagatgtgcatgttatgggagccttacctggcatggtgtggcaagacagagacgtatacctgcagggtcccatttgggccaaaattcctcacacggatggacactttcacccgtctcctctcatgggcggctttggacttaagcacccgcctcctcaaatcctcatcaaaaacacgcctgttcctgcgaatcctccggcagagttttcggctacaaagtttgcttcattcatcacccagtactccacaggacaagtgagtgtggaaattgaatgggagctgcagaaagaaaacagcaagcgctggaatcccgaagtgcagtacacatccaattatgcaaaatctgccaacgttgatttcactgtggacaacaatggactttatagtgagcctcgccccattggcacccgttaccttacccgtcccttg

SEQ ID NO: 672 - DNA, 2208 bp, Artificial Sequence
  Description of Artificial Sequence: Synthetic polynucleotide
atggctgccgatggttatcttccagattggctcgaggacaacctctctgagggcattcgcgagtggtgggacttgaaacctggagccccgaaacctaaagccaaccagcaaaagcaggacgacggccggggtctggtgcttcctggctacaagtacctcggacccttcaacggactcgacaagggggagcccgtcaacgcggcggacgcagcggccctcgagcacgacaaggcctacgaccagcagctcaaagcgggtgacaatccgtacctgcggtataaccacgccgacgccgagtttcaggagcgtctgcaagaagatacgtcttttgggggcaacctcgggcgagcagtcttccaggccaagaagcgggttctcgaaccttttggtctggttgaggaaggcgctaagacggctcctggaaagaaacgtccggtagagcagtcgccacaagagccagactcctcctcgggcatcggcaagacaggccagcagcccgctaaaaagagactcaattttggtcagactggcgactcagagtcagtccccgacccacaacctctcggagaacctccagcaacccccgctgctgtgggacctactacaatggcttcaggcggtggcgcaccaatggcagacaataacgaaggcgccgacggagtgggtaatgcctcaggaaattggcattgcgattccacatggctgggcgacagagtcatcaccaccagcacccgcacctgggccttgcccacctacaataaccacctctacaagcaaacctccagtgcttcaacgggggccagcaacgacaaccactacttcggctacagcaccccctgggggtattttgatttcaacagattccactgccacttttcaccacgtgactggcagcgactcatcaacaacaattggggattccggcccaagagactcaacttcaagctcttcaacatccaagtcaaggaggtcacgacgaacgatggcgtcacgaccatcgctaataaccttaccagcacggttcaagtcttctcggattcagagtaccaactgccgtacgtcctcggctctgcgcaccagggctgcctccctccgttcccggcggacgtgttcatgattccgcagtacggctacctaacgctcaacaatggcagccaggccgtgggacgttcatccttttactgcctggaatatttcccttctcagatgctgagaacgggcaacaactttaccttcagctacacctttgaggaagtgcctttccacagcagctacgcgcacagccagagcctggaccggctgatgaatcctctcatcgaccaatacctgtattacctgaacagaactcaaaatcagtccggaagtgcccaaaacaaggacttgctgtttagccgtgggtctccagctggcatgtctgttcagcccaaaaactggctacctggaccctgttatcggcagcagcgcgtttctaaaacaaaaacagactacaacaacagcaattttacctggactggtgcttcaaaatataacctcaatgggcgtgaatccatcatcaaccctggcactgctatggcctcacacaaagacgacgaagacaagttctttcccatgagcggtgtcatgatttttggaaaagagagcgccggagcttcaaatactgcattggacaatgtcatgatcacagatgaagaggaaattaaagccactaaccctgtggccaccgaaagatttgggaccgtggcagtcaatttccagagcagcagcacagaccccgcgaccggagatgtgcatgttatgggagccttacctggcatggtgtggcaagacagagacgtatacctgcagggtcccatttgggccaaaattcctcacacggatggacactttcacccgtctcctctcatgggcggctttggacttaagcacccgcctcctcaaatcctcatcaaaaacacgcctgttcctgcgaatcctccggcagagttttcggctacaaagtttgcttcattcatcacccagtactccacaggacaagtgagtgtggaaattgaatgggagctgcagaaagaaaacagcaagcgctggaatcccgaagtgcagtacacatccaattatgcaaaatctgccaacgttgatttcactgtggacaacaatggactttatactgagcctcgccccattggcacccgttaccttacccgtcccttg

SEQ ID NO: 673 - DNA, 2208 bp, Artificial Sequence
  Description of Artificial Sequence: Synthetic polynucleotide
atggctgccgatggttatcctccagattggctcgaggacaacctctctgagggcattcgcgagtggtgggacttgaaacctggagtcccgaaacctaaagccaaccagcaaaagcaggacgacggccggggtctggtgcttcctggctacaagtacctcggacccttcaacggactcgacaagggggagcccgtcaacgcggcggacgcagcggccctcgagcacgacaaggcctacgaccagcagctcaaagcgggtgacaatccgtacctgcggtataaccacgccgacgccgagtttcaggagcgtctgcaagaagatacgtcttttgggggcaacctcgggcgagcagtcttccaggccaagaagcgggttctcgaaccttttggtctggttgaggaaggcgctaagacggctcctggaaagaaacgtccggtagagcagtcgccacaagagccagactcctcctcgggcatcggcaagacaggccagcagcccgctaaaaagagactcaattttggtcagactggcgactcagagtcagtccccgacccacaacctctcggagaacctccagcaacccccgctgctgtgggacctactacaatggcttcaggcggtggcgcaccaatggcagacaataacgaaggcgccgacggagtgggtaatgcctcaggaaattggcattgcgattccacatggctgggcgacagagtcatcaccaccagcacccgcacctgggccttgcccacctacaataaccacctctacaagcaaatctccagtgcttcaacgggggccagcaacgacaaccactacttcggctacagcaccccctgggggtattttgatttcaacagattccactgccacttttcaccacgtgactggcagcgactcatcaacaacaattggggattccggcccaagagactcaacttcaagctcttcaacatccaagtcaaggaggtcacgacgaacgatggcgtcacgaccatcgctaataaccttaccagcacggttcaagtcttctcggattcagagtaccaactgccgtacgtcctcggctctgcgcaccagggctgcctccctccgttcccggcggacgtgttcatgattccgcagtacggctacctaacgctcaacaatggcagccaggccgtgggacgttcatccttttactgcctggaatatttcccttctcagatgctgagaacgggcaacaactttaccttcagctacacctttgaggaagtgcctttccacagcagctacgcgcacagccagagcctggaccggctgatgaatcctctcatcgaccaatacctgtattacctgaacagaactcaaaatcagtccggaagtgcccaaaacaaggacttgctgtttagccgtgggtctccagctggcatgtctgttcagcccaaaaactggctacctggaccctgttatcggcagcagcgcgtttctaaaacaaaaacagacaacaacaacagcaattttacctggactggtgcttcaaaatataacctcaatgggcgtgaatccatcatcaaccctggcactgctatggcctcacacaaagacgacgaagacaagttctttcccatgagcggtgtcatgatttttggaaaagagagcgccggagcttcaaatactgcattggacaatgtcatgatcacagatgaagaggaaattaaagccactaaccctgtggccaccgaaagatttgggaccgtggcagtcaatttccagagcagcagcacagaccccgcgaccggagatgtgcatgttatgggagccttacctggcatggtgtggcaagacagagacgtatacctgcagggtcccatttgggccaaaattcctcacacggatggacactttcacccgtctcctctcatgggcggctttggacttaagcacccgcctcctcaaatcctcatcaaaaacacgcctgttcctgcgaatcctccggcagagttttcggctacaaagtttgcttcattcatcacccagtactccacaggacaagtgagtgtggaaattgaatgggagctgcagaaagaaaacagcaagcgctggaatcccgaagtgcagtacacatccaattatgcaaaatctgccaacgttgatttcactgtggacaacaatggactttatactgagcctcgccccattggcacccgttaccttacccgtcccttg

SEQ ID NO: 674 - DNA, 2196 bp, Artificial Sequence
  Description of Artificial Sequence: Synthetic polynucleotide
atggctgccgatggttatcttccagattggctcgaggacaacctctctgagggcattcgcgagtggtgggacttgaaacctggagccccgaaacctaaagccaaccagcaaaagcaggacgacggccggggtctggtgcttcctggctacaagtacctcggacccttcaacggactcgacaagggggagcccgtcaacgcggcggacgcagcggccctcgagcacgacaaggcctacgaccagcagctcaaagcgggtgacaatccgtacctgcggtataaccacgccgacgccgagtttcaggagcgtctgcaagaagatacgtcttttgggggcaacctcgggcgagcagtcttccaggccaagaagcgggttctcgaaccttttggtctggttgaggaaggcgctaagacggctcctggaaagaaacgtccggtagagcagtcgccacaagagccagactcctcctcgggcatcggcaagacaggccagcagcccgctaaaaagagactcaattttggtcagactggcgactcagagtcagtccccgacccacaacctctcggagaacctccagcaacccccgctgctgtgggacctactacaatggcttcaggcggtggcgcaccaatggcagacaataacgaaggcgccgacggagtgggtaatgcctcaggaaattggcattgcgattccacatggctgggcgacagagtcatcaccaccagcacccgcacctgggccttgcccacctacaataaccacctctacaagcaaatctccagtgcttcaacgggggccagcaacgacaaccactacttcggctacagcaccccctgggggtattttgatttcaacagattccactgccacttttcaccacgtgactggcagcgactcatcaacaacaattggggattccggcccaagagactcaacttcaagctcttcaacatccaagtcaaggaggtcacgacgaacgatggcgtcacgaccatcgctaataaccttaccagcacggttcaagccttctcggattcagagtaccaactgccgtacgtcctcggctctgcgcaccagggctgcctccctccgttcccggcggacgtgttcatgattccgcagtacggctacctaacgctcaacaatggcagccaggccgtgggacgttcatccttttactgcctggaatatttcccttctcagatgctgagaacgggcaacaactttaccttcagctacacctttgaggaagtgcctttccacagcagctacgcgcacagccagagcctggaccggctgatgaatcctctcatcgacccatacctgtattacctgaacagaactcaaaatcagtccggaagtgcccaaaacaaggacttgctgtttagccgtgggtctccagctggcatgtctgttcagcccaaaaactggctacctggaccctgttatcggcagcagcgcgtttctaaaacaaaaacagacaacaacaacagcaattttacctggactggtgcttcaaaatataacctcaatgggcgtgaatccatcatcaaccctggcactgctatggcctcacacaaagacgacgaagacaagttctttcccatgagcggtgtcatgatttttggaaaagagagcgccggagcttcaaatactgcattggacaatgtcatgatcacagatgaagaggaaattaaagccactaaccctgtggccaccgaaagatttgggaccgtggcagtcaatttccagagcagcagcacagaccccgcgaccggagatgtgcatgttatgggagccttacctggcatggtgtggcaagacagagacgtatacctgcagggtcccatttgggccaaaattcctcacacggatggacactttcacccgtctcctctcatgggcggctttggacttaagcacccgcctcctcaaatcctcatcaaaaacacgcctgttcctgcgaatcctccggcagagttttcggctacaaagtttgcttcattcatcacccagtactccacaggacaagtgagtgtggaaattgaatgggagctgcagaaagaaaacagcaagcgctggaatcccgaagtgcagtacacatccaattatgcaaaatctgccaacgttgatttcactgtggacaacaatggactttatactgagcctcgccccattggcacccgttacctt

SEQ ID NO: 675 - DNA, 2208 bp, Artificial Sequence
  Description of Artificial Sequence: Synthetic polynucleotide
atggctgccgatggttatcttccagattggctcgaggacaacctctctgagggcattcgcgagtggtgggacttgaaacctggagccccgaaacctaaagccaaccagcaaaagcaggacgacggccggggtctggtgcttcctggctacaagtacctcggacccttcaacggactcgacaagggggagcccgtcaacgcggcggacgcagcggccctcgagcacgacaaggcctacgaccagcagctcaaagcgggtgacaatccgtacctgcggtataaccacgccgacgccgagtttcaggagcgtctgcaagaagatacgtcttttgggggcaacctcgggcgagcagtcttccaggccaagaagcgggttctcgaaccttttggtctggttgaggaaggcgctaagacggctcctggaaagaaacgtccggtagagcagtcgccacaagagccagactcctcctcgggcatcggcaagacaggccagcagcccgctaaaaagagactcaattttggtcagactggcgactcagagtcagtccccgacccacaacctctcggagaacctccagcaacccccgctgctgtgggacctactacaatggcttcaggcggtggcgcaccaatggcagacaataacgaaggcgccgacggagtgggtaatgcctcaggaaattggcattgcgattccacatggctgggcgacagagtcatcaccaccagcacccgcacctgggccttgcccacctacaataaccacctctacaagcaaatctccagtgcttcaacgggggccagcaacgacaaccactacttcggctacagcaccccctgggggtattttgatttcaacagattccactgccacttttcaccacgtgactggcagcgactcatcaacaacaattggggattccggcccaagagactcaacttcaagctcttcaacatccaagtcaaggaggtcacgacgaacgatggcgtcacgaccatcgctaataaccttaccagcacggttcaagtcttctcggattcagagtaccaactgccgtacgtcctcggctctgcgcaccagggctgcctccctccgttcccggcggacgtgttcatgattccgcagtacggctacctaacgctcaacaatggcagccaggccgtgggacgttcatccttttactgcctggaatatttcccttctcagatgctgagaacgggcaacaactttaccttcagctacacctttgaggaagtgcctttccacagcagctacgcgcacagccagagcctggaccggctgatgaatcctctcatcgaccaatacctgtattacctgaacagaactcaaaatcagtccggaagtgcccaaaacaaggacttgctgtttagccgtgggtctccagctggcatgtctgttcagcccaaaaactggctacctggaccctgttatcggcagcagcgcgtttctaaaacaaaaacagacaacaacaacagcaattttacctggactggtgcttcaaaatataacctcaatgggcgtgaatccatcatcaaccctggcactgctatggcctcacacaaagacgacgaagacaagttctttcccatgagcggtgtcatgatttttggaaaagagagcgccggagcttcaaatactgcattggacaatgtcatgatcacagatgaagaggaaattaaagccactaaccctgtggccaccgaaagatttgggaccgtggcagtcaatttccagagcagcagcacagaccccgcgaccggagatgtgcatgttatgggagccttacctggcatggtgtggcaagacagagacgtatacctgcagggtcccatttgggccaaaattcctcacacggatggacactctcacccgtctcctctcatgggcggctttggacttaagcacccgcctcctcaaatcctcatcaaaaacacgcctgttcctgcgaatcctccggcagagttttcggctacaaagtttgcttcattcatcacccagtactccacaggacaagtgagtgtggaaattgaatgggagctgcagaaagaaaacagcaagcgctggaatcccgaagtgcagtacacatccaattatgcaaaatctgccaacgttgatttcactgtggacaacaatggactttatactgagcctcgccccattggcacccgttaccttacccgtcccttg

SEQ ID NO: 676 - DNA, 2208 bp, Artificial Sequence
  Description of Artificial Sequence: Synthetic polynucleotide
atggctgccgatggttatcttccagattggctcgaggacaacctctctgagggcattcgcgagtggtgggacttgaaacctggagccccgaaacctaaagccaaccagcaaaagcaggacgacggccggggtctggtgcttcctggctacaagtacctcggacccttcaacggactcgacaagggggagcccgtcaacgcggcggacgcagcggccctcgagcacgacaaggcctacgaccagcagctcaaagcgggtgacaatccgtacctgcggtataaccacgccgacgccgagtttcaggagcgtctgcaagaagatacgtcttttgggggcaacctcgggcgagcagtcttccaggccaagaagcgggttctcgaaccttttggtctggttgaggaaggcgctaagacggctcctggaaagaaacgtccggtagagcagtcgccacaagagccagactcctcctcgggcatcggcaagacaggccagcagcccgctaaaaagagactcaattttggtcagactggcgactcagagtcagtccccgacccacaacctctcggagaacctccagcaacccccgctgctgtgggacctactacaatggcttcaggcggtggcgcaccaatggcagacaataacgaaggcgccgacggagtgggtaatgcctcaggaaattggcattgcgattccacatggctgggcgacagagtcatcaccaccagcacccgcacctgggccttgcccacctacaataaccacctctacaagcaaatctccagtgcttcaacgggggccagcaacgacaaccactacttcggctacagcaccccctgggggtattttgatttcaacagattccactgccacttttcaccacgtgactggcagcgactcatcaacaacaattggggattccggcccaagagactcaacttcaagctcttcaacatccaagtcaaggaggtcacgacgaacgatggcgtcacgaccatcgctaataaccttaccagcacggttcaagtcttctcggattcagagtaccaactgccgtacgtcctcggctctgcgcaccagggctgcctccctccgttcccggcggacgtgttcatgattccgcagtacggctacctaacgctcaacaatggcagccaggccgtgggacgttcatccttttactgcctggaatatttcccttctcagatgctgagaacgggcaacaactttaccttcagctacacctttgaggaagtgcctttccacagcagctacgcgcacagccagagcctggaccggctgatgaatcctctcatcgacctatacctgtattacctgaacagaactcaaaatcagtccggaagtgcccaaaacaaggacttgctgtttagccgtgggtctccagctggcatgtctgttcagcccaaaaactggctacctggaccctgttatcggcagcagcgcgtttctaaaacaaaaacagacaacaacaacagcaattttacctggactggtgcttcaaaatataacctcaatgggcgtgaatccatcatcaaccctggcactgctatggcctcacacaaagacgacgaagacaagttctttcccatgagcggtgtcatgatttttggaaaagagagcgccggaacttcaaatactgcattggacaatgtcatgatcacagatgaagaggaaattaaagccactaaccctgtggccaccgaaagatttgggaccgtggcagtcaatttccagagcagcagcacagaccccgcgaccggagatgtgcatgttatgggagccttacctggcatggtgtggcaagacagagacgtatacctgcagggtcccatttgggccaaaattcctcacacggatggacactttcacccgtctcctctcatgggcggctttggacttaagcacccgcctcctcaaatcctcatcaaaaacacgcctgttcctgcgaatcctccggcagagttttcggctacaaagtttgcttcattcatcacccagtactccacaggacaagtgagtgtggaaattgaatgggagctgcagaaagaaaacagcaagcgctggaatcccgaagtgcagtacacatccaattatgcaaaatctgccaacgttgatttcactgtggacaacaatggactttatactgagcctcgccccattggcacccgttaccttacccgtcccttg

SEQ ID NO: 677 - DNA, 2208 bp, Artificial Sequence
  Description of Artificial Sequence: Synthetic polynucleotide
atggctgccgatggttatcttccagattggctcgaggacagcctctctgagggcattcgcgagtggtgggacttgaaacctggagccccgaaacctaaagccaaccagcaaaagcaggacgacggccggggtctggtgcttcctggctacaagtacctcggacccttcaacggactcgacaagggggagcccgtcaacgcggcggacgcagcggccctcgagcacgacaaggcctacgaccagcagctcaaagcgggtgacaatccgtacctgcggtataaccacgccgacgccgagtttcaggagcgtctgcaagaagatacgtcttttgggggcaacctcgggcgagcagtcttccaggccaagaagcgggttctcgaaccttttggtctggttgaggaaggcgctaagacggctcctggaaagaaacgtccggtagagcagtcgccacaagagccagactcctcctcgggcatcggcaagacaggccagcagcccgctaaaaagagactcaattttggtcagactggcgactcagagtcagtccccgacccacaacctctcggagaacctccagcaacccccgctgctgtgggacctactacgatggcttcaggcggtggcgcaccaatggcagacaataacgaaggcgccgacggagtgggtaatgcctcaggaaattggcattgcgattccacatggctgggcgacagagtcatcaccaccagcacccgcacctgggccttgcccacctacaataaccacctctacaagcaaatctccagtgcttcaacgggggccagcaacgacaaccactacttcggctacagcaccccctgggggtattttgatttcaacagattccactgccacttttcaccacgtgactggcagcgactcatcaacaacaattggggattccggcccaagagactcaacttcaagctcttcaacatccaagtcaaggaggtcacgacgaacgatggcgtcacgaccatcgctaataaccttaccagcacggttcaagtcttctcggattcagagtaccaactgccgtacgtcctcggctctgcgcaccagggctgcctccctccgttcccggcggacgtgttcatgattccgcagtacggctacctaacgcccaacaatggcagccaggccgtgggacgttcatccttttactgcctggaatatttcccttctcagatgctgagaacgggcaacaactttaccttcagctacacctttgaggaagtgcctttccacagcagctacgcgcacagccagagcctggaccggctgatgaatcctctcatcgaccaataccagtattacctgaacagaactcaaaatcagtccggaagtgcccaaaacaaggacttgctgtttagccgtgggtctccagctggcatgtctgttcagcccaaaaactggctacctggaccctgttatcggcagcagcgcgtttctaaaacaaaaacagacaacaacaacagcaattttacctggactggtgcttcaaaatataacctcaatgggcgtgaatccatcatcaaccctggcactgctatggcctcacacaaagacgacgaagacaagttctttcccatgagcggtgtcatgatttttggaaaagagagcgccggagcttcaaatactgcattggacaatgtcatgatcacagatgaagaggaaattaaagccactaaccctgtggccaccgaaagatttgggaccgtggcagtcaatttccagagcagcagcacagaccccgcgaccggagatgtgcatgttatgggagccttacctggcatggtgtggcaagacagagacgtatacctgcagggtcccatttgggccaaaattcctcacacggatggacactttcacccgtctcctctcatgggcggctttggacttaagcacccgcctcctcaaatcctcatcaaaaacacgcctgttcctgcgaatcctccggcagagttttcggctacaaagtttgcttcattcatcacccagtactccacaggacaagtgagtgtggaaattgaatgggagctgcagaaagaaaacagcaagcgctggaatcccgaagtgcagtacacatccaattatgcaaaatctgccaacgttgatttcactgtggacaacaatggactttatactgagcctcgccccattggcacccgttaccttacccgtcccttg

SEQ ID NO: 678 - DNA, 2208 bp, Artificial Sequence; identical to SEQ ID NO: 669
  Description of Artificial Sequence: Synthetic polynucleotide

SEQ ID NO: 679 - DNA, 2205 bp, Artificial Sequence
  Description of Artificial Sequence: Synthetic polynucleotide
atggctgccgatggttatcttccagattggctcgaggacactctctctgaaggaataagacagtggtggaagctcaaacctggcccaccaccaccaaagcccgcagagcggcataaggacgacagcaggggtcttgtgcttcctgggtacaagtacctcggacccttcaacggactcgacaagggagagccggtcaacgaggcagacgccgcggccctcgagcacgacaaagcctacgaccggcagctcgacagcggagacaacccgtacctcaagtacaaccacgccgacgcggagtttcaggagcgccttaaagaagatacgtcttttgggggcaacctcggacgagcagtcttccaggcgaaaaagagggttcttgaacctctgggcctggttgaggaacctgttaagacggctccgggaaaaaagaggccggtagagcactctcctgtggagccagactcctcctcgggaaccggaaaggcgggccagcagcctgcaagaaaaagattgaattttggtcagactggagacgcagactcagtacctgacccccagcctctcggacagccaccagcagccccctctggtctgggaactaatacgatggctacaggcagtggcgcaccaatggcagacaataacgagggcgccgacggagtgggtaattcctcgggaaattggcattgcgattccacatggatgggcgacagagtcatcaccaccagcacccgaacctgggccctgcccacctacaacaaccacctctacaaacaaatttccagccaatcaggagcctcgaacgacaatcactactttggctacagcaccccttgggggtattttgacttcaacagattccactgccacttttcaccacgtgactggcaaagactcatcaacaacaactggggattccgacccaagagactcaacttcaagctctttaacattcaagtcaaagaggtcacgcagaatgacggtacgacgacgattgccaataaccttaccagcacggttcaggtgtttactgactcggagtaccagctcccgtacgtcctcggctcggcgcatcaaggatgcctcccgccgttcccagcagacgtcttcatggtgccacagtatggatacctcaccctgaacaacgggagtcaggcagtaggacgctcttcattttactgcctggagtactttccttctcagatgctgcgtaccggaaacaactttaccttcagctacacttttgaggacgttcctttccacagcagctacgctcacagccagagtctggaccgtctcatgaatcctctcatcgaccagtacctgtattacttgagcagaacaaacactccaagtggaaccaccacgcagtcaaggcttcagttttctcgggccggagcgagtgacattcgggaccagtctaggaactggcttcctggaccctgttaccgccagcagcgagtatcaaagacatctgcggataacaacaacagtgaatactcgtggactggagctaccaagtaccacctcaatggcagagactctctggtgaatccgggcccggccatggcaagccacaaggacgatgaagaaaagttttttcctcagagcggggttctcatctttgggaagcaaggctcagagaaaacaaatgtggacattgaaaaggtcatgattacagacgaagaggaaatcaggacaaccaatcccgtggctacggagcagtatggttctgtatctaccaacctccagagaggcaacagacaagcagctaccgcagatgtcaacacacaaggcgttcttccaggcatggtctggcaggacagagatgtgtaccttcaggggcccatctgggcaaagattccacacacggacggacattttcacccctctcccctcatgggtggattcggacttaaacaccctcctccacagattctcatcaagaacaccccggtacctgcgaatccttcgaccaccttcagtgcggcaaagtttgcttccttcatcacacagtactccacgggacaggtcagcgtggagatcgagtgggagctgcagaaggaaaacagcaaacgctggaatcccgaaattcagtacacttccaactacaacaagtctgttaatgtggactttactgtggacactaatggcgtgtattcagagcctcgccccattggcaccagatacctgactcgtaatctg

SEQ ID NO: 680 - protein, 736 aa, Artificial Sequence
  Description of Artificial Sequence: Synthetic polypeptide
MAADGYLPDWLEDNLSEGIREWWALKPGAPQPKANQQHQDNARGLVLPDYKYLGPGNGLDKGEPVNAADVAALEHDKAYDQQLKAGDNPYLKYNHADAEFQERLKEDTSFGGNLGRAVFQAKKRLLEPLGLVEEAAKTAPGKKRPVEQSPQEPDSSAGIGKSGAQPAKKRLNFGQTGDTESVPDPQPIGEPPAAPSGVGSLTMASGGGAPVADNNEGADGVGSSSGNWHCDSQWLGDGVITTSTRTWALPTYNNHLYKQISNSTSGGSSNDNAYFGYSTPWGYFDFNRFHCHFSPRDWQRLINNNWGFRPKRLNFKLFNIQVKEVTDNNGVKTIANNLTSTVQVFTDSDYQLPYVLGSAHEGCLPPFPADVFMIPQYGYLTLNDGSQAVGRSSFYCLEYFPSQMLRTGNNFQFSYEFENVPFHSSYAHSQSLDRLMNPLIDQYLHYLPKTINGSGQNQQTLKFSVAGPSNMAVQGRNYIPGPSYRQQRVSTTVTQNNNSEFAWPGASSWALNGRNSLMNPGPAMASYKEGEDSFFPLSGSLIFGKQGTGRDNVDADKVMITNEEEIKTTNPVATESYGQVATNHQSAQAQAQTGWVQNQGILPGMVWQDRDVYLQGPIWAKIPHTDGNFHPSPLMGGFGMKHPPPQTLIKNTPVPADPPTAFNKDKLNSFITQYSTGQVSVEIEWELQKENSKRWNPEIQYTSNYYKSNNVEFAVNTEGVYSEPRPIGTRYLTRNL

SEQ ID NO: 681 - protein, 736 aa, Artificial Sequence
  Description of Artificial Sequence: Synthetic polypeptide
MAADGYLPDWLEDNLSEGIREWWALKPGAPQPKANQQHQDNARGLVLPGYKYLGPGNGLDKGEPVNAADAAALEHDKAYDQQLKAGDNPYLKYNHADAEFQERLKEDTSFGGNLGRAVFQAKRRLLEPLGLVEEAAKTAPGKKRPVEQSPQEPDSSAGIGKSGAQPAKKRLNFGQTGDTESVPDPQPIGEPPAAPSGVGSLTMASGGGAPVADNNEGADGVGSSSGNWHCDSQWLGDRVITTSTRTWALPTYNNHLYKQISNSTSGGSSNDNAYFGYSTPWGYFDFNRFHCHFSPRDWQRLINNNWGFRPKRLNFKLFNIQIKEVTDNNGVKTIANNLTSTVQVFTDLDYQLPYVLGSAHEGCLPPFPADVFMIPQYGYLTLNDGSQAVGRSSFYCLEYFPSQMLRTGNNFQFSYEFENVPFHSSYAHSQSLDRLMNPLIDQYLHYLSKTINGSGQNQQTLKFSVAGPSNMAVQGRNYIPGPSYRQQRVSTTVTQNNNSEFAWPGASSWALNGRNSLMNPGPAMASYKEGEDSFFPLSGSLIFGKQGTGRDNVDADKVMITNEEEIKTTNPVATESYGQVATNHQSAQAQAQTGWVQNQGILPGMVWQDRDVYLQGPIWAKIPHTDGNFHPSPLMGGFGMKHPPPQTLIKNTPVPADPPTAFNKDKLNSFITQYSTGQVSVEIEWELQKENSKRWNPEIQYTSNYYKSNNVEFAVNTEGVYSEPRPIGTRYLTRNL

SEQ ID NO: 682 - protein, 736 aa, Artificial Sequence
  Description of Artificial Sequence: Synthetic polypeptide
MAADGYLPDWLEDNLSEGIREWWALKPGAPQPKANQQHQDNARGLVLPGYKYLGPGNGLDKGEPVSAADAAALEHDKAYDQQLKAGDNPYLKYNHADAEFQERLKEDTSFGGNLGRAVFQAKKRLLEPLGLVEEAAKTAPGKKRPVEQSPQEPDSSAGIGKSGAQPAKKRLNFGQTGDTESVSDPQPIGEPPAAPSGVGSLTMASGGGAPVADNNEGADGVGSSSGNWHCDSQWLGDRVITTSTRTWALPTYNNHLYKQISNSTSGGSSNDNAYFGYSTPWGYFDFNRFHCHFSPRDWQRLINNNWGFRPKRLNFKLFNIQVKEVTDNNGVKTIANNLTSTVQVFTDSDYQLPYVLGSAHEGCLPPSPADVFMIPQYGYLTLNDGSQAVGRSSFYCLEYFPSQMLRTGNNFQFSYEFENVPFHSSYAHSQSLDRLMNPLIDQYLHYLSKTINGSGQNQQTLKFSVAGPSNMAVQGRNYIPGPSYRQQRVSTTVTQNNNSEFAWPGASSWALNGRNSLMNPGPAMASYKEGEDSFFPLSGSLIFGKQGTGRDDVDADKVIITNEEEIKTTNPVATESYGQVATNHQSAQAQAQTGWVQNQGILPGMVWQDRDVYLQGPIWAKIPHTDGNFHPSPLMGGFGMKHPPPQTLIKNTPVPADPPTAFNKDKLNSFITQYSTGQVSVEIEWELQKENSKRWNPEIQYTSNYYKSNNVEFAVNTEGVYSEPRPIGTRYLTRNL

SEQ ID NO: 683 - protein, 736 aa, Artificial Sequence
  Description of Artificial Sequence: Synthetic polypeptide
MAADGYLPDWLEDNLSEGIREWWALKPGAPQPKANQQHQDNARGLVLPGYKYLGPGNGLDKGEPVNAADAAALEHDKAYDQQLKAGDNPYLKYNHAGAEFQERLKEDTSFGGNLGRAVFQAKKRLLEPLGLVEEAAKTAPGKKRPVEQSPQEPDSSAGIGKSGAQPAKKRLNFGQTGDTESVPDPQPIGEPPAAPSGVGSLTMASGGGAPVADNNEGAGGVGSSSGNWHCDSQWLGDRVVTTSTRTWALPTYNNHLYKQISNSTSGGSSNDNAYFGYSTPWGYFDFNRFHCHFSPRDWQRLINNNWGFRPKRLNFKLFNIQVKEVTDNNGVKTIANNLTSTVQVFTDSDYQLPYVLGSAHGGCLPPFPADVFMIPQYGYLTLNDGSQAVGRSSFYCLEYFPSQMLRTGNNFQFSYEFENVPFHSSYAHSQSLDRLMNPLIDQYLHYLSKTINGSGQNQQTLKFSVAGPSNMAVQGRSYIPGPSYRQQRVSTTVTQNNNSEFAWPGASSWALNGRNSLMNPGPAMASYKEGEDSFFPLSGSLIFGKQGTGRDNVDADKVMITNEEEIKTTNPVATESYGQVATNHQSAQAQAQTGWVQNQGILPGMVWQDRDVYLQGPIWAKIPHTDGNFHPSPLMGGFGMKHPPPQTLIKNTPVPADPPTAFNKDKLNSFITQYSTGQVSVEIEWELQKENSKRWNPEIQYTSNYYKSNNVEFAVNTEGVYSEPRPIGTRYLTRNL

SEQ ID NO: 684 - protein, 736 aa, Artificial Sequence
  Description of Artificial Sequence: Synthetic polypeptide
MAADGYLPDWLEDNLSEGIREWWALKPGAPQPKANQQHQDNARGLVLPGYKYLGPGNGLDKGEPVNAADAAALEHDKAYDQQLKAGDNPYLKYNHADAEFQERLKEDTSFGGNLGRAVFQAKKRLLEPLGLVEEAAKTAPGKKRPVEQSPQEPDSSAGIGKSGAQPAKKRLNFGQTGDTESVPDPQPIGEPPAAPSGVGSLTMASGGGAPVADNNEGADGVGSSSGNWHCDSQWLGDRVVTTSTRTWALPTYNNHLYKQISNSTSGGSSNDNAYFGYSTPWGYFDFNRFHCHFSPRDWQRLINNNWGFRPKRLNFKLFNIQVKEVTDNNGVKTIANNLTSTVQVFTDSDYQLPYVLGSAHEGCLPPFPADVFMIPQYGYLTLNDGSQAVGRSSFYCLEYFPSQMLRTGNNFQFSYEFENVPFHSSHAHSQSLDRLMNPLIDQYLHYLSKTINGSGQNQQTLKFSVAGHSNMAVQGRNYIPGPSYRQQRVSTTVTQNNNSEFAWPGASSWALNGRNSLMNPGPAMASYKEGEDSFFPLSGSLIFGKQGTGRDNVDADKVMITNEEEIKTTNPVATESYGQVATNHQSAQAQAQTGWVQNQGILPGMVWQDRDVYLQGPIWAKIPHTDGNFHPSPLMGGFGMKHPPPQTLIKNTPVPADPPTAFNKDKLNSFITQYSTGQVSVEIGWELQKENSKRWNPEIQYTSNYYKSNNVEFAVNTEGVYSEPRPIGTRYLTRNL

SEQ ID NO: 685 - protein, 736 aa, Artificial Sequence
  Description of Artificial Sequence: Synthetic polypeptide
MAADGYLPDWLEDNLSEGIREWWALKPGAPQPKANQQHQDNARGLVLPGYKYLGPGNGLDKGEPVNAADAAALEHDKAYDQQLKAGDNPYLKYNHADAEFQERLKEDTSFGGNLGRAVFQAKKRLLEPLGLVEEAAKTAPGKKRPVEQSPQEPDSSAGIGKSGAQPAKKRLNFGQTGDTESVPDPQPIGEPPAAPSGVGSLTMASGGGAPVADNNEGADGVGSSSGNWHCDSQWLGDRVITTSTRTWALPTYNNRLYKQISNSTSGGSSNDNAYFGYSTPWGYFDFNRFHCHFSPRDWQRLINNNWGFRPKRLNFKPFNIQVKEVTDNNGVKTIANNLTSTVQVFTDSDYQLPYVLGSAHEGCLPPFPADVFMIPQYGYLTLNDGSQAVGRSSFYCLEYFPSQMLRTGNNFQFSYEFENVPFHSSYAHSQSLDRLMNPLIDQYLHYLSKTINGSGQNQQTLKFSVAGPSNMAVQGRNYIPGPSYRQQRVSTTVTQNNNSEFAWPGASSWALNGRNSLMNPGPAMASYKEGEDSFFPLSGSLIFGKQGTGRDNVDADKVMITNEEEIKTTNPVATESYGQVATNHQSAQAQAQTGWVQNQGILPGMVWQDRDVYLQGPIWAKIPHTDGNFHPSPLMGGFGMKHPPPQTLIKNTPVPADPPTAFNKDKLNSFITQYSTGQVSVEIEWELQKENSKRWNPEIQYTSNYYKSNNVEFAVNTEGVYSEPRPIGTRYLTRNL

SEQ ID NO: 686 - protein, 736 aa, Artificial Sequence
  Description of Artificial Sequence: Synthetic polypeptide
MAADGYLPDWLEDNLSEGIREWWALKPGAPQPKANQQHQDNARGLVLPGYKYLGPGNGLDKGEPVNAADAAALEHDKAYDQQLKAGDNPYLKYNHADAEFQERLKEDTSFGGNLGRAVFQAKKRLLEPLGLVEEAAKTAPGKKRPVEQSPQEPDSSAGIGKSGAQPAKKRLNFGQTGDTESVPDPQPIGEPPAAPSGVGSLTMASGGGAPVADNNEGADGVGSSSGNWHCDSQWLGDRVITTSTRTWALPTYNNHLYKQISNSTSGGSSNDNAYFGYSTPWGYFDFNRFHCHFSPRDWQRLINNNWGFRPKRLNFKLFNIQVKEVTDNNGVKTIANNLTSTVQVFTDSDYQLPYVLGSAHEGCLPPFPADVFMIPQYGYLTLNDGSQAVGRSSFYCLEYFPSQMLRTGNNFQFSYEFENVPFHSSYAHSQSLDRLMNPLIDQYLHYLSKTINGSGQNQQTLKFSVAGPSNMAVQGRNYIPGPSYRQQRVSTTVTQNNNSEFAWPGASSWALNGRNSLMNPGPAMASYKEGEDSFFPLSGSLIFGKQGTGRDNVDADKVMITNEEEIKTTNPVATESYGQVATNHQSAQAQAQTGWVQNQGILPGMVWQDRDVYLQGPIWAKIPHTDGNFHPSPLMGGFGMKHPPPQTLIKNTPVPADPPTAFNKDKLNSFITQYSTGQVSVEIEWELQKENSKRWNPEIQYTSNYYKSNNVEFAVNTEGVYSEPRPIGTRYLTRNL

SEQ ID NO: 687 - protein, 736 aa, Artificial Sequence; identical to SEQ ID NO: 686
  Description of Artificial Sequence: Synthetic polypeptide

SEQ ID NO: 688 - protein, 736 aa, Artificial Sequence
  Description of Artificial Sequence: Synthetic polypeptide
MAADGYLPDWLEDNLSEGIREWWDLKPGAPKPKANQQKQDDGRGLVLPGYKYLGPFNGLDKGEPVNAADAAALEHDKAYDQQLKAGDNPYLRYNHADAEFQERLQEDTSFGGNLGRAVFQAKKRVLEPFGLVEEGAKTAPGKKRPVEQSPQEPDSSSGIGKSGQQPAKKRLNFGQTGDSESVPDPQPLGEPPATPAALGPTTMASGGGAPMADNNEGADGVGNASGNWHCDSTWLGDRVITTSTRTWALPTYNNHLYKQISSASTGASNDNHYFGYSTPWGYFDFNRFHCHFSPRDWQRLINNNWGFRPKRLNFKLFNIQVKEVTTNDGVTTIANNLTSTVQVFSDSEYQLPYVLGSAHQGCLPPFPADVFMIPQYGYLTLNNGSKAVGRSSFYCLEYFPSQMLRTGNNFTFSYTFEEVPFHSSYAHSQSLDRLMNPLIDQYLYYLNRTQNQSGSAQNKDLLFSRGSPAGMSVQPKNWLPGPCYRQQRVSKTKTDNNNSNFTWTGASKYNLNGRESIINPGTAMASHKDDEDKFFPMSGVMIFGKESAGASNTALDNVMITDEEEIKATNPVATERFGTVAVNFQSSSTDPATGDVHVMGALPGMVWQDRDVYLQGPIWAKIPHTDGHFHPSPLMGGFGLKHPPPQILIKNTPVPANPPAEFSATKFASFITQYSTGQVSVEIEWELQKENSKRWNPEVQYTSNYAKSANVDFTVDNNGLYTEPRPIGTRYLTRPL

SEQ ID NO: 689 - protein, 736 aa, Artificial Sequence
  Description of Artificial Sequence: Synthetic polypeptide
MAADGYLPDWLEDNLSEGIREWWDLKPGAPKPKANQQKQDDGRGLVLPGYKYLGPFNGLDKGEPVNAADAAALEHDKAYDQQLKAGDNPYLRYNHADAEFQERLQEDTSFGGNLGRAVFQAKKRVLEPLGLVEEGAKTAPGKKRPVEQSPQEPDSSSGIGKTGQQPAKKRLNFGQTGDSESVPDPQPLGEPPATPAAVGPTTMASGGGAPMADNNEGADGVGNASGNWHCDSTWLGDRVITTSTRTWALPTYNNHLYKQISSTSTGASNDNHYFGYSTPWGYFDFNRFHCHFSPRDWQRLINNNWGFRPKRLNFKLFNIQVKEVTTNDGVTTIANNLTSTVQVFSDSEYQLPYVLGSAHQGCLPPFPADVFMIPQYGYLTLNNGSQAVGRSSFYCLEYFPSQMLRTGNNFTFSYTFEEVPFHSSYAHSQSLDRLMNPLIDQYLYYLNRTQNQSGSAQNKDLLFSRGSPAGMSVQPKNWLPGPCYRQQRVSKTKTDNNNSNFTWTGASKYNLNGRESIINPGTAVASHKDDEDKFFPMSGVMIFGKESAGASNTALDNVMITDEEEIKATNPVATERFGTVAVNFQSSSTDPATGDVHAMGALPGMVWQDRDVYLQGPIWAKIPHTDGHFHPSPLMGGFGLKNPPPQILIKNTPVPANPPAEFSATKFASFITQYSTGQVSVEIEWELQKENSKRWNPEVQYTSNYAKSANVDFTVDNNGLYTEPRPIGTRYLTRPL

SEQ ID NO: 690 - protein, 736 aa, Artificial Sequence
  Description of Artificial Sequence: Synthetic polypeptide
MAADGYLPDWLEDNLSEGIREWWALKPGAPQPKANQQHQDNARGLVLPGYKYLGPGNGLDKGEPVNAADAAALEHDKAYDQQLKAGDNPYLKYNHADAEFQERLKEDTSFGGNLGRAVFQAKKRLLEPLGLVEEAAKTAPGKKRPVEQSPQEPDSSAGIGKSGAQPAKKRLNFGQTGDTESVPDPQPIGEPPAAPSGVGSLTMASGGGAPVADNNEGADGVGSSSGNWHCDSQWLGDRVITTSTRTWALPTYNNHLYKQISNSTSGGSSNDNAYFGYSTPWGYFDFNRFHCHFSPRDWQRLINNNWGFRPKRLNFKLFNIQVKEVTDNNGVKTIANNLTSTVQVFTDSDYQLPYVLGSAHEGCLPPFPADVFMIPQYGYLTLNDGSQAVGRSSFYCLEYFPSQMLRTGNNFQFGYEFENVPFHSSYAHSQSLDRLMNPLIDQYLYYLSKTINGSGQNQQTLKFSVAGPSNMAVQGRNYIPGPSYRQQRVSTTVTQNNNSEFAWPGASSWALNGRNSLMNPGPAMASHKEGEDRFFPLSGSLIFGKQGTGRDNVDADKVMITNEEEIKTTNPVATESYGQVATNHQSAQAQAQTGWVQNQGILPGMVWQDRDVYLQGPIWAKIPHTDGNFHPSPLMGGFGMKHPPPQILIKNTPVPADPPTAFNKDKLNSFITQYSTGQVSVEIEWELQKENSKRWDPEIQYTSNYYKSNNVEFAVNTEGVYSEPRPIGTRYLTRNL

SEQ ID NO: 691 - protein, 736 aa, Artificial Sequence
  Description of Artificial Sequence: Synthetic polypeptide
MAADGYLPDWLEDNLSEGIREWWALKPGAPQPKANQQHQDNARGLVLPGYKYLGPGNGLDKGEPVNAADAAALEHDKAYDQQLKAGDNPYLKYNHADAEFQERLKEDTSFGGNLGRAVFQAKKRLLEPLGLVEEAAKTAPGKKRPVEQSPQEPDSSAGIGKSGAQPAKKRLNFGQTGDTESVPDPQPIGEPPAAPSGVGSLTMASGGGAPVADNNEGADGVGSSSGNWHCDSQWLGDRVITTSTRTWALPTYNNHLYKQISNSTSGGSSNDNAYFGYSTPWGYFDFNRFHCRFSPRDWQRLINNNWGFRPKRLNFKLFNIQVKEVTDNNGVKTIANNLTSTVQVFTDSDYQLPYVLGSAHEGCLPPFPADVFMIPQYGYLTLNDGSQAVGRSSFYCLEYFPSQMLRTGNNFQFSYEFENVPFHSSYAHSQSLDRLMNPLIDQYLYYLSKTINGSGQNQQTLKFSVAGPSNMAVQGRNYIPGPSYRQQRVSTTVTQNNNSEFAWPGASSWALNGRNSLMNPGPAMASHKEGEDRFFPLSGSLIFGKQGTGRDNVDADKVMITNEEEIKTTNPVATESYGQVATNHQSAQAQAQTGWVQNQGILPGMVWQDRDVYLQGPIWAKIPHTDGNFHPSPLMGGFGMKHPPPQILIKNAPVPADPPTAFNKDKLNSFITQYSTGQVSVEIEWELQKENSKRWNPEIQYTSNYYKSNNVEFAVNTEGVYSEPRPIGTRYLTRNL

SEQ ID NO: 692 - protein, 736 aa, Artificial Sequence
  Description of Artificial Sequence: Synthetic polypeptide
MAADGYLPDWLEDNLSEGIREWWALKPGAPQPKANQQHQDNARGLVLPGYKYLGPGNGLDKGEPVSAADAAALEHDKAYDQQLKAGDNPYLKYNHADAEFQERLKEDTSFGGNLGRAVFQAKKRLLEPLGLVEEAAKTAPGKKRPVEQSPQEPDSSAGIGKSGAQPAKKRLNFGQTGDTESVPDPQPIGEPPAAPSGVGSLTMASGGGAPVADNNEGADGVGSSSGNWHCDSQWLGDRVITTSTRTWALPTYNNHLYKQISNSTSGGSSNDNAYFGYSTPWGYFDFNRFHCHFSPRDWQRLINNNWGFRPKRLNFKLFNIQVKEVTDNNGVKTIANNLTSTVQVFTDSDYQLPYVLGSAHEGCLPPFPADVFMIPQYGYLTLNDGSQAVGRSSFYCLEYFPSQMLRTGNNFQFSYEFENVPFHSSYAHSQSLDRLMNPLIDQYLYYLSKTINGSGQNQQTLKFSVAGPSNMAVQGRNYIPGPSYRQQRVSTTVTQNNNSEFAWPGASSWALNGRNSLMNPGPAMASHKEGEDRFFPLSGSLIFGKQGTGRDNVDADKVMITNEEEIKTTNPVATESYGQVATNHQSAQAQAQTGWVQNQGILPGMVWQDRDVYLQGPIWAKIPHTDGNFHPSPLMGGFGMKHPPPQILIKNTPVPADPPTAFNKDKLNSFITQYSTGQVSVEIEWELQKENSKRWNPEIQYTSNYYKSNNVEFAVNTEGVYSEPRPIGTRYLTRNL

SEQ ID NO: 693 - protein, 736 aa, Artificial Sequence
  Description of Artificial Sequence: Synthetic polypeptide
MAADGYLPDWLEDNLSEGIREWWALKPGAPQPKANQQHQDNARGLVLPGYKYLGPGNGLDKGEPVNAADAAALEHDKAYDQQLKAGDNPYLKYNHADAEFQERLKEDTSFGGNLGRAVFQAKKRLLEPLGLVEEAAKTAPGKKRPVEQSPQEPDSSAGIGKSGAQPAKKRLNFGQTGDTESVPDPQPIGEPPAAPSGVGSLTMASGGGAPVADNNEGADGVGSSSGNWHCDSQWLGDRVITTSTRTWALPTYNNHLYKQISNSTSGGSSNDNAYFGYSTPWGYFDFNRFHCHFSPRDWQRLINNNWGFRPKRLNFKLFNIQVKEVTDNNGVKTIANNLTSTVQVFTDSDYQLPYVLGSAHEGCLPPFPADVFMIPQYGYLTLNDGSQAVGRSSFYCLEYFPSQMLRTGNNFQFSYEFENVPFHSSYAHSQSLDRLMNPLIDQYLYYLSKTINGSGQNQQTLKFSVAGPSNTAVQGRNYIPGPSYRQQRVSTTVTQNNNSEFAWPGASSWALNGRNSLMNPGPAMASHKEGEDRFFPLSGSLIFGKQGTGRDNVDADKVMITNEEEIKTTNPVATESYGQVATNHQSAQAQAQTGWVQNQGILPGMVWQDRDVYLQGPIWAKIPHTDGNFHPSPLMGGFGMKHPPPQILIKNTPVPADPPTAFNKDKLNSFITQYSTGQVSVEIEWELQKENSKRWNPEIQYTSNYYKSNNVEFAVNTEGVYSEPRPIGTRYLTRNL

SEQ ID NO: 694 - protein, 736 aa, Artificial Sequence
  Description of Artificial Sequence: Synthetic polypeptide
MAADGYLPDWLEDNLSEGIREWWALKPGAPQPKANQQHQDNARGLVLPGYKYLGPGNGLDKGEPVNAADAAALEHDKAYDQQLKAGDNPYLKYNHADAEFQERLKEDTSFGGNLGRAVFQAKKRLLEPLGLVEEAAKTAPGKKRPVEQSPQEPDSSAGIGKSGAQPAKKRLNFGQTGDTESVPDPQPIGEPPAAPSGVGSLTMASGGGAPVADNNEGADGVGSSSGNWHCDSQWLGDRVITTSTRTWALPTYNNHLYKQISNSTSGGSSNDNAYFGYSTPWGYFDFNRFHCHFSPRDWQRLINNNWGFRPKRLNFKLFNIQVKEVTDNNGVKTIANNLTSTVQVFTDSDYQLPYVLGSAHEGCLPPFPADVFMIPQYGYLTLNDGSQAVGRSSFYCLEYFPSQMLRTGSNFQFSYEFENVPFHSSYAHSQSLDRLMNPLIDQYLYYLSKTINGSGQNQQTLKFSVAGPSNMAVQGRNYIPGPSYRQQRVSTTVTQNNNSEFAWPGASSWALNGRNSLMNPGPAMASHKEGEDRFFPLSGSLIFGKQGTGRDNVDADKVMITNEEEIKTTNPAATESYGQVATNHQSAQAQAQTGWVQNQGILPGMVWQDRDVYLQGPIWAKIPHTDGNFHPSPLMGGFGMKHPPPQILIKNTPVPADPPTAFNKDKLNSFITQYSTGQVSVEIEWELQKENSKRWNPEIQHTSNYYKSNNVEFAVNTEGVYSEPRPIGTRYLTRNL

SEQ ID NO: 695 - protein, 736 aa, Artificial Sequence
  Description of Artificial Sequence: Synthetic polypeptide
MAADGYLPDWLEDNLSEGIREWWALKPGAPQPKANQQHQDNARGLVLPGYKYLGPGNGLDKGEPVNAADAAALEHDKAYDQQLKAGDNPYLKYNHADAEFQERLKEDTSFGGNLGRAVFQAKKRLLEPLGLVEEAAKTAPGKKRPVEQSPQEPDSSAGIGKSGAQPAKKRLNFGQTGDTESVPDPQPIGEPPAAPSGVGSLTMASGGGAPVADNNEGADGVGSSSGNWHCDSQWLGDRVITTSTRTWALPTYNNHLYKQISNSTSGGSSNDNAYFGYSTPWGYFDFNRFHCHFSPRDWQRLINNNWGFRPKRLNFRLFNIQVKEVTDNNGVKTIANNLTSTVQVFTDSDYQLPYVLGSAHEGCLPPFPADVFMIPQYGYLTLNDGSQAVGRSSFYCLEYFPSQMLRTGNNFQFSYEFENVPFHSSYAHSQSLDRLMNPLIDQYLYYLSKTINGSGQNQQTLKFSVAGPSNMAVQGRNYIPGPSYRQQRVSTTVTQNNNSEFAWPGASSWALNGRNSLMNPGPAMASHKEGEDRFFPLSGSLIFGKQGTGRDNVDADKVMITNEEEIKTTNPVATESYGQVATNHQSAQAQAQTGWVQSQGILPGMVWQDRDVYLQGPIWAKIPHTDGNFHPSPLMGGFGMKHPPPQILIKNTPVPADPPTAFNKDKLNSFITQYSTGQVSVEIEWELQKENSKRWNPEIQYTSNYYKSNNVEFAVNTEGVYSEPRPIGTRYLTRNL

SEQ ID NO: 696 - protein, 735 aa, Artificial Sequence
  Description of Artificial Sequence: Synthetic polypeptide
MAADGYLPDWLEDNLSEGIREWWALKPGAPQPKANQQHQDNARGLVLPGYKYLGPGNGLDKGEPVNAADAAALEHDKAYDQQLKAGDNPYLKYNHADAEFQERLKEDTSFGGNLGRAVFQAKKRLLEPLGLVEEAAKTAPGKKRPVEQSPQEPDSSAGIGKSGAQPAKKRLNFGQTGDTESVPDPQPIGEPPAAPSGVGSLTMASGGGAPVADNNEGADGVGSSSGNWHCDSQWLGDRVITTSTRTWALPTYNNHLYKQISNSTSGGSSNDNAYFGYSTPWRYFDFNRFHCHFSPRDWQRLINNWGFRPKRLNFKLFNIQVKEVTDNNGVKTIANNLTSTVQAFTDSDYQLPYVLGSAHEGCLPPFPADVFMIPQYGYLTLNDGSQAVGRSSFYCLEYFPSQMLRTGNNFQFSYEFENVPFHSSYAHSQSLDRLMNPLIDQYLYYLSKTINGSGQNQQTLKFSVAGPSNMAVQGRNYIPGPSYRQQRVSTTVTQNNNSEFAWPGASSWALNGRNSLMNPGPAMASHKEGEDRFFPLSGSLIFGKQGTGRDNVDADKVMITNEEEIKTTNPVATESYGQVATNHQSAQAQAQTGWVQNQGILPGMVWQDRDVYLQGPIWAKIPHTDGNFHPSPLMGGFGMKHPPPQILIKNTPVPADPPTAFNKDELNSFITQYSTGQVSVEIEWELQKENSKRWNPEIQYTSNYYKSNNVEFAVNTEGVYSEPRPIGTRYLTRNL

SEQ ID NO: 697 - protein, 735 aa, Artificial Sequence
  Description of Artificial Sequence: Synthetic polypeptide
MAADGYLPDWLEDNLSEGIREWWALKPGAPQPKANQQHQDNARGLVLPGYKYLGPGNGLDKGEPVNAADAAALEHDKAYDQQLKAGDNPYLKYNHADAEFQERLKEDTSFGGNLGRAVFQDKKRLLEPLGLVEEAAKTAPGKKRPVEQSPQEPDSSAGIGKSGAQPAKKRLNFGQTGDTESVPDPQPIGEPPAAPSGVGSLTMASGGGAPVADNNEGADGVGSSSGNWHCDSQWLGDRVITTSTRTWALPTYNNHLYKQISNSTSGGSSNDNAYFGYSTPWGYFDFNRFHCHFSPRDWQRLINNWGFRPKRLNFKLFNIQVKEVTDNNGVKTIANNLTSTVQVFTDSDYQLPYVLGSAHEGCLPPFPADVFMIPQYGYLTLNDGSQAVGRSSFYCLEYFPSQMLRTGNNFQFSYEFENVPFHSSYAHSQSLDRLMNPLIDQYLYYLSKTINGSGQNQQTLKFSVAGPSNMAVQGRNYIPGPSYRQQRVSTTVTQNNNSEFAWPGASSWALNGRNSLMNPGPAMASHKEGEDRFFPLSGSLIFGKQGTGRDNVDADKVMITNEEEIKTTNPVATESYGQVATNHQSAQAQAQTGWVQNQGILPGMVWQDRDVYLQGPIWAKIPHTDGNFHPSPLMGGFGMKHPPPQILIKNTPVPADPPTAFNKDKLNSFITQYSTGQVSVEIEWELQKENSKRWNPEIQYTSNYYKSNNVEFAVNTEGVYSEPRPIGTRYLTRNL

SEQ ID NO: 698 - protein, 736 aa, Artificial Sequence
  Description of Artificial Sequence: Synthetic polypeptide
MAADGYLPDWLEDNLSEGIREWWALKPGAPQPKANQQHQDNARGLVLPGYKYLGPGNGLDKGEPVNAADAAALEHDKAYDQQLKAGDNPYLKYNHADAEFQERLKEDTSFGGNLGRAVFQAKKRLLEPLGLVEEAAKTAPGKKRPVEQSPQEPDSSAGIGKSGAQPAKKRLNFGQTGDTESVPDPQPIGEPPAAPSGVGSLTMASGGGAPVADNNEGADGVGSSSGNWHCDSQWLGDRAITTSTRTWALPTYNNHLYKQISNSTSGGSSNDNAYFGYSTPWGYFDFNRFHCHFSPRDWQRLINNNWGFRPKRLNFKLFNIQVKEVTDNNGVKTIANNLTSTVQVFTDSDYQLPYVLGSAHEGCLPPFPADVFMIPQYGYLTLNDGSQAVGRSSFYCLEYFPSQMLRTGNNFQFSYEFENVPFHSSYAHSQSLDRLMNPLIDQYLYYLSKTINGSGQNQQTLKFSVAGPSNMAVQGRNYIPGPSYRQQRVSTTVTQNNNSEFAWPGASSWALNGRNSLMNPGPAMASHKEGEDRFFPLSGSLIFGKQGTGRDNVDADKVMTTNEEEIKTTNPVATESYGQVATNHQSAQAQAQTGWVQNQGILPGMVWQDRDVYLQGPIWAKIPHTDGNFHPSPLMGGFGMKHPPPQILIKNTPVPADPPTAFNKDKLNSFITQYSTGQVSVEIEWELQKENSKRWNPEIQYTSNYYKSNNVEFAVNTEGVYSEPRPIGTRYLTRNL

SEQ ID NO: 699 - protein, 736 aa, Artificial Sequence
  Description of Artificial Sequence: Synthetic polypeptide
MAADGYLPDWLEDNLSEGIREWWALKPGAPQPKANQQHQDNARGLVLPGYKYLGPGNGLDKGEPVNAADAAALEHDKAYDQQLKAGDNPYLKYNHADAEFQERLKEDTSFGGNLGRAVFQTKKRLLEPLGLVEEAAKTAPGKKRPVEQSPQEPGSSAGIGKSGAQPAKKRLNFGQTGDTESVPDPQPIGEPPAAPSGVGSLTMASGGGAPVADNNEGADGVGSSSGNWHCDSQWLGDRVITTSTRTWALPTYNNHLYKQISNSTSGGSSNDNAYFGYSTPWGYFDFNRFHCHFSPRDWQRLINNNWGFRPKRLNFKLFNIQVKEVTDNNGVKTIANNLTSTVQVFTDSDYQLPYVLGSAHEGCLPPFPADVFMIPQYGYLTLNDGSQAVGRSSFYCLEYFPSQMLRTGNNFQFSYEFENVPFHSSYAHSQSLDRLMNPLIDQYLHYLSKTINGSGQNQQTLKFSVAGPSNMAVQGRNYIPGPSYRQQRVSTTVTQNNNSEFAWPGASSWALNGRNSLMNPGPAMASHKEGEDRFFPLSGSLIFGKQGTGRDNVDADKVMITNEEEIKTTNPVATESYGQVATNHQSAQAQAQTGWVQNQGILPGMVWQDRDVYLQGPIWAKIPHTDGNFHPSPLMGGFGMKHPPPQILIKNTPVPADPPTAFNKDKLNSFITQYSTGQVSVEIEWELQKENSKRWNPEIQYTSNYYKSNNVEFAVNTEGVYSEPRPIGTRYLTRNL

SEQ ID NO: 700 - protein, 736 aa, Artificial Sequence
  Description of Artificial Sequence: Synthetic polypeptide
MAADGYFPDWLEDNLSEGIREWWALKPGAPQPKANQQHQDNARGLVLPGYKYLGPGNGLDKGEPVNAADAAALEHDKAYDQQLKAGDNPYLKYNHADAEFQERLKEDTSFGGNLGRAVFQAKKRLLEPLGLVEEAAKTAPGKKRPVEQSPQEPDSSAGIGKSGAQPAKKRLNFGQTGDTESVPDPQPIGESPAAPSGVGSLTMASGGGAPVADNNEGADGVGSSSGNWHCDSQWLGDRVITTSTRTWALPTYNNHLYKQISNSTSGGSSNDNAYFGYSTPWGYFDFNRFHCHFSPRDWQRLINNNWGFRPKRLNFKLFNIQVKEVTDNNGVKTIANNLTSTVQVFTDSDYQLPYVLGSAHEGCLPPFPADVFMIPQYGYLTLNDGSQAVGRSSFYCLEYLPSQMLRTGNNFQFSYEFENVPFHSSYAHSQSLDRLMNPLIDQYLHYLSKTINGSGQNQQTLKFSVAGPSNMAVQGRNYIPGPSYRQQRVSTTVTQNNNSEFAWPGASSWALNGRNSLMNPGPAVASHKEGEDRFFPLSGSLIFGKQGTGRDNVDADKVMITNEEEIKTTNPVATESYGQVATNHQSAQAQAQTGWVQNQGILPGMVWQDRDVYLQGPIWAKIPHTDGNFHPSPLMGGFGMKHPPPQILIKNTPVPADPPTAFNKDKLNSFITQYSTGQVSVEIEWELQKENSKRWNPEIQYTSNYYKSNNVEFAVNTEGVYSEPRPIGTRYLTRNL

SEQ ID NO: 701 - protein, 736 aa, Artificial Sequence
  Description of Artificial Sequence: Synthetic polypeptide
MAADGYLPDWLEDNLSEGIREWWALKPGAPQPKANQQHQDNARGLVLPGYKYLGPGNGLDKGEPVNAADAAALEHDKAYDQQLKAGDNPYLKYNHADAEFQERLKEDTSFGGNLGRAVFQAKKRLLEPLGPVEEAAKTAPGKKRPVEQSPQEPDSSAGIGKSGAQPAKKRLNFGQTGDTESVPDPQPIGEPPAAPSGVGSLTMASGGGAPVADNNEGADGVGSSSGNWHCDSQWLGDRVITTSTRTWALPTYNNHLYKQISNSTSGGSSNDNAYFGYSTPWGYFDFNRFHCHFSPRDWQRLINNNWGFRPKRLNFKLFNIQVKEVTDNNGVKTIANNLTSTVQVFTDSDYQLPYVLGSAHEGCLPPFPADVFMIPQYGYLTLNDGSQAVGRSSFYCLEYFPSQMLRTGNNFQFSYEFENVPFHSSYAHSQSLDRLMNPLIDQYLYYLSKTINGSGQNQQTLKFSVAGPSNMAVQGRNYIPGPSYRQQRVSTTVTQNNNSEFAWPGASSWALNGRNSLMNPGPAMASHKEGEDRFFPLSGSLIFGKQGTGRDNVDADKVMITNEEEIKTTNPVATESYGQAATNHQSAQAQAQTGWVQNQGILPGMVWQDRDVYLQGPIWAKIPHTDGNFHPSPLMGGFGMKHPPPQILIKNTPVPADPPTAFNKDKLNSFITQYSTGQVSVEIEWELQKENSKRWNPEIQYTSNYYKSNNVEFAVNTEGVYSEPRPIGTRYLTRNL

SEQ ID NO: 702 - protein, 736 aa, Artificial Sequence
  Description of Artificial Sequence: Synthetic polypeptide
MAADGYLPDWLEDNLSEGIREWWALKPGAPQPKANQQHQDNARGLVLPGYKYLGPGNGLDKGEPVNAADAAALEHDKAYDQQLKAGDNPYLKYNHADAEFQERLKEDTSFGGNLGRAVFQAKKRLLEPLGPVEEAAKTAPGKKRPVEQSPQEPDSSAGIGKSGAQPAKKRLNFGQTGDTESVPDPQPIGEPPAAPSGVGSLTMASGGGAPVADNNEGADGVGSSSGNWHCDSQWLGDRVITTSTRTWALPTYNNHLYKQISNSTSGGSSNDNAYFGYSTPWGYFDFNRFHCHFSPRDWRRLINNNWGFRPKRLNFKLFNIQVKEVTDNNGVKTIANNLTSTVQVFTDSDYQLPYVLGSAHEGCLPPFPADVFMIPQYGYLTLNDGSQAVGRSSFYCLEYFPSQMLRTGNNFQFSYEFENVPFHSSYAHSQSLDRLMNPLIDQYLYYLSKTINGSGQNQQTLKFSVAGPSNMAVQGRNYIPGPSYRQQRVSTTVTQNNNSEFAWPGASSWALNGRNSLMNPGPAMASHKEGEDRFFPLSGSLIFGKQGTGRDNVDADKVMITNEEEIKTTNPVATESYGQVATNHQSAQAQAQTGWVQNQGILPGMVWQDRDVYLQGPIWAKIPHTDGNFHPSPLMGGFGMKHPPPQILIKNTPVPADPPTAFNKDKLNSFITQYSTGQVSVEIEWELQKENSKRWNPEIQYTSNYYKSNNVEFAVNTEGVYSEPRPIGTRYLTRNL

SEQ ID NO: 703 - protein, 736 aa, Artificial Sequence
  Description of Artificial Sequence: Synthetic polypeptide
MAADGYLPDWLEDNLSEGIREWWALKPGAPQPKANQQHQDNARGLVLPGYKYLGPGNGLDKGEPVNAADAAALEHDKAYDQQLKAGDNLYLKYNHADAEFQERLKEDTSFGGNLGRAVFQAKKRLLEPLGLVEEAAKTAPGKKRPVEQSPQEPDSSAGIGKSGAQPAKKRLNFGQTGDTESVPDPQPIGEPPAAPSGVGSLTMASGGGAPVADNNEGADGVGSSSGNWHCDSQWLGDRVITTSTRTWALPTYNNHLYKQISNSTSGGSSNDNAYFGYSTPWGYFDFNRFHCHFSPRDWQRLINNNWGFRPKRLNFKLFNIQVKEVTDNNGVKTIANNLTSTVQVFTDSDYQLPYVLGSAHEGCLPPFPADVFMIPQYGYLTLNDGSQAVGRSSFYCLEYFPSQMLRTGNNFQFSYEFENVPFHSSYAHSQSLDRLMNPLIDQYLHYLSKTINGSGQNQQTLKFSVAGPSNMAVQGRNYIPGPSYRQQRVSTTVTQNNNSEFAWPGASSWALNGRNSLMNPGPAMASHKEGEDRFFPLSGSLIFGKQGTGRDNVDADKVMITNEEEIKTTNPVATESYGQVATNHQSAQAQAQTGWVQNQGILPGMVWQDRDVYLQGPIWAKIPHTDGNFHPSPLMGGFGMKHPPPQILIKNTPVPADPPTAFNKDKLNSFITQYSTGQVSVEIEWELQKENSKRWNPEIQYTSNYYKSNNVEFAVNTEGVYSEPRPIGTRYLTRNL

SEQ ID NO: 704 - protein, 736 aa, Artificial Sequence
  Description of Artificial Sequence: Synthetic polypeptide
MAADGYLPDWLEDNLSEGIREWWALKPGAPQPKANQQHQDNARGLVLPGYKYLGPGNGLDKGEPVNAADAAALEHDKAYDQQLKAGDNPYLKYNHADAEFQERLKEDTSFGGNLGRAVFQAKKRLLEPLGLVEEAAKTAPGKKRPVEQSPQEPDSSAGIGKSGAQPAKKRLNFGQTGDTESVPDPQPIGEPPAAPSGVGSLTMASGGGAPVADNNEGADGVGSSSGNWHCDSQWLGDRVITTSTRTWALPTYNNHLYKQISNSTSGGSSNDNAYFGYSTPWGYFDFNRFHCHFSPRDWQRLINNNWGFRPKRLNFKLFNIQVKEVTDNNGVKTIANNLTSTVQVFTDSDYQLPYVLGSAHEGCLPPFPADVFMIPQYGYLTLNDGSQAVGRSSFYCLEYFPSQMLRTGNNFQFSYEFENVPFHSSYAHSQSLDRLMNPLIDQYLHYLSKTINGSGQNQQTLKFSVAGPSNMAVQGRNYIPGPSYRQQRVSTTVTQNNNSEFAWPGASSWALNGRNSLMNPGPAMASHKEGEDRFFPLSGSLIFGKQGTGRDNVDADKVMITNEEEIKTTNPVATESYGQVATNHQSAQAQAQTGWVQNQGILPGMVWQDRDVYLQGPIWAKIPHTDGNFHPSPLMGGFGMKHPPPQILIKNTPVPADPPTAFNKDKLNSFITQYSTGQVSVEIEWELQKENSKRWNPEIQYTSNYYKSNNVEFAVNTEGVYSEPRPIGTRYLTRNL

SEQ ID NO: 705 - protein, 736 aa, Artificial Sequence
  Description of Artificial Sequence: Synthetic polypeptide
  MOD_RES (442)..(442): Any amino acid
MAADGYLPDWLEDNLSEGIREWWALKPGAPQPKANQQHQDNARGLVLPGYKYLGPGNGLDKGEPVNAADAAALEHDKAYDQQLKAGDNPYLKYNHADAEFQERLKEDTSFGGNLGRAVFQAKKRLLEPLGLVEEAAKTAPGKKRPVEQSPQEPDSSAGIGKSGAQPAKKRLNFGQTGDTESVPDPQPIGEPPAAPSGVGSLTMASGGGAPVADNNEGADGVGSSSGNWHCDSQWLGDRVITTSTRTWALPTYNNHLYKQISTSTSGGSSNDNAYFGYSTPWGYFDFNRFHCHFSPRDWQRLINNNWGFRPKRLNFKLFNIQVKEVTDNNGVKTIANNLTSTVQVFTDSDYQLPYVLGSAHEGCLPPFPADVFMIPQYGYLTLNDGSQAVGRSSFYCLEYFPSQMLRTGNNFQFSYEFENVPFHSSYAHSQSLDRLMNPLIDXYLHYLSKTINGSGQNQQTLKFSVAGPSNMAVQGRNYIPGPSYRQQRVSTTVTQNNNSEFAWPGASSWALNGRNSLMNPGPAMASHKEGEDRFFPLSGSLIFGKQGTGRDNVDADKVMITNEEEIKTTNPVATESYGQVATNHQSAQAQAQTGWVQNQGILPDMVWQDRDVYLQGPIWAKIPHTDGNFHPSPLMGGFGMKHPPPQILIKNTPVPADPPTAFNKDKLNSFITQYSTGQVSVEIEWELQKENSKRWNPEIQYTSNYYKSNNVEFAVNTEGVYSEPRPIGTRYLTRNL

SEQ ID NO: 706 - protein, 736 aa, Artificial Sequence; identical to SEQ ID NO: 686
  Description of Artificial Sequence: Synthetic polypeptide

SEQ ID NO: 707 - protein, 736 aa, Artificial Sequence; identical to SEQ ID NO: 690
  Description of Artificial Sequence: Synthetic polypeptide

SEQ ID NO: 708 - protein, 736 aa, Artificial Sequence
  Description of Artificial Sequence: Synthetic polypeptide
MAADGYLPDWLEDNLSEGIREWWALKPGAPQPRANQQHQDNARGLVLPGYKYLGPGNGLDKGEPVNAADAAALEHDKAYDQQLKAGDNPYLKYNHADAEFQERLKEDTSFGGNLGRAVFQAKKRLLEPLGLVEEAAKTAPGKKRPVEQSPQEPDSSAGIGKSGAQPAKKRLNFGQTGDTESVPDPQPIGEPPAAPSGVGSLTMASGGGAPVADNNEGADGVGSSSGNWHCDSQWLGDRVITTSTRTWALPTYNNHLYKQISNSTSGGSSNDNAYFGYSTPWGYFDFNRFHCHFSPRDWQRLINNNWGFRPKRLNFKLFNIQVKEVTDNNGVKTIANNLTSTVQVFTDSDCQLPYVLGSAHEGCLPPFPADVFMIPQYGYLTLNDGSQAVGRSSFYCLEYFPSQMLRTGNNFQFSYEFENVPFHSSYAHSQSLDRLTNPLIDQYLYYLSKTINGSGQNQQTLKFSVAGPSNMAVQGRNYIPGPSYRQQRVSTTVTQNNNSEFAWPGASSWALNGRNSLMNPGPAMASHKEGEDRFFPLSGSLIFGKQGTGRDNVDADKVMITNEEEIKTTNPVATESHGQVATNHQSAQAQAQTGWVQNQGILPGMVWQDRDVYLQGPIWAKIPHTDGNFHPSPLMGGFGMKHPPPQILIKNTPVPADPPTAFNKDKLNSFITQYSTGQVSVEIEWELQKENSKRWNPEIQYTSNYYKSNNVEFAVNTEGVYSEPRPIGTRYLTRNL

SEQ ID NO: 709 - protein, 736 aa, Artificial Sequence
  Description of Artificial Sequence: Synthetic polypeptide
MAADGYLPDWLEDNLSEGIREWWALKPGAPQPKANQQHQDNARGLVLPGYKYLGPGNGLDKGEPVNAADAAALEHDKAYDQQLKAGDNPYLKYNHADAEFQERLKEDTSFGGNLGRAVFQAKKRLLEPLGLVEEAAKTAPGKKRPVEQSPQEPDSSAGIGKSGAQPAKKRLNFGQTGDTESVPDPQPIGEPPAAPSGVGSLTMASGGGAPVADNNEGADGVGSSSGNWHCDSQWLGDRVITTSTRTWALPTYNNHLYKQISNSTSGGSSNDNAYFGYSTPWGYFDFNRFHCHFSPRDWQRLINNNWGFRPKRLNFKLFNIQVKEVTDNNGVKTIANNLTSTVQVFTDSDYQLPYVLGSAHEGCLPPFPADVFMIPQYGYLTLNDGSQAVGRSSFYCLEYFPSQMLRTGNNFQFSYEFENVPFHSSYAHSQSLDRLMNPPIDQYLYYLSKTINGSGQNQQTLKFSVAGPSNMAVQGRNYIPGPSYRQQRVSTTVTQNNNSEFAWPGASSWALNGRNSLMNPGPAMASHKEGEDRFFPLSGSLIFGKQGTGRDNVDADKVMITNEEEIKTTNPVATESYGQVATNHQSAQAQAQTGWVQNQGILPGMVWQDRDVYLQGPIWAKIPHTDGNFHPSPLMGGFGMKHPPPQILIKNTPVPADPPTAFNKDKLNSFITQYSTGQVSVEIEWELQKENSKRWNPEIQYTSNYYKSNNVEFAVNTEGVYGEPRPIGTRYLTRNL

SEQ ID NO: 710 - protein, 736 aa, Artificial Sequence
  Description of Artificial Sequence: Synthetic polypeptide
MAADGYLPDWLEDNLSEGIREWWALKPGAPQPKANQQHQDNARGLVLPGYKYLGPGNGLDKGEPVNAADAAALEHDKAYDQQLKAGDNPYLKYNHADAEFQERLKEDTSFGGNLGRAVFQAKKRLLEPLGLVEEAAKTAPGKKRPVEQSPQEPDSSAGIGKSGAQPAKKRLNFGQTGDTESVPDPQPIGEPPAAPSGVGSLTMASGGGAPVADNNEGADGVGSSSGNWHCDSQWLGDRVITTSTRTWALPTYNNHLYKQISNSTSGGSSNDNAYFGYSTPWGYFDFNRFHCHFSPRDRQRLINNNWGFRPKRLNFKLFNIQVKEVTDNNGVKTIANNLTSTVQVFTDSDYQLPYVLGSAHEGCLPPFPADVFMIPQYGYLTLNDGSQAVGRSSFYCLEYFPSQMLRTGNNFQFSYEFENVPFHSSYAHSQSLDRLMNPLIDQYLYYLSKTINGSGQNQQTLKFSVAGPSNMAVQGRNYIPGPSYRQQRVSTTVTQNNNSEFAWPGASSWALNGRNSLMNPGPAMASHKEGEDRFFPLSGSLIFGKQGTGRDNVDADKVMITNEEEIKTTNPVATESYGQVATNHQSAQAQAQTGWVQNQGILPGMVWQDRDVYLQGPIWAKIPHTDGNFHPSPLMGGFGMKHPPPQILIKNTPVPADPPTAFNKDKLNSFITQYSTGQVSVEIEWELQKENSKRWNPEIQYTSNYYKSNNVEFAVNTEGVYSEPRPIGTRYLTRNL

SEQ ID NO: 711 - protein, 736 aa, Artificial Sequence
  Description of Artificial Sequence: Synthetic polypeptide
MAADGYLPDWLEDNLSEGIREWWALKPGAPQPKANQQHQDNARGLVLPGYKYLGPGNGLDKGEPVNAADAAALEHDKAYDQQLKAGDNPYLKYNHADAEFQERLKEDTSFGGNLGRAVFQAKKRLLEPLGLVEEAAKTAPGKKRPVEQSPQEPDSSAGIGKSGAQPAKKRLNFGQTGDTESVPDPQPIGEPPAAPSGVGSLTMASGGGAPVADNNEGADGVGSSSGNWHCNSQWLGDRVITTSTRTWALPTYNNHLYKQISNSTSGGSSNDNAYFGYSTPWGYFDFNRFHCHFSPRDWQRLINNNWGFRPKRLNFKLFNIQVKEVTDNNGVKTIANNLTSTVQVFTDSDYQLPYVLGSAHEGCLPPFPADVFMIPQYGYLTLNDGSQAVGRSSFYCLEYFPSQMLRTGNNFQFSYEFENVPFHSSYAHSQSLDRLMNPLIDQYLYYLSKTINGSGQNQQTLKFSVAGPGNMAVQGRNYIPGPSYRQQRVSTTVTQNNNSEFAWPGASSWALNGRNSLMNPGPAMASHKEGEDRFFPLSGSLIFGKQGTGRDNVDADKVMITNEEEIKTTNPVATESYGQVATNHQSAQAQAQTGWVQNQGILPGMVWQDRDVYLQGPIWAKIPHTDGNFHPSPLMGGFGMKHPPPQILIKNTPVPADPPTAFNKDKLNSFITQYSTGQVSVEIEWELQKENSKRWNPEIQYTSNYYKSNNVEFAVNTEGVYSEPRPIGTRYLTRNL

SEQ ID NO: 712 - protein, 736 aa, Artificial Sequence
  Description of Artificial Sequence: Synthetic polypeptide
MAADGYLPDWLEDNLSEGIREWWALKPGAPQPKANQQHQDNARGLVLPGYRYLGPGNGLDKGEPVNAADAAALEHDKAYDQQLKAGDNPYLKYNHADAEFQERLKEDTSFGGNLGRAVFQAKKRLLEPLGLVEEAAKTAPGKKRPVEQSPQEPDSSAGIGKSGAQPAKKRLNFGQTGDTESVPDPQPIGEPPAAPSGVGSLTMASGGGAPVADNNEGADGVGSSSGNWHCDSQWLGDRVITTSTRTWALPTYNNHLYKQISNSTSGGSSNDNAYFGYSTPWGYFDFNRFHCHFSPRDWQRLINNNWGFRPKRLNFKLFNIQVKEVTDNNGVKTVANNLTSTVQVFTDSDYQLPYVLGSAHEGCLPPFPADVFMIPQYGYLTLNDGSQAVGRSSFYCLEYFPSQMLRTGNNFQFSYEFENVPFHSSYAHSQSLDRLMNPLIDQYLYYLSKTINGSGQNQQTLKFSVAGPSNMAVQGRNYIPGPSYRQQRVSTTVTQNNNSEFAWPGASSWALNGRNSLMNPGPAMASHKEGEDRFFPLSGSLIFGKQGTGRDNVDADKVMITNEEEIKTTNPVATESYGQVATNHQSAQAQAQTGWVQNQGILPGMVWQDRDVYLQGPIWAKIPHTDGNFHPSPLMGGFGMKHPPPQILIKNTPVPADPPTAFNKDKLNSFITQYSTGQVSVEIEWELQKENSKRWNPEIQYTSNYYKSNNVEFAVNTEGVYSGPRPIGTRYLTRNL

SEQ ID NO: 713 - protein, 736 aa, Artificial Sequence; identical to SEQ ID NO: 123
  Description of Artificial Sequence: Synthetic polypeptide

SEQ ID NO: 714 - protein, 736 aa, Artificial Sequence
  Description of Artificial Sequence: Synthetic polypeptide
MAADGYLPDWLEDNLSEGIREWWALKPGAPQPKANQQRQDNARGLVLPGYKYLGPGNGLDKGEPVNAADAAALEHDKAYDQQLKAGGNPCLKYNHADAEFQERLKEDTSFGGNLGRAVFQAKKRLLEPLGLVEEAAKTAPGKKRPVEQSPQEPDSSAGIGRSGAQPAKKRLNFGQTGDTESVPDPQPIGEPPAAPSGVGSLTMASGGGAPVADNNEGADGVGSSSGNWHCDSQWLGDRVITTSTRTWALPTYNNHLYKQISNSTSGGSSNDNAYFGYSTPWGYFDFNRFHCHFSPRDWQRLINNNWGFRPKRLNFKLFNIQVKEVTDNNGVKAIANNLTSTVQVFTDSDYQLPYVLGSAHEGCLPPFPADVFMIPQYGYLTLNDGSQAVGRSSFYCLEYFPSQMLRTGNNFQFSYEFENVPFHSSYAHSQSLDRLMNPLIDQYLYYLSKTIDGSGQNQQTLKFSVAGPSNMAVQGRNYIPGPSYRQQRVSTTVTQNNNSEFAWPGASSWALNGRNSLMDPGPAMASHKEGEDRFFPLSGSLIFGKQGTGRDNVDADKVMITNEEEIKTTNPVATESYGQVATNHQSAQAQAQTGWVQNQGILPGMVWQDRDVYLQGPIWAKIPHTGGNFHPSPLMGGFGMKHPPPQILIKNTPVPADPPTAFNKDKLNSFITQYSTGQVSVEIEWELQKENSKRWNPEIQYTSNYYKSNNVEFAVNTEGVYSEPRPIGTRYLTRNL

SEQ ID NO: 715 - protein, 736 aa, Artificial Sequence
  Description of Artificial Sequence: Synthetic polypeptide
MAADGYLPDWLEDNLSEGIREWWALKPGAPQPKANQQHQDNARGLVLPGYKYLGPGNGLDKGEPVNAADAAALEHDKAYDQQLKAGDNPYLKYNHADAEFQERLKEDTSFGGNLGRAVFQAKKRLLEPLGLVEEAAKTAPGKKRPVEQSPQEPDSSAGIGKSGAQPAKKRLNFGQTGDTESVPDPQPIGEPPAAPSGVGSLTMASGGGAPVADNNEGADGVGSSSGNWHCDSQWLGDRVITTSTRTWALPTYNNHLYKQISNSTSGGSSNDNAYFGYSTPWGYFDFNRFHCHFSPRDWQRLINNNWGFRPKRLNFKLFNIQVKEVTDNNGVKTIANNLTSTVQVFTDSDYQLPYVLGSAHEGCLPPFPADVFMIPQYGYLTLNDGSQAVGRSSFYCLEYFPSQMLRTGNNFQFSYEFENVPFHSSYAHSQSLDRLMNPLIDQYLYYLSKTINGSGQNQQTLKFSVAGPSNMAVQGRNYIPGPSYRQQRVSTTVTQNNNSEFAWPGASSWALNGRNSLMNPGPAMASHKEGEDRFFPLSGSLIFGKQGTGRDNVDADKVMITNEEEIKTTNPVATESYGQVATNHQSAQAQAQTGWVQNQGILPGMVWQDRDVYLQGPIWAKIPHTDGNFHPSPLMGGFGMKHPPPQILIKNTPVPADPPTAFNKDKLNSFITQYSTGQVSVEIEWELQKENSKRWNPEIQYTSNYYKPNNVEFAVNTEGVYSEPRPIGTRYLTRNL

SEQ ID NO: 716 - protein, 736 aa, Artificial Sequence
  Description of Artificial Sequence: Synthetic polypeptide
MAADGYLPDWLEDNLSEGIREWWALKPGAPQPKANQQHQDNARGLVLPGYKYLGPGNGLDKGEPVNAADAAALEHNKAYDQQLKAGDNPYLKCNHADAEFQERLKEDTSFGGNLGRAVFQAKKRPLEPLGLVEEAAKTAPGKKRPVEQSPQEPDSSAGIGKSGAQPAKKRLNFGQTGDTESVPDPQPIGEPPAAPSGVRSLTMASGGGAPVADNNEGADGVGSSSGNWHCDSQWLGDRVITTSTRTWALPTYNNHLYKQISNSTSGGSSNDNAYLGYSTPWGYFDFNRFHCHFSPRDWQRLINNNWGFRPKRLNFKLFNIQVKEVTDNNGVKTIANNLTSTVQVFTDSDYQLPYVLGSAHEGCLPPFPADVFMIPQYGYLTLNDGSQAVGRSSFYCLEYFPSQMLRTGNNFQFSYEFENVPFHSSYAHSQSLDRLMNPLIDQYLYYLSKTINGSGQNQQTLKFSVAGPSNMAVQGRNYIPGPSYRQQRVSTTVTQNNNSEFAWPGASSWALNGRNSLMNPGPTMASHKEGEDRFFPLSGSLIFGKQGTGRDNVDADKVMITNEEEIKTTNPVATESYGQVATNHQSAQAQAQTGWVQNQGILPGMVWQDRDVYLQGPIWAKIPHTDGNFHPSPLMGGFGMKHPPPQILIKNTPVPADPPTAFNKDKLNSFITQYSTGQVSVEIEWELQKENSKRWNPEIQYTSNYYKSNNVEFAVNTEGVYSEPRPIGTRYLTRNL

SEQ ID NO: 717 - protein, 736 aa, Artificial Sequence
  Description of Artificial Sequence: Synthetic polypeptide
MAADGYLPDWLEDNLSEGIREWWALKPGAPQPKANQQHQDNARGLVLPGYKYLGPGNGLDKGEPVNAADAAALVHDKAYDQQLKAGDNPYLKCNHADAEFQERLKEDTSFGGNLGRAVFQAKKRLLEPLGLVEEAAKTAPGKKRPVEQSPQEPDSSAGIGKSGAQPAKKRLNFGQTGDTESVPDPQPIGEPPAAPSGVGSLTMASGGGAPVADNNEGADGVGSSSGNWHCDSQWLGDRVITTSTRTWALPTYNNHLYKQISNSTSGGSSNDNAYLGYSTPWGYFDFNRFHCHFSPRDWQRLINNNWGFRPKRLNFKLFNIQVKEVTDNNGVKTIANNLTSTVQVFTDSDYQLPYVLGSAHEGCLPPFPADVFTIPQYGYLTLNDGSQAVGRSSFYCLEYFPSQMLRTGNNFQFSYEFENVPFHSSYAHSQSLDRLMNPLIDQYLYYLSKTINGSGQNQQTLKFSVAGPSNMAVQGRNYIPGPSYRQQRVSTTVTQNNNSEFAWPGASSWALNGRNSLMNPGPAMASHKEGEDRFFPLSGSLIFGKQGTGRDNVDADKVMITNEEEIKTTNPVATESYGQVATNHQSAQAQAQTGWVQNQGILPGMVWQDRDVYLQGPIWAKIPHTDGNFHPSPLMGGFGMKHPPPQILIKNTPVPADPPTAFNKDKLNSFITQYSTGQVSVEIEWELQKENSKRWNPEIQYTSNYYKSNNVEFAVNTEGVYSEPRPIGPRYLTRNF

SEQ ID NO: 718 - protein, 736 aa, Artificial Sequence
  Description of Artificial Sequence: Synthetic polypeptide
MAADGYLPDWLEDNLSEGIREWWALKPGAPQPKANQQHQDNARGLVLPGYKYLGPGNGLDKGEPVNAADAAALEHNKAYDQQLKAGDNPYLKCNHADAEFQERLKEDTSFGGNLGRAVFQAKKRLLEPLGLVEEAAKTAPGKKRPVEQSPQEPDSSAGIGKSGAQPAKKRLNFGQTGDTESVPDPQPIGEPPAAPSGVRSLTMASGGGAPVADNNEGADGVGSSSGNWHCDSQWLGDRVITTSTRTWALPTYNNHLYKQISNSTSGGSSNDNAYLGYSTPWGYFDFNRFHCHFSPRDWQRLINNNWGFRPKRLNFKLFNIQVKEVTDNNGVKTIANNLTSTVQVFTDSDYQLPYVLGSAHEGCLPPFPADVFMIPQYGYLTLNDGSQAVGRSSFYCLEYFPSQMLRTGNNFQFSYEFENVPFHSSYAHSQSLDRLMNPLIDQYLYYLSKTINGSGQNQQTLKFSVAGPSNMAVQGRNYIPGPSYRQQRVSTTVTQNNNSEFAWPGASSWALNGRNSLMNPGPAMASHKEGEDRFFPLSGSLIFGKQGTGRDNVDADKVMITNEEEIKTTNPVATESYGQVATNHQSAQAQAQTGWVQNQGILPGMVWQDRDVYLQGPIWAKIPHTDGNFHPSPLMGGFGMKHPPPQILIKNTPVPADPPTAFNKDKLNSFITQYSTGQVSVEIEWELQKENSKRWNPEIQYTSNYYKSNNVEFAVNTEGVYSEPRPIGTRYLTRNL

SEQ ID NO: 719 - protein, 736 aa, Artificial Sequence
  Description of Artificial Sequence: Synthetic polypeptide
MAADGYLPDWLEDNLSEGIREWWALKPGAPQPKANQQHQDNARGLVLPGYKYLGPGNGLDKGEPVNAADAAALEHDKAYDQQLKAGDNPYLKCNHADAEFQERLKEDTSFGGNLGRAVFQAKKRLLEPLGLVEEAAKTAPGKKRPVEQSPQEPDSSAGIGKSGAQPAKKRLNFGQTGDTESVPDPQPIGEPPAAPSGVGSLTMASGGGAPVADNNEGADGVGSSSGNWHCDSQWLGDRVITTSTRTWALPTYNNHLYKQISNSTSGGSSNDNAYLGYSTPWGYFDFNRFHCHFSPRDWQRLINNNWGFRPKRLNFELFNIQVKEVTDNNGVKTIANNLTSTVQVFTDSDYQLPYVLGSAHEGCLPPFPADVFMIPQYGYLTLNDGSQAVGRSSFYCLEYFPSQMLRTGNNFQSSYEFENVPFHSSYAHSQSLDRLMNPLIDQYLYYLSKTINGSGQNQQTLKFSVAGPSNMAVQGRNYIPGPSYRQQRASTTVTQNNNSEFAWPGASSWALNGRNSLMNPGPAMASHKEGEDRFFPLSGSLIFGKQGTGRDNVDADKVMITNEEEIKTTNPVATESYGQVATNHQSAQAQAQTGWVQNQGILPGMVWQDRDVYLQGPIWAKIPHTDGNFHPSPLMGGFGMKHPPPQILIKNTPVPADPPTAFNKDKLNSFITQYSTGQVSVEIEWELQKENSKRWNPEIQYTSNYYKSNNVEFAVNTEGVYSEPRPIGTRYLTRNL

SEQ ID NO: 720 - protein, 736 aa, Artificial Sequence
  Description of Artificial Sequence: Synthetic polypeptide
MAADGYLPDWLEDNLSEGIREWWALKPGAPQPKANQQHQDNARGLVLPGYKYLGPGNGLDKGEPVNAADAAALEHDKAYDQQLKAGDNPYLKCNHADAEFQERLKEDTSFGGNLGRAVFQAKKRLLEPLGLVEEAAKTAPGKKRPVEQSPQEPDSSAGIGKSGAQPAKKRLNFGQTGDTESVPDPQPIGEPPAAPPGVGSLTMASGGGAPVADNNEGADGVGSSSGNWHCDSQWLGDRVITTSTRTWALPTYNNHLYKQISNSTSGGSSNDNAYLGYSTPWGYFDFNRFHCHFSPRDWQRLINNNWGFRPKRLNFKLFNIQVKEVTDNNGVKTIANNLTSTVQVFTDSDYQLPYVLGSAHEGCLPPFPADVFMIPQYGYLTLNDGSQAVGRSSFYCLEYFPSQMLRTGNNFQFSYEFENVPFHSSYAHSQSLDRLMNPLIDQYLYYLSKTISGSGQNQQTLKFSVAGPSNMAVQGRNYIPGPSYRQQRVSTTVTQNNSSEFAWPGASSWALNGRNSLMNPGPAMASHKEGEDRFFPLSGSLIFGKQGTGRDNVDADKVMITNEEEIKTTNPVATESYGQVATNHQSAQAQAQTGWVQNQGILSGMVWQDRDVYLQGPIWAKIPHTDGNFHPSPLMGGFGMKHPPPQILIKNTPVPADPPTAFNKDKLNSFITQYSTGQVSVEIEWELQKENSKRWNPEIQYTSNYYKSNNVEFAVNTEGVYSEPRPIGTRYLTRNL

SEQ ID NO: 721 - protein, 736 aa, Artificial Sequence
  Description of Artificial Sequence: Synthetic polypeptide
MAADGYLPDWLEDNLSEGIREWWALKPGAPQPKANQQHQDNARGLVLPGYKYLGPGNGLDKGEPVNAADAAALEHDKAYDQQLKAGDNPYLKCNHADAEFQERLKEDTSFGGNLGRAVFQAKKRLLEPLGLVEEAAKTAPGKKRPVEQSPQEPDSSAGIGKSGAQPAKKRLNFGQTGDTESVPDPQPIGEPPAAPSGVGSLTMASGGGAPVADNNEGADGVGSSSGNWHCDSQWLGDRVITTSTRTWALPTYNNHLYKQISNSTSGGSSNDNAYLGYSTPWGYFDFNRFHCHFSPRDWQRLINNNWGFRPKRLNFKLFNIQVKEVTDNNGVKTIANNLTSTVQVFTDSDYQLPYVLGSAHEGCLPPFPADVFMIPQYGYLTLNDGSQAVGRSSFYCLEYFPSQMLRTGNNFQFSYEFENVPFHSSYAHSQSLDRLMNPLIDQYLYYLSKTINGSGQNQQTLKFSVAGPSNMAVQGRNYIPGPSYRQQRVSTTVTQNNNSEFAWPGASSWALNGRNSLMNPGPAMASHKEGEDRFFPLSGSLIFGKQGTGRDNVDADKVMITNEEEIKTTNPVATESYGQVATNHQSAQAQAQTGWVQNQGILPGMVWQDRDVYLQGPIWAKIPHTDGNFHPSPLMGGFGMKHPPPQILIKNTPVPADPPTAFNKDKLNSFITQYSTGQVSVEIEWELQKENSKRWNPEIQYTSNYYKSNNVEFAVNTEGVYSEPRPIGTRYLTRNL

SEQ ID NO: 722 - protein, 736 aa, Artificial Sequence; identical to SEQ ID NO: 721
  Description of Artificial Sequence: Synthetic polypeptide

SEQ ID NO: 723 - protein, 736 aa, Artificial Sequence
  Description of Artificial Sequence: Synthetic polypeptide
MAADGYLPDWLEDNLSEGIREWWALKPGAPQPKANQQHQDNARGLVLPGYKYLGPGNGLDKGEPVNAADAAALEHDKAYDQQLKAGDNPYLKCNHADAEFQERLKEDTSFGGNLGRAVFQAKKRLLEPLGLVEEAAKTAPGKKRPVEQSPQEPDSSAGIGKSGAQPAKKRLNFGQTGDTESVPDPQPIGEPPAAPSGVGSLTMASGGGAPVADNNEGADGVGSSSGNWHCDSQWLGDRVITTSTRTWALPTYNNHLYKQISNSTSGGSSNDNAYLDYSTPWGYFDFNRFHCHFSPRDWQRLINNNWGFRPKRLNFKLFNIQVKEVTDNNGVKTIANNLTSTVQVFTDSDYQLPYVLGSAHEGCLPPFPADVFMIPQYGYLTLNDGSQAVGRSSFYCLEYFPSQMLRTGNNFQFSYEFENVPFHSSYAHSQSLDRLMNPLIDQYLYYLSKTINGSGQNQQTLKFSVAGPSNMAVQGRNYIPGPSYRQQRVSTTVTQNNNSEFAWPGASSWALNGRNSLMNPGPAMASHKEGEDRFFPLSGSLIFGKQGTGRDNVDADKVMITNEEEIKTTNPVATESYGQVATNHQSAQAQAQTGWVQNQGILPGMVWQGRDVYLQGPIWAKIPHTDGNFHPSPLMGGFGMKHPPPQILIKNTPVPADPPTAFNKDKLNSFITQYSTGQVSVEIEWELQKENSKRWNPEIQYTSNYYKSNNVEFAVNTEGVYSEPRPIGTRYLTRNL

SEQ ID NO: 724 - protein, 736 aa, Artificial Sequence; identical to SEQ ID NO: 721
  Description of Artificial Sequence: Synthetic polypeptide

SEQ ID NO: 725 - protein, 736 aa, Artificial Sequence
  Description of Artificial Sequence: Synthetic polypeptide
MAADGYPPDWLEDNLSEGIREWWALKPGAPQPKANQQHQDNARGLVLPGYKYLGPGNGLDKGEPVNAADAAALEHDKAYDQQLKAGDNPHLKYNHADAEFQERLKEDTSFGGNLGRAVFQAKKRLLEPLGLVEEAAKTAPGKKRPVEQSPQEPDSSAGIGKSGAQPAKKRLNFGQTGDTESVPDPQPIGEPPAAPSGVGSLTMASGGGAPVADNNEGADGVGSSSGNWHCDSQWLGDRVITTSTRTWALPTYNNHLYKQISNSTSGGSSNDNAYFGYSTPWGYFDFNRFHCHFSPRDWQRLINNNWGFRPKRLNFKLFNIQVKEVTDNNGVKTIANNLTSTVQVFTDSDYQLPYVLGSAHEGCLPPFPADVFMIPQYGYLTLNDGSQAVGRSSFYCLEYFPSQMLRTGNNFQFSYEFENVPFHSSYAHSQSLDRLMNPLIDQYLYYLSKTINGSGQNQQTLKFSVAGPSNMAVQGRNYIPGPSYRQQRVSTTVTQNNNSEFAWPGASSWALNGRNSLMNPGPAMASHKEGEDRFFPLSGSLIFGKQGTGRDNVDADKVMITNEEEIKTTNPVATESYGQVATNHQSAQAQAQTGWVQNQGILPGMVWQDRDVYLQGPIWAKIPHTDGNFHPSPLMGGFGVKHPPPQILIKNTPVPADPPTAFNKDRLNSFITQYSTGQVSVEIEWELQKENSKRWNPEIQYTSNYYKSNNVEFAVNTEGVYSEPRPIGTRYLTRNL

SEQ ID NO: 726 - protein, 736 aa, Artificial Sequence
  Description of Artificial Sequence: Synthetic polypeptide
MAADGYLPDWLEDNLSEGIREWWALKPGAPQPKANQQHQDNARGLVLPGYKYLGPGNGLDKGEPVNAADAAALEHDKAYDQQLKAGDNPYLKYNHADAEFQERLKEDTSFGGNLGRAVFQAKKRLLEPLGLVEEAAKTAPGKKRPVEQSPQEPDSSAGIGKSGAQPAKKRLNFGQTGDTESVPDPQPIGEPPAAPSGVGSLTMASGGGAPVADNNEGADGVGSSSGNWHCDSQWLGDRVITTSTRTWALPTYNNHLYKQISNSTSGGSSNDNAYFGYSTPWGYFDFNRFHCHFSPRDWQRLINNNWGFRPKRLNFKLFNIQVKEVTDNNGVKTIANNLTSTVQVFTDSDYQLPYVLGSAHEGCLPPFPADVFMIPQYGYLTLNDGSQAVGRSSFYCLEYFPSQMLRTGNNFQFSYEFENVPFHSSYAHSQSLDRLMNPLIDQYLYYLSKTINGSGQNQQTLKFSVAGPSNMAVQGRNYIPGPSYRQQRVSTTVTQNNNSEFAWPGASSWALNGRNSLMNPGPAMASHKEGEDRFFPLSGSLIFGKQGTGRDNVDADKVMITNEEEIKTTNPVATESYGQVATNHQSAQAQAQTGWVQNQGILPGMVWQDRDVYLQGPIWAKIPHTDGNFHPSPLMGGFGVKHPPPQILIKNTPVPADPPTAFNKDKLNSFITQYSTGQVSVEIEWELQKENSKRWNPEIQYTSNYYKSNNVEFAVNTEGVYSEPRPIGTRYLTRNL

SEQ ID NO: 727 - protein, 736 aa, Artificial Sequence
  Description of Artificial Sequence: Synthetic polypeptide
MAADGYLPDWLEDNLSEGIREWWALKPGAPQPKANQQHQDNARGLVLPGYKYLGPGNGLDKGEPVNAADAAALEHDKAYDQQLKAGDNPYLKYNHADAEFQERLKEDTSFGGNLGRAVFQAKKRLLEPLGLVEEAAKTAPGKKRPVEQSPQEPDSSAGIGKSGAQPAKKRLNFGQTGDTESVPDPQPIGEPPAAPSGVGSLTMASGGGAPVADNNEGADGVGSSSGNWHCDSQWLGDRVITTSTRTWALPTYNNHLYKQISNSTSGGSSNDNAYFGYSTPWGYFDFNRFHCHFSPRDWQRLTNNNWGFRPKRLNFKLFNIQVKEVTDNNGVKTIANNLTSTVQVFTDSDYQLPYVLGSAHEGCLPPFPADVFMIPQYGYLTLNDGSQAVGRSSFYCLEYIPSQMLRTGNNFQFSYEFENVPFHSSYAHSQSLDRLMNPLIDQYLYYLSKTINGSGQNQQTLKFSVAGPSNMAVQGRNYIPGPSYRQQRVSTTVTQNNNSEFAWPGASSWALNGRNSLMNPGPAMASHKEGEDRFFPLSGSLIFGKQGTGRDNVDADKVMITNEEEIKTTNPVATESYGQVATNHQSAQAQAQTGWVQNQGILPGMVWQDRDVYLQGPIWAKIPHTDGNFHPSPLMGGFGVKHPPPQILIKNTPVPADPPTAFNKDKLNSFITQYSTGQVSVEIEWELQKENSKRWNPEIQYTSNYYKSNNVEFAVNTEGVYSEPRPIGTRYLTRNL

SEQ ID NO: 728 - protein, 736 aa, Artificial Sequence
  Description of Artificial Sequence: Synthetic polypeptide
MAADGYLPDWLEDNLSEGIREWWALKPGAPQPKANQQHQDNARGLVLPGYKYLGPGNGLDKGEPVNAADAAALEHDKAYDQQLKAGDNPYLKYNHADAEFQERLKEDTSFGGNLGRAVFQAKKRLLEPLGLVEEAAKTAPGKKRPVEQSPQEPDSSAGIGKSGAQPAKKRLNFGQTGDTESVPDPQPIGEPPAAPSGVGSLTMASGGGAPVADNNEGADGVGSSSGNWHCDSQWLGDRVITTSTRTWALPTYNNHLYKQISNSTSGGSSNDNAYFGYSTPWGYFDFNRFHCHFSPRDWQRLINNNWGFRPKRLNFKLFNIQVKEVTDNNGVKTIANNLTSTVQVFTDSDYQLPYVLGSAHEGCLPPFPADVFMIPQYGYLTLNDGSQAVGRSSFYCLEYFPSQMLRTGNNFQFSYEFENVPFHSSYAHSQSLDRLMNPLIDQYLYYLSKTINGSGQNQQTLKFSVAGPSNMAVQGRNYIPGPSYRQQRVSTTVTQNNNSEFAWPGASSWALNGRNSLMNPGPAMASHKEGEDRFFPLSGSLISGKQGTGRDNVDANKVMITNEEEIKTTNPVATESYGQVATNHQSAQAQAQTGWVQNQGILPGMVWQDRDVYLQGPIWAKIPHTDGNFHPSPLMGGFEMKHPPPQILIKNTPVPADPPTAFNKDKLNSFITQYSTGQVSVEIEWELQKENSKRWNPEIQYTSNYYKSNNVEFAVNTEGVYSEPRPIGTRYLTRNL

SEQ ID NO: 729 - protein, 736 aa, Artificial Sequence
  Description of Artificial Sequence: Synthetic polypeptide
MAADGYLPDWLEDNLSEGIREWWALKPGAPQPKANQQHQDNARGLVLPGYKYLGPGNGLDKGEPVNAADAAALEHDKAYDQQLKAGDNPYLKYNHADAEFQERLKEDTSFGGNLGRAVFQAKKRLLEPLGLVEEAAKTAPGKKRPVEQSPQEPDSSAGIGKSGAQPAKKRLNFGQTGDTESVPDPQPIGEPPAAPSGVGSLTIASGGGAPVADNNEGADGVGSSSGNWHCDSQWLGDRVITTSTRTWALPTYNNHLYKRISNSTSGGSSNDNAYFGYSTPWGYFDFNRFHCHFSPRDWQRLINNNWGFRPKRLNFKLFNIRVKEVTDNNGVKTITNNLTSTVQVFTDSDYQLPYVLGSAHEGCLPPFPADVFMIPQYGYLTLNDGSQAVGRSSFYCLEYFPSQMLRTGNNFQFSYEFENVPFHSSYAHSQSLDRLMNPLIDQYLYYLSKTINGSGQNQQTLKFSVAGPSNMAVQGRNYIPGPSYRQQRVSTTVTRNNNSEFAWPGASSWALNGRNSLMNPGPAMASHKEGEDRFFPLSGSLIFGKQGTGRDNVDADKVMITNEEEIKTTNPVATESYGQVATNHQSAQAQAQTGWVQNQGILPGMVWQDRDVYLQGPIWAKIPHTDGNFHPSPLMGGFGVKHPPPQILIKNTPVPADPPTAFNKDKLNSFITQYSTGQVSVEIEWELQKENSKRWNPEIQYTSNYYKSNNVEFAVNTEGVYSEPRPIGTRYLTRNL

SEQ ID NO: 730 - protein, 736 aa, Artificial Sequence
  Description of Artificial Sequence: Synthetic polypeptide
MAADGYLPDWLEDNLSEGIREWWALKPGAPQPKANQQHQDNARGLVLPGYKYLGPGNGLDKGEPVNAADAAALEHDKAYDQQLKAGDNPYLKYNHADAEFQERLKEDTSFGGNLGRAVFQAKKRLLEPLGLVEEAAKTAPGKKRPVEQSPQEPDSSAGIGKSGAQPAKKRLNFGQTGDTEPVPDPQPIGEPPAAPSGVGSLTMASGGGAPVADNNEGADGVGSSSGNWHCDSQWLGDRVITTSTRTWALPTYNNHLYKQISNSTSGGSSNDNAYFGYSTPWGYFDFNRFHCHFSPRDWQRLINNNWGFRPKRLNFKLFNIQVKEVTDNNGVKTIANNLTSTVQVFTDSDYQLPYVLGSAHEGCLPPFPAGVFMIPQYGYLTLNDGSQAVGRSSFYCLEYFPSQMLRTGNNFQFSYEFENVPFHSSYAHSQSLDRLMNPLIDQYLYYLSKTINGSGQNQQTLKFSVAGPSNMAVQGRNYIPGPSYRQQRVSTTATQNNNSEFAWPGASSWALNGRNSLMNPGPAMASHKEGEDRFFPLSGSLIFGKQGTGRDNVDADKVMITNEEEIKTTNPVATESYGQVATNHQSAQAQAQTGWVQNQGILPGMVWQDRDVYLQGPIWAKIPHTDGNFHPSPLMGGFGMKHPPPQILIKNTPVPADPPTAFNKDKLNSFITQYSTGQVSVEIEWELQKENSKRWNPEIQYTSNYYKSNNVEFAVNTEGVYSEPRPIGTRYLTRNL

SEQ ID NO: 731 - protein, 736 aa, Artificial Sequence
  Description of Artificial Sequence: Synthetic polypeptide
MAADGYLPDWLEDNLSEGIREWWALKPGAPQPKANQQHQDNARGLVLPGYKYLGPGNGLDKGEPVNAADAAALEHDKAYDQQLKAGDNPYLKYNHADAGFQERLKEDTSFGGNLGRAVFQAKKRLLEPLGLVEEAAKTAPGKKRPVEQSPQEPDSSAGIGKSGAQPAKKRLNFGQTGDTESVPVPQPIGEPPAAPSGVGSLTMASGGGAPVADNNEGADGVGSSSGNWHCDSQWLGDRVITTSTRTWALPTYNNHLYKQISNSTSGGSSNDNAYFGYSTPWGYFDFNRFHCHFSPRDWQRLINNNWGFRPKRLNFKLFNIQVKEVTDNNGVKTIANNLTSTVQVFTDSDYQLPYVLGSAHEGCLPPFPADVFMIPQYGYLTLNDGSQAVGRSSFYCLEYFPSQMLRTGNNFQFSYEFENVPFHSSYAHSQSLDRLMNPLIDQYLYYLSKTINGSGQNQQTLKFSVAGPSNMAVQGRNYIPGPSYRQQRVSTTVTQNNNSEFAWPGASSWALNGRNSLMNPGPAMASHKEGEDRFFPLSGSLIFGKQGAGRDNVDADKVMITNEEEIKTTNPVATESYGQVATNHQSAQAQAQTGWVQNQGILPGMVWQDRDVYLQGPIWAKIPHTDGNFHPSPLMGGFGMKHPPPQILIKNTPVPADPPTAFNKDKLNSFITQYSTGQVSVEIEWELQKENSKRWNPEIQYTSNYYKSNNVEFAVNTEGVYSEPRPIGTRYLTRNL

SEQ ID NO: 732 - protein, 736 aa, Artificial Sequence
  Description of Artificial Sequence: Synthetic polypeptide
  MOD_RES (126)..(126): Any amino acid
MAADGYLPDWLEDNLSEGIRERWALKPGAPQPKANQQHQDNARGLVLPGYKYLGPGNGLDKGEPVNAADAAALEHDKAYDQQLKAGDNPYLKYNHADAEFQERLKEDTSFGGNLGRAVFQAKKRLXEPLGLVEEAAKTAPGKKRPVEQSPQEPDSSAGIGKSGAQPAKKRLNFGQTGDTESVPDPQPIGEPPAAPSGVGSLTMASGGGAPVADNNEGADGVGSSSGNWHCDSQWLGDRVITTSTRTWALPTYNNHLYKQISNSTSGGSSNDNAYFGYSTPWGYFDFNRFHCHFSPRDWQRLINNNWGFRPKRLNFKLFNIQVKEVTDNNGVKTIANNLTSTVQVFTDSDYQLPYVLGSAHEGCLPPFPADVFMIPQYGYLTLNDGSQAVGRSSFYCLEYFPSQMLRTGNNFQFSYEFENVPFHSSYAHSQSPDRLMNPLIDQYLYYLSKTINGSGQNQQTLKFSVAGPSNMAVQGRNYIPGPSYRQQRVSTTVTQNNNSEFAWPGASSWALNGRNSLMNPGPAMASHKEGEDRFFPLSGSLIFGKQGTGRDNVDADKVMITNEEEIKTTNPVATESYGQVATNHQSAQAQAQTGWVQNQGILPGMVWQDRDVYLQGPIWAKIPHTDGNFHPSPLMGGFGVKHPPPQILIKNTPVPADPPTAFNKDKLNSFITQYSTGQVSVEIEWELQKENSKRWNPEIQYTSNYYKSNNVEFAVNTEGVYSEPRPIGTRYLTRNL

SEQ ID NO: 733 - protein, 736 aa, Artificial Sequence
  Description of Artificial Sequence: Synthetic polypeptide
MAADGYLPDWLEDNLSEGIREWWALKPGAPQPKANQQHQDNARGLVLPGYKYLGPGNGLDKGEPVNAADAAALEHDKAYDQQLKAGDNPYLKYNHADAEFQERLKEDTSFGGNLGRAVFQAKKRLLEPLGLVEEAAKTAPGKKRPVEQSPQEPDSSAGIGKSGAQPAKKRLNFGQTGDTESVPDPQPIGEPPAAPSGVGSLTMASGGGAPVADNNEGADGVGSSSGNWHCDSQWLGDRVITTSTRTWALPTYNNHLYKQISNSTSGGSSNDNAYLGYSTPWGYFDFNRFHCHFSPRDWQRLINNNWGFRPKRLNFKLFNIQVKEVTDNNGVKTIANNLTSTVQVFTDSDYQLPYVLGSAHEGCLPPFPADVFMIPQYGYLTLNDGSQAVGRSSFYCLEYFPSQMLRTGNNFQFSYEFENVPFHSSYAHSQSLDRLMNPLIDQYLYYLSKTINGSGQNQQTLKFSVAGPSNMAVQGRNYIPGPSYRQQRVSTTVTQNNNSEFAWPGASSWALNGRNSLMNPGPAMASHKEGEDRFFPLSGSLIFGKQGTGRDNVDADKVMITNEEEIKTTNPVATESYGQVATNHQSAQAQAQTGWVQNQGILPGMVWQDRDVYLQGPIWAKIPHTDGNFHPSPLMGGFGMKHPPPQILIKNTPVPADPPTAFNKDKLNSFITQYSTGQVSVEIEWELQKENSKRWNPEIQYTSNYYKSNNVEFAVNTEGVYSEPRPIGTRYLTRNL

SEQ ID NO: 734 - protein, 736 aa, Artificial Sequence
  Description of Artificial Sequence: Synthetic polypeptide
MAADGYLPDWLEDNLSEGIREWWALKPGAPQPKANQQHQDNARGLVLPGYKYLGPGNGLDKGEPVNAADAAALEHDKAYDQQLKAGDNPYLKYNHADAEFQERLKEDTSFGGNLGRAVFQAKKRLLEPLGLVEEAAKTAPGKKRPVEQSPQEPDSSAGIGKSGAQPAKKRLNFGQTGDTESVPDPQPIGEPPAAPSGVGSLTMASGGGAPVADNNEGADGVGSSSGNWHCDSQWLGDRVITTSTRTWALPTYNNHLYKQISNSTSGGSSNDNAYFGYSTPWGYFDFNRFHCHFSPRDWQRLINNNWGFRPKRLNFKLFNIQVKEVTDNNGVKTIANNLTSTVQVFTDSDYQLPYVLGSAHEGCLPPFPADVFMIPQYGYLTLNDGSQAVGRSSFYCLEYFPSQMLRTGNNFQFSYEFENVPFHSSYAHSQSLDRLMNPLIDQYLYYLSKTINGSGQNQQTLKFSVAGPSNMAVQGRNYIPGPSYRQQRVSTTVTQNNNSEFAWPGASSWALNGRNSLMNPGPAMASHKEGEDRFFPLSGSLIFGKQGTGRDNVDADKVMITNEEEIKTTNPVATESYGQVATNHQSAQAQAQTGWVQNQGILPGMVWQDRDVYLQGPIWAKIPHTDGNFHPSPLMGGFGMKHPPPQILIKNTPVPADPPTAFNKDKLDSFITQYSTGQVSVEIEWELQKENSKRWNPVIQYTSNYYKSNNVEFAVNTEGVYSEPRPIGTRYLTRNL

SEQ ID NO: 735 - protein, 736 aa, Artificial Sequence
  Description of Artificial Sequence: Synthetic polypeptide
MAADGYLPDWLEDNLSEGIREWWDLKPGAPKPKANQQKQDDGRGLVLPGYKYLGPFNGLDKGEPVNAADAAALEHDKAYDQQLKAGDNPYLRYNHADAEFQERLQEDTSFGGNLGRAVFQAKKRVLEPLGLVEEGAKTAPGKKRPVEQSPQEPDSSSGIGKTGQQPAKKRLNFGQTGDSESVPDPQPLGEPPATPAAVGPTTMASGGGAPMADNNEGVDGVGNASGNWHCDSTWLGDRVITTSTRTWALPTYNNHLYKQISSASTGASNDNHYFGYSTPWGYFDFNRFHCHFSPRDWQRLINNNWGFRPKRLNFKLFNIQVKEVTTNDGVTTIANNLTSTVQVFSDSEYQLPYVLGSAHQGCLPPFPADVFMIPQYGYLTLNNGSQAVGRSSFYCLEYFPSQMLRTGNNFTFSYTFEEVPFHSSYAHSQSLDRLMNPLIDQYLYYLNRTQNQSGSAQNKDLLFSRGSPAGMSVQPKNWLPGPCYRQQRVSKTKTDNNNSNFTWTGASKYNLNGRESIINPGTAMASHKDDEDKFFPMSGVMIFGKESAGASNTALDNVMITDEEEIKATNPVATERFGTVAVNFQSSSTDPATGDVHAMGALPGMVWQDRDVYLQGPIWAKIPHTDGHFHPSPLMGGFGLKNPPPQILIKNTPVPANPPAEFSATKLASFITQYSTGQVSVEIEWELQKENSKRWNPEVQYTSNYAKSANVDFTVDNNGLYTEPRPIGTRYLTRPL

SEQ ID NO: 736 - protein, 736 aa, Artificial Sequence
  Description of Artificial Sequence: Synthetic polypeptide
MAADGYLPDWLEDNLSEGIREWWDLKPGAPKPKANQQKQDDGRGLVLPGYKYLGPFNGLDKGEPVNAADAAALEHDKAYDQQLKAGDNPYLRYNHADAEFQERLQEDTSFGGNLGRAVFQAKKRVLEPLGLVEEGAKTAPGKRRPVEQSPQEPDSSSGIGKTGQQPAKKRLNFGQTGDSESVPDPQPLGEPPATPAAVGPTTMASGGGAPMADNNEGADGVGNASGNWHCDSTWLGDRVITTSTRTWALPTYNNHLYKQISSASTGASNDNHYFGYSTPWGYFDFNRFHCHFSPRDWQRLINNNWGFRPKRLNFKLFNIQVKEVTTNDGVTTIANNLTSTVQVFSDSEYQLPYVLGSAHQGCLPPFPADVFMIPQYGYLTLNNGSQAVGRSSFYCLEYFPSQMLRTGNNFTFSYTFEEVPFHSSYAHSQSLDRLMNPLIDQYLYYLNRTQNQSGSAQNKDLLFSRGSPAGMSVQPKNWLPGPCYRQQRVSKTKTDNNNSNFTWTGASKYNLNGRESIINPGTAMASHKDDEDKFFPMSGVMIFGKESAGASNTALDNVMITDEEEIKATNPVATERFGTVAVNFQSSSTDPATGDVHAMGALPGMVWQDRDVYLQGPIWAKIPHTDGHFHPSPLMGGFGLKNPPPQILIKNTPVPANPPAEFSATKFASFITQYSTGQVSVEIEWELQKENSKRWNPEVQYTSNYAKSANVDFTVDNNGLYTEPRPIGTRYLTRPL

SEQ ID NO: 737 - protein, 736 aa, Artificial Sequence
  Description of Artificial Sequence: Synthetic polypeptide
MAADGYLPDWLEDNLSEGIREWWDLKPGAPKPKANQQKQDDGRGLVLPGYKYLGPFNGLDKGEPVNAADAAALEHDKAYDQQLKAGDNPYPRYNHADAEFQERLQEDTSFGGNLGRAVFQAKKRVLEPLGLVGEGAKTAPGKKRPVEQSPQEPDSSSGIGKTGQQPAKKRLNFGQTGDSESVPDPQPLGEPPATPAAVGPTTMASGGGAPMADNNEGADGVGNASGNWHCDSTWLGDRVITTSTRTWALPTYNNHLYKQISSASTGASNDNHYFGYSTPWGYFDFNRFHCHFSPRDWQRLINNNWGFRPKRLNFKLFNIQVKEVTTNDGVTTIANNLTSTVQVFSDSEYQLPYVLGSAHQGCLPPFPADVFMIPQYGYLTLNNGSQAVGRSSFYCLEYFPSQMLRTGNNFTFSYTFEEVPFHSSYAHSQSLDRLMNPPIDQYLYYLNRTQNQSGSAQNKDLLFSRGSPAGMSVQPKNWLPGPCYRQQRVSKTKTDNNNSNFTWTGASKYNLNGRESIINPGTAMASHKDDEDKFFPMSGVMIFGKESAGASNTALDNVMITDEEEIKATNPVATERFGTVAVNFQSSSTDPATGDVHAMGALPGMVWQDRDVYLQGPIWAKIPHTDGHFHPSPLMGGFGLKNPPPQILIKNTPVPANPPAEFSATKFASFITQYSTGQVSVEIEWELQKENSKRWNPEVQYTSNYAKSANVDFTVDNNGLYTEPRPIGTRYLTRPL

SEQ ID NO: 738 - protein, 736 aa, Artificial Sequence
  Description of Artificial Sequence: Synthetic polypeptide
MAADGYLPDWLEDNLSEGIREWWDLKPGAPKPKANQQKQDDGRGLVLPGYKYLGPFNGLDKGEPVNAADAAALEHDKAYDQQLKAGDNPYLRYNHADAEFQERLQEDTSFGGNLGRAVFQAKKRVLEPLGLVEEGAKTAPGKKRPVEQSPQEPDSSSGIGKTGQQPAKKRLNFGQTGDSESVPDPRPLGEPPATPAAVGPTTMASGGGAPMADNNEGADGVGNASGNWHCDSTWLGDRVITTSTRTWALPTYNNHLYKQISSASTGASNDNHYFGYSTPWGYFDFNRFHCHFSPRDWQRLINNNWGFRPKRLNFKLFNIQVKEVTTNDGVTTIANNLTSTVQVFSDSEYQLPYVLGSAHQGCLPPFPADVFMIPQYGYLTLNNGSQAVGRSSFYCLEYFPSQMLRTGNNFTFSYTFEEVPFHSSYAHSQSLDRLMNPLIDQYLYYLNRTQNQSGSAQNKDLLFSRGPPAGMSVQPKNWLPGPCYRQQRVSKTKTDNNNSNFTWTGASKYNLNGRESIINPGTAMASHKDDEDKFFPMSGVMIFGKESAGASNTALDNVMITDEEEIKATNPVATERFGTVAVNFQSSSTDPATGDVHAMGALPGMVWQDRDVYLQGPIWAKIPHTDGHFHPSPLMGGFGLKNPPPQILIKNTPVPANPPAEFSATKFASFITQYSTGQVSVEIEWELQKENSKRWNPEVQYTSNYAKSANVDFTVDNNGLYTEPRPIGTRYLTRPL

SEQ ID NO: 739 - protein, 736 aa, Artificial Sequence
  Description of Artificial Sequence: Synthetic polypeptide
MAADGYLPDWLEDNLSEGIREWWDLKPGAPKPKANQQKQDDGRGLVLPGYKYLGPFNGLDKGEPVNAADAAALEHDKAYDQQLKAGDNPYLRYNHADAEFQERLQEDTSFGGNLGRAVFQAKKRVLEPLGLVEEGAKTAPGKKRPVEQSPQEPDSSSGIGKTGQQPAKKRLNFGQTGGSESVPDPQPLGEPPATPAAVGPTTMASGGGAPMADNNEGADGVGNASGNWHCDSTWLGDRVITTSTRTWALPTYNNHLYKQISSASTGASNDNHYFGYSTPWGYFDFNRFHCHFSPRDWQRLINNNWGFRPKRLNFKLFNIQVKEVTTNDGVTTIANNLTSTVQVFSDSEYQLPYVLGSAHQGCLPPFPADVFMIPQYGYLTLNNGSQAVGRSSFYCLEYFPSQMLRTGNNFTFSYTFEEVPFHSSYAHSQSLDRLMNPPIDQYLYYLNRTQNQSGSAQNKDLLFSRGSPAGMSVQPKNWLPGPCYRQQRVSKTKTDNNNSNFTWTGASKYNLNGRESIINPGTAMASHKDDEDKFFPMSGVMIFGKESAGASNTALDNVMITDEEEIKATNPVATERFGTVAVNFQSSSTDPATGDVHAMGALPGMVWQDRDVYLQGPIWAKIPHTDGHFHPSPLMGGFGLKNPPPQILIKNTPVPANPPAEFSATKFASFITQYSTGQVSVEIEWELQKENSKRWNPEVQYTSNYAKSANVDFTVDNNGLYTEPRPIGTRYLTRPL

SEQ ID NO: 740 - protein, 736 aa, Artificial Sequence
  Description of Artificial Sequence: Synthetic polypeptide
MAADGYLPDWLEDNLSEGIREWWDLKPGAPKPKANQQKQDDGRGLVLPGYKYLGPFNGLDKGEPVNAADAAALEHDKAYDQQLKAGDNPYLRYNHADAEFQERLQEDTSFGGNLGRAVFQAKKRVLEPLGLVEEGAKTAPGKKRPVEQSPQEPDSSSGIGKTGQQPAKKRLNFGQTGDSESVPDPQPLGEPPATPAAVGPTTMASGGGAPMADNNEGADGVGNASGNWHCDSTWLGDRVITTSTRTWALPTYNNHLYKQISSASTGASNDNHYFGYSTPWGYFDFNRFHCHFSPRDWQRLINNNWGFRPKRLNFKLFNIQVKEVTTNDGVTTIANNLTSTVQVFSDSEYQLPYVLGSAHQGCLPPFPADVFMIPQYGYLTLNNGSQAVGRSSFYCLEYFPSQMLRTGNNFTFSYTFEEVPFHSSYAHSQSLDRLMNPLIDQYLYYLNRTQNQSGSAQNKDLLFSRGSPAGMSVQPKNWLPGPCYRQQRVSKTKTDNNNSNFTWTGASKYNLNGRESIINPGTAVASHKDDEDKFFPMSGVMIFGKESAGASNTALDNVMITDEEEIKATNPVATERFGTVAVNFQSSSTDPATGDVHAMGALPGMVWQDRDVYLQGPIWAKIPHTDGHFHPSPLMGGFGLKNPPPQILIKNTPVPANPPAEFSATKFASFITQYSTGQVSVEIEWELQKENSKRWNPEVQYTSNYAKSANVDFTVDNNGLYTEPRPIGTRYLTRPL

SEQ ID NO: 741 - protein, 736 aa, Artificial Sequence
  Description of Artificial Sequence: Synthetic polypeptide
MAADGYLPDWLEDNLSEGIREWWDLKPGAPKPKANQQKQDDGRGLVLPGYKYLGPFNGLDKGEPVNAADAAALEHDKAYDQQLKAGDNPYLRYNHADAEFQERLQEDTSFGGNLGRAVFQAKKRVLEPLGLVEEGAKTAPGKKRPVEQSPQEPDSSSGIGKTGQQPAKKRLNFGQTGDSESVPDPQPLGEPPATPAAVGPTTMASGGGAPMADNNEGADGVGNASGNWHCDSTWLGDRVITTSTRTWALPTYNNHLYKQISSASTGASNDNHYFGYSTPWGYFDFNRFHCHFSPRDWQQLINNNWGFRPKRLNFKLFNIQVKEVTTNDGVTTIANNLTSTVQVFSDSEYQLPYVLGSAHQGCLPPFPADVFMIPQYGYLTLNNGSQAVGRSSFYCLEYFPSQMLRTGNNFTFSYTFEEVPFHSSYAHSQSLDRLMNPLIDQYLYYLNRTQNQSGSAQNKDLLFSRGSPAGMSVQPKNWLPGPCYRQQRVSKTKTDNNNSNFTWTGASKYNLNGRESIINPGTAMASHKDDEDKFFPMSGVMIFGKESAGASNTALDNVMITDEEEIKATNPVATERFGTVAVNFQSTSTDPATGDVHAMGALPGMVWQDRDVYLQGPIWAKIPHTDGHFHPSPLMGGFGLKNPPPQILIKNTPVPANPPAEFSATKFASFITQYSTGQVSVEIEWELQKENSKRWNPEVQYTSNYAKSADVDFTVDNNGLYTEPRPIGTRYLTRPL

SEQ ID NO: 742 - protein, 736 aa, Artificial Sequence
  Description of Artificial Sequence: Synthetic polypeptide
MAADGYLPDWLEDNLSEGIREWWDLKPGAPKPKANQQKQDDGRGLVLPGYKYLGPFNGLDKGEPVNAADAAALEHDKAYDQQLKAGDNPYLRYNHADAEFQERLQEDTSFGGNLGRAVFQAKKRVLEPLGLVEEGAKTAPGKKRPVEQSPQEPDSSSGIGKTGQQPAKKRLNFGQTGDSESVPDPQPLGEPPATPAAVGPTTMASGGGAPMADNNEGADGVGNASGNWHCDSTWLGDRVITTSTRTWALPTYNNHLYKQISSASTGASNDNHYFGYSTPWGYFDFNRFHCHFSPRDWQRLINNNWGFRPKRLNFKLFNIQVKEVTTNDGVTTIANNLTSTVQVFSDSEYQPPYVLGSAHQGCLPPFPADVFMIPQYGHLTLNNGSQAVGRSSFYCLEYFPSQMLRTGNNFTFSYTFEEVPFHSSYAHSQSLDRLTNPLIDQYLYYLNRTQNQSGSAQNKDLLFSRGSPAGMSVQPKNWLPGPCYRQQRVSKTKTDNNNSNFTWTGASKYNLNGRESIINPGTAMASHKDDEDKFFPMSGVMIFGKESAGASNTALDNVMITDEEEIKATNPVATERFGTVAVNFQSSSTDPATGDVHAMGALPGMVWQDRDVYLQGPIWAKIPHTDGHFHPSPLMGGFGLKNPPPQILIKNTPVPANPPAEFSATKFASFITQYSTGQVSVEIEWELQKENSKRWNPEVQYTSNYAKSANVDFTVDNNGLYTEPRPIGTRYLTRPL

SEQ ID NO: 743 - protein, 736 aa, Artificial Sequence
  Description of Artificial Sequence: Synthetic polypeptide
MAADGYLPDWLEDNLSEGIREWWDLKPGAPKPKANQQEQDDGRGLVLPGYKYLGPFNGLDKGEPVNAADAAALEHDKAYDQQLKAGDNPYLRYNHADAEFQERLQEDTSFGGNLGRAVFQAKKRVLEPLGLVEEGAKTAPGKKRPVEQSPQEPDSSSGIGKTGQQPAKKRLNFGQTGDSESVPDPQPLGEPPATPAAVGPTTMASGGGAPMADNNEGADGVGNASGNWHCDSTWLGDRVITTSTRTWALPTYNNHLYKQISSASTGASNDNHYFGYSTPWGYFDFNRFHCHFSPRDWQRLINNNWGFRPKRLNFKLFNIQVKEVTTNDGVTTIANNLTSTVQVFSDSEYQLPYVLGSAHQGCLPPFPADVFMIPQYGYLTLNNGSQAVGRSSFYCLEYFPSQMLRTGNNFTFSYTFEEVPFHSSYAHSQSLDRLMNPLIDQYLYYLNRTQNQSGSAQNKDLLFSRGSPAGMSVQPKNWLPGPCYRQQRVSKTKTDNNNSNFTWTGASKYNLNGRESIINPGTAMASHKDDEDKFFPMSGVMIFGKESAGASNTALDNVMITDEEEIKATNPVATERFGTVAVNFQSSSTDPATGDVHATGTLPGMVWQDRDVYLQGPIWAKIPHTDGHFHPSPLMGGFGLKNPPPQILIKTTPVPANPPAEFSATKFASFITQYSTGQVSVEIEWELQKENSKRWNPEVQYTSNYAKSANVDFTVDDNGLYTEPRPIGTRYLTRPL

SEQ ID NO: 744 - protein, 736 aa, Artificial Sequence
  Description of Artificial Sequence: Synthetic polypeptide
MAADGYLPDWLEDNLSEGIREWWDLKPGAPKPKANQQKQDDGRGLVLPGYKYLGPFNGLDKGEPVNAADAAALEHDKAYDQQLKAGDNPYLRYNHADAEFQERLQEDTSFGGNLGRAVFQAKKRVLEPLGLVEEGAKTAPGKKRPVEQSLQEPDSSSGIGKTGQQPAKKRLNFGQTGDSESVPDPQPLGEPPATPAAVGPTTMASGGGAPMADNNEGADGVGNASGNWHCDSTWLGDRVITTSTRTWALPTYNNHLYKQISSASTGASNDNHYFGYSTPWGYFDFNRFHCHFSPRDWQRLINNNWGFRPKRLNFKLFNIQVKEVTTNDGVTTIANNLTSTVQVFSDSEYQLPYVLGSAHQGCLPPFPADVFMIPQYGYLTLNNGSQAVGRSSFYCLEYFPSQMLRTGNNFTFSYTFEEVPFHSSYAHSQSLDRLMNPLIDQYLYYLNRTQNQSGSAQNKDLLFSRGSPAGMSVQPKNWLPGPCYRQQRVSKTKTDNDNSNFTWTGASKYNLNGRESIINPGTAMASHKDDEDKFFPMSGVMIFGKESAGASNTALDNVMITDEEEIKATNPVATERFGTVAVNFQSSSTDPATGDVHAMGALPGMVWQDRDVYLQGPIWAKIPHTDGHFHPSPLMGGFGLKNPPPQILIKNTPVPANPPAEFSATKFASFITQYSTGQVSVEIEWELQKENSKRWNPEVQYTSNYAKSANVDFTVDNNGLYTEPRPIGTRYLTRPL

SEQ ID NO: 745 - protein, 736 aa, Artificial Sequence
  Description of Artificial Sequence: Synthetic polypeptide
MAADGYLPDWLEDNLSEGIREWWDLKPGAPKPKANQQKQDDGRGLVLPGYKYLGPFNGLDKGEPVNAADAAALEHDKAYDQQLKAGDNPYLRYNHADAEFQERLQEDTSFGGNLGRAVFQAKKRVLEPLGLVEEGAKTAPGKKRPVEQSPQEPDSSSGIGKTGQQPAKKRLNFGQTGDSESVPDPQPLGEPPATPAAVGPTTMASGGGAPMADNNEGADGVGNASGNWHCDSTWLGDRVITTSTRTWALPTYNNHLYKQISSASTGASNDNHYFGYSTPWGYFDFNRFHCHFSPRDWQRLINNNWGFRPKRLNFKLFNIQVKEVTTNDGVTTIANNLTSTVQVFSDSEYQLPYVLGSAHQGCLPPFPADVFMIPQYGYLTLNNGSQAVGRSSFYCLEYFPSQMLRTGNNFTFSYTFEEAPFHSSYAHSQSLDRLMNPLIDQYLYYLNRTQNQSGSAQNKDLLFSRGSPAGMSVQPKNWLPGPCYRQQRVSKTKTDNNNSNFTWTGASKYNLNGRESIINPGTAMASHKDDEDKFFPMSGVMIFGKESAGASNTALDNVMITDEEEIKATNPVATERFGTVAVNFQSSSTDPATGDVHAMGALPGMVWQDRDVYLQGPIWAKIPHTDGHFHPSPLMGGFGLKNPPPQILIKNTPVPANPPAEFSATKFASFITQYSTGQVSVEIEWELQKENSKRWNPEVQYTSNYAKSANVDFTVDNNGLYTEPRPVGTRYLTRPL

SEQ ID NO: 746 - protein, 736 aa, Artificial Sequence
  Description of Artificial Sequence: Synthetic polypeptide
MAADGYLPDWLEDNLSEGIREWWDLKPGAPKPKANQQKQDDGRGLVLPGYKYLGPFNGLDKGEPVNAADAAALEHDKAYDQQLKAGDNPYLRYNHADAEFQERLQENTSFGGNLGRAVFQAKKRVLEPLGLVEEGAKTAPGKKRPVEQSPQEPDSSSGIGKTGQQPAKKRLNFGQTGDSESVPDPQPLGEPPATPAAVGPTTMASGGGAPMADNNEGADGVGNASGNWHCDSTWLGDRVITTSTRTWALPTYNNHLYKQISSASTGASNDNHYFGYSTPWGYFDFNRFHCHFPPRDWQRLINNNWGFRPKRLNFKLFNIQVKEVTSNDGVTTIANNLTSTVQVFSDSEYQLPYVLGSAHQGCLPPFPADVFMIPQYGYLTLNNGSQAVGRSSFYCLEYFPSQMLRTGNNFTFSYTFEEVPFHSSYAHSQSLDRLMNPLIDQYLYYLNRTQNQSGSAQNKDLLFSRGSPAGMSVQPKNWLPGPCYRQQRVSKTKTDNNNSNFTWTGASKYNLNGRESIINPGTAMASHKDDEDKFFPMSGVMIFGKESAGASNTALDNVMITDEEEIKATNPVATERFGTVAVNFQSSSTDPATGDVHAMGALPGMVWQDRDVYLQGPIWAKIPHTDGHFHPSPLMGGFGLKNPPPQILIKNTPVPANPPAEFSATKFASFITQYSTGQVSVEIEWELQKENSKRWNPEVQYTSNYAKSANVDFTVDNNGLYTEPRPIGTRYLTRPL

SEQ ID NO: 747 - protein, 736 aa, Artificial Sequence
  Description of Artificial Sequence: Synthetic polypeptide
MAADGYLPDWLEDNLSEGIREWWDLKPGAPKPKANQQKQDDGRGLVLPGYKYLGPFNGLDKGEPVNAADAAALEHDKAYDQQLKAGDNPYLRYNHADAEFQERLQEDTSFGGNLGRAVFQAKKRVLEPLGLVEEGAKTAPGKKRPVEQSPQEPDSSSGIGKTGQQPAKKRLNFGQTGDSESVPDPQPLGEPPATPAAVGPTTMASGGGAPMADNNEGADGVGNASGNWHCDSTWLGDRVITTSTRTWALPTYNNHLYKQISSASTGASNDNHYFGYSTPWGYFDFNRFHCHFSPRDWQRLINNNWGFRPKRLNFKLFNIQVKEVTTNDGVTTIANNLTSTVQVFSDSEYQLPYVLGSAHQGCLPPFPADVFMIPQYGYLTLNNGSQAVGRSSFYCLEYFPSQMLRTGNNFTFSYTFEEVPFHSSYAHSQSLDRLMNPLIDQYLYYLNRTQNQSGSAQNKDLLFSRGSPAGTSVQPKNWLPGPCYRQQRVSKTKTDNNNSNFTWTGASKYNLNGRESIINPGTAMASHKDDEDKFFPMSGVMIFGKESAGASNTALDNVMITDEEEIKATNPVATERFGTVAVNFQSSSTDPATGDVHAMGALPGMVWQDRDVYLQGPIWAKIPHTDGHFHPSPLMGGFGLKNPPPQILIKNTPVPANPPAEFSATKFASFITQYSTGQVSVEIEWELQKENSKRWNPEVQYTSNYAKSANVDFTVDNNGLYTGPRPIGTRYLTRPL

SEQ ID NO: 748 - protein, 736 aa, Artificial Sequence
  Description of Artificial Sequence: Synthetic polypeptide
MAADGYLPDWLEDNLSEGIREWWDLKPGAPKPKANQQKQDDGRGLVLPGYKYLGPFNGLDKGEPVNAADAAALEHDKAYDQQLKAGDNPYLRYNHADAEFQERLQEDTSFGGNLGRAVFQAKKRVLEPLGLVEEGAKTAPGKKRPVEQSPQEPDSSSGIGKTGQQPAKKRLNFGQTGDSESVPDPQPLGEPPATPAAVGPTTMASGGGAPMADNNEGADGVGNAPGNWHCDSTWLGDRVITTSTRTWALPTYNNHLYKQISSASTGASNDNHYFGYSTPWGYFDFNRFHCHFSPRDWQRLINNNWGFRPKRLNFKLFNIQVKEVTTNDGVTTIANNLTSTVQVFSDSEYQLPYVLGSAHQGCLPPFPADVFMIPQYGYLTLNNGSQAVGRSSFYCLEYFPSQMLRTGNNFTFSYTFEEVPFHSSYAHSQSLDRLMNPLIDQYLYYLNRTQNQSGSAQNKDLLFSRGSPAGMSVQPKNWLPGPCYRQQRVSKTKTDNNNSNFTWTGASKYNLNGRESIINPGTAMASHKDDEDKFFPMSGVMIFGKESAGASNTALDNVMITGEEEIKATNPVATERFGTVAVNFQSSSTDPATGDVHAMGALPGMVWQDRDVYLQGPIWAKIPHTDGHFHPSPLMGGFGLKNPPPQILIKNTPVPANPPAEFSATKFASFITQYSTGQVSVEIEWELQKENSKRWNPEVQYTSNYAKSANVDFTVDNNGLYTEPRPIGTRYLTRPL

SEQ ID NO: 749 - protein, 736 aa, Artificial Sequence
  Description of Artificial Sequence: Synthetic polypeptide
MAADGYLPDWLEDNLSEGIREWWDLKPGAPKPKANQQKQDDGRGLVLPGYKYLGPFNRLDKGEPVNAADAAALEHDKAYDQQLKAGDNPYLRYNHADAEFQERLQEDTSFGGNLGRAVFQAKKRVLEPLGLVEEGAKTAPGRKRPVEQSPQEPDSSSGIGKTGQQPAKKRLNFGQTGDSESVPDPQPLGEPPATPAAVGPTTMASGGGAPMADNNEGADGVGNASGNWHCDSTWLGDRVITTSTRTWALPTYNNHLYKQISSASTGASNDNHYFGYSTPWGYFDFNRFHCHFSPRDWQRLINNNWGFRPKRLNFKLFNIQVKEVTTNDGVTTIANNLTSTVQVFSDSEYQLPYVLGSAHQGCLPPFPADVFMIPQYGYLTLNNGGQAVGRSSFYCLEYFPSQMLRTGNNFTFSYTFEEVPFHSSYAHSQSLDRLMNPLIDQYLYYLNRTQNQSGSAQNKDLLFSRGSPAGMSVQPKNWLPGPCYRQQRVSKTKTDNNNSNFTWTGASKYSLNGRESIINPGTAMASHKDDEDKFFPMGGVMIFGKESAGASNTALDNAMITDEEEIKATNPVATERFGTVAVNFQSSSTDPATGDVHAMGALPGMVWQDRDVYLQGPIWAKIPHTDGHFHPSPLMGGFGLKNPPPQILIKNTPVPANPPAEFSATKFASFITQYSTGQVSVEIEWELQKENSKRWNPEVQYTSNYAKSANVDFTVDNNGLYTEPRPIGTRYLTRPL

SEQ ID NO: 750 - protein, 736 aa, Artificial Sequence
  Description of Artificial Sequence: Synthetic polypeptide
MAADGYLPDWLEDNLSEGIREWWDLKPGAPKPKANQQKQDDGRGLVLPGYKYLGPFNGLDKGEPVNAADAAALEHDKAYDQQLKAGDNPYLRYNHADAEFQERLQEDTSFGGNLGRAVFQAKKRVLEPLGLVEEGAKTAPGKKRPVEQSPQEPDSSSGIGKTGQQPAKKRLNFGQTGDSESVPDPQPLGEPPATPAAVGPTTMASGGGAPMADNNEGADGVGNASGNWHCDSTWLGGRVITTSTRTWALPTYNNHLYKQISSASTGASNDNHYFGYSTPWGYFDFNRFHCHFSPRDWQRLINNNWGFRPKRLNFKLFNIQVKEVTTNDGVTTIANNLTSTVQVFSDSEYQLPYVLGSAHQGCLPPFPADVFMIPQYGYLTLNNGSQAVGRSSFYCLEYFPSQMLRTGNNSTFSYTFEEVPFHSSYAHSQSLDRLMNPLIDQYLYYLNRTQNQSGSAQNKDLLFSRGSPAGMSVQPKNWLPGPCYRQQRVSKTKTDNNNSNFTWTGASKYNLNGRESIINPGTAMASHKDDEDKFFPMSGVMIFGKESAGASNTALDNVMITDEEEIKATNPVATERFGTVAVNFQSSSTDPATGDVHAMGTLPGMVWQDRDVYLQGPIWAKIPHTDGHFHPSPLMGGFGLKNPPPQILIKNTPVPANPPAEFSATKFASFITQYSTGQVSVEIEWELQKENSKRWNPEVQYTSNYAKSANVDFTVDNNGLYTEPRPIGTRYLTRPL

SEQ ID NO: 751 - protein, 736 aa, Artificial Sequence
  Description of Artificial Sequence: Synthetic polypeptide
MAADGYLPDWLEDNLSEGIREWWDLKPGAPKPKANQQKQDDGRGLVLPGYKYLGPFNGLDKGEPVSAADAAALEHDKAYDQQLKAGDNPYLRYNHADAEFQERLQEDTSFGGNLGRAVFQAKKRVLEPLGLVEEGAKTAPGKKRPVEQSPQEPDSSSGIGKTGQQPAKERLNFGQTGDSESVPDPQPLGEPPATPAAVGPTTMASGGGAPMADNNEGADGVGNASGNWHCDSTWLGDRVITTSTRTWALPTYNNHLYKQISSASTGASNDNHYFGYSTPWGYFDFNRFHCHFSPRDWQRLINNNWGFRPKRLNFKLFNIQVKEVTTNDGVTTIANNLTSTVQVFSDSEYQLPYVLGSAHQGCLPPFPADVFMIPQYGYLTLNNGSQAVGRSSFYCLEYFPSQMLRTGNNFTFSYTFEEVPFHSSYAHSQSLDRLMNPLIDQYLYYLNRTQNQSGSAQNKDLLFSRGSPAGMSVQPKNWLPGPCYRQQRVSKTKTDNNNSNFTWTGASKYNLNGRESIINPGTAMASHKDDEDKFFPMSGVMIFGKESAGASNTALDNVMITDEEEIKATNPVATERFGTVAVNFQSSSTDPATGDVHAMGALPGMVWQDRDVYLQGPIWAKIPHTDGHFHPSPLMGGFGLKNPPPQILIKNTPVPANPPAEFSATKFASFITQYSTGQVSVEIEWELQKENSKRWNPEVQYTSNYAKSANVDFTVDNNGLYTEPRPIGTRYLTRPL

SEQ ID NO: 752 - protein, 736 aa, Artificial Sequence
  Description of Artificial Sequence: Synthetic polypeptide
MAADGYLPDWLEDNLSEGIREWWDLKPGAPKPKANQQKQDDGRGLVLPGYKYLGPFNGLDKGEPVNAADAAALEHDKAYDQQLKAGDNPYLRYNHADAEFQERLQEDTSFGGNLGRAVFQAKKRVLEPLGLVEEGAKTAPGKKRPVEQSPQEPDSSSGIGKTGQQPAKKRLNFGQTGDSESVPDPQPLGEPPATPAAVGPTTMASGGGAPMADNNEGADGVGNASGNWHCDSTWLGDRVITTSTRTWALPTYNNHLYKQISSASTGASNDNHYFGYSTPWGYFDFNRFHCHFSPRDWQRLINNNWGFRPKRLNFKLFNIQVKEVTTNDGVTTIANNLTSTVQVFSDSEYQLPYVLGSAHQGCLPPFPADVFMIPQYGYLTLNNGSQAVGRSSFYCLEYFPSQMLRTGNNFTFSYTFEEVPFHSSYAHSQSLDRLMNPLIDQYLYYLNRTQNQSGSAQNKDLLFSRGSPAGMSVQPKNWLPGPCYRQQRVSKTKTDNNNSNFTWTGASKYNLNGRESIINPGTAMASHKDDEDKFFPMSGVMIFGKESAGASNTALDNVMITDEGEIKATNPVATERFGTVAVNFQSSSTDPATGDVHAMGALPGMVWQDRDVYLQGPIWAKIPHTDGHFHPSPLMGGFGLKNPPPQILIKNTPVPANPPAEFSATKFASFITQYSTGQVSVEIEWELQKENSKRWNPEVQYTSNYAKSANVDFTVDNNGLYTEPRPIGTRYLTRPL

SEQ ID NO: 753 - protein, 736 aa, Artificial Sequence
  Description of Artificial Sequence: Synthetic polypeptide
MAADGYLPDWLEDNLSEGIREWWDLKPGAPKPKANQQKQDDGRGLVLPGYKYLGPFNGLDKGEPVNAADAAALEHDKAYDQQLKAGDNPYLRYNHADAEFQERLQEDTSFGGNLGRAVFQAKKRVLEPFGLVEEGAKTAPGKKRPVEQSPQEPDSSSGIGKTGQQPAKKRLNFGQTGDSESVPDPQPLGEPPATPAAVGPTTMASGGGAPMADNNEGADGVGNASGNWHCDSTWLGDRVITTSTRTWALPTYNNHLYKQISSASTGASNDNHYFGYSTPWGYFDFNRFHCHFSPRDWQRLINNNWGFRPKRLNFKLFNIQVKEVTTNDGVTTIANNLTSTVQVFSDSEYQLPYVLGSAHQGCLPPFPADVFMIPQYGYLTLNNGSQAVGRSSFYCPEYFPSQMLRTGNNFTFSYTFEEVPFHSSYAHSQSLDRLMNPLIDQYLYYLNRTQNQSGSAQNKDLLFSRGSPAGMSVQPKNWLPGPCYRQQRVSKTKTDNNNSNFTWTGASKYNLNGRESIINPGTAMASHKDDKDKFFPMSGVMIFGKESAGASNTALDNVMITDEEEIKATNPVATERFGTVAVNFQSSNTDPATGDVHVMGALPGMVWQDRDVYLQGPIWAKIPHTDGHFHPSPLMGGFGLKHPPPQILIKNTPVPANPPAEFSATKFASFITQYSTGQVSVEIEWELQKENSKRWNPEVQYTSNYAKSANVDFTVDNNGLYTEPRPIGTRYLTRPL

SEQ ID NO: 754 - protein, 736 aa, Artificial Sequence
  Description of Artificial Sequence: Synthetic polypeptide
MAADGYLPDWLEDNLSEGIREWWDLKPGAPKPKANQQKQDDGRGLVLPGYKYLGPFNGLDKGEPVNAADAAALEHDKAYDQQLKAGDNPYLRYNHADAEFQERLQEDTSFGGNLGRAVFQAKKRVLEPFGLVEEGAKTAPGKKRPVEQSPQEPDSSSGIGKTGQQPAKKRLNFGQTGDSESVPDPQPLGEPPATPAAVGPTTMASGGGAPMADNNEGADGVGNASGNWHCDSTWLGDRVITTSTRTWALPTYNNHLYKQISSASTGASNDNHYFGYSTPWGYFDFNRFHCHFSPRDWQRLINNNWGFRPKRLNFKLFNIQVKEVTTNDGVTTIANNLTSTVQVFSDSEYQLPYVLGSAHQGCLPPFPADVFMIPQYGYLTLNNGSQAVGRSSFYCLEYFPSQMLRTGNNFTFSYTFEEVPFHSSYAHSQSLDRLMNPLIDQYLYYLNRTQNQSGSAQNKDLLFSRGSPAGMSVQPKNWLPGPCYRQQRVSKTKTDNNNSNFTWTGASKYNLNGRESIINPGTAMASHKDDKDKFFPMSGVMIFGKESAGASNTALDNVMITDEEEIKATNPVATERFGTVAVNFQSSDTDPATGDVHVMGALPGMVWQDRDVYLQGPIWAKIPHTDGHFHPSPLMGGFGLKHPPPQILIKNTPVPANPPAEFSATKFASFITQYSTGQVSVEIEWELQKENSKRWNPEVQYTSNYAKSANVDFTVDNNGLYTEPRPIGTRYLTRPL

SEQ ID NO: 755 - protein, 736 aa, Artificial Sequence
  Description of Artificial Sequence: Synthetic polypeptide
MAADGYLPDWLEDNLSEGIREWWDLKPGAPKPKANQQKQGDGRGLVLPGYKYLGPFNGLDKGEPVNAADAAALEHDKAYDQQLKAGDNPYLRYNHADAEFQERLQEDTSFGGNLGRAVFQAKKRVLEPFGLVEEGAKTAPGKKRPVEQSPQEPDSSSGIGKTGQQPAKKRLNFGQTGDSESVPDPQPLGEPPATPAAVGPTTMASGGGAPMADNNEGADGVGNASGNWHCDSTWLGDRVITTNTRTWALPTYNNHLYKQISSASTGASNDNHYFGYSTPWGYFDFNRFHCHFSPRDWQRLINNNWGFRPKRLNFKLFNIQVKEVTTNDGVTTIANNLTSTVQVFSDSEYQLPYVLGSAHQGCLPPFPADVFMIPQYGYLTLNNGSQAVGRSSFYCLEYFPSQMLRTGNNFTFSYTFEEVPFHSSYGHSQSLDRLMNLLIDQYLYYLNRTQNQSGSAQNKDLLFSRGSPAGMFVQPKNWLPGPCYRQQRVSKTKTDNNNSNFTWTGASKYNLNGRESIINPGTAMASHKDDEDKFFPMSGVMIFGKESAGASNTALDNVMITDEEEIKATNPVATERFGTVAVNFQSSSTDPATGDVHVMGALPGMVWQDRDVYLQGPIWAKIPHTDGHFHPSPLMGGFGLKHPPPQILIKNTPVPANPPAEFSATKFASFITQYSTGQVSVEIEWELQKENSKRWNPEVQYTSNYAKSANVDFTVDNNGLYTEPRPIGTRYLTRPL

SEQ ID NO: 756 - protein, 736 aa, Artificial Sequence
  Description of Artificial Sequence: Synthetic polypeptide
MAADGYLPDWLEDNLSEGIREWWDLKPGAPKPKANQQKQDDGRGLVLPGYKYLGPFNGLDKGEPVNAADAAALEHDKAYDQQLKAGDNPYLRYNHADAEFQERLQEDTSFGGNLGRAVFQAKKRVLEPFGLVEEGAKTAPGKKRPVEQSPQEPDSSSGIGKTGQQPAKKRLNFGQTGDSESVPDPQPLGEPPATPAAVGPTTMASGGGAPMADNNEGADGVGNASGNWHCDSTWLGDRVITTNTRTWALPTYNNHLYKQISSASTGASNDNHYFGYSTPWGYFDFNRFHCHFSPRDWQRLINNNWGFRPKRLNFKLFNIQVKEVTTNDGVTTIANNLTSTVQVFSDSEYQLPYVLGSAHQGCLPPFPADVFMIPQYGYLMLNNGSQAVGRSSFYCLEYFPSQMLRTGNNFTFSYTFEEVPFHSSYAHSQSLDRLMNPLIDQYLYYLNRTQNQSGSAQNKDLLFSRGSPAGMSVQPKNWLPGPCYRQQRVSKTKTDNNNSNFTWTGASKYNLNGRESIINPGTAMASHKDDEDKFFPMSGVMIFGKESAGASNTALDNVMITDEEEIKATNPAATERFGTVAVNFQSSSTDPATGDVHVMGALPGMVWQDRDVYLQGPIWAKIPHTDGHFHPSPLMGGFGLKHPPPQILIKNTPVPANPPAEFSATKFASFITQYSTGQVSVEIEWELQKENSKRWNPEVQYTSNYAKSANVDFTVDNNGLYTEPRPIGTRYLTRPL

SEQ ID NO: 757 - protein, 736 aa, Artificial Sequence
  Description of Artificial Sequence: Synthetic polypeptide
MAADGYLPDWLEDNLSEGIREWWDLKPGAPKPKANQQKQDDGRGLVLPGYKYLGPFNGLDKGEPVNAADAAALEHDKAYDQQLKAGDNPYLRYNHADAEFQERLQEDTSFGGNLGRAVFQAKKRVLEPFGLVEEGAKTAPGKKRPVEQSPQEPDSSSGIGKTGQQPAKKRLNFGQTGDSESVPDPQPLGEPPATPAAVGPTTMASGGGAPMADNNEGADGVGNASGNWHCDSTWLGDRVITTSTRTWALPTYNNHLYKQISSASTGASNDNHYFGYSTPWGYFDFNRFHCHFSPRDWQRLINNNWGFRPKRLNFKLFNIQVKEVTTNDGVTTIANNLTSTVQVFSDSEYQLPYVLGSAHQGCLPPFPADVFMIPQYGYLTLNNGSQAVGRSSFYCLEYFPSQMLRTGNNFTFSYTFEEVPFHSSYAHSQSLDRLMNPLIDQYLYYLNRTQNQSGSAQNKDLLFSRGSPAGMSVQPKNWLPGPCYRQQRVSKTKTDNNNSNFTWTGASKYNLNGRESIINPGTAMASHKDDEDKFFPMSGVMIFGKESAGASNTALDNVMITDEEEIKATNPVATERFGTVAVNFQSSSTDPATGDVHVMGALPGMVWQDRDVYLQGPIWAKIPHTDGHFHPSPLMGGFGLKHPPPQILIKNTPVPANPPAEFSATKFASFITQYSTGQVSVEIEWELQKENSKRWNPEVQYTSNYAKSANVDFTVDNNGLYTEPRPIGTRYLTRPL

SEQ ID NO: 758 - protein, 736 aa, Artificial Sequence
  Description of Artificial Sequence: Synthetic polypeptide
  MOD_RES (102)..(102): Any amino acid
MAADGYLPDWLEDNLSEGIREWWDLKPGAPKPKANQQKQDDGRGLVLPGYKYLGPFNGLDKGEPVNAADAAALEHDKAYDQQLKAGDNPYLRYNHADAEFQXRLQEDTSFGGNLGRAVFQAKKRVLEPFGLVEEGAKTAPGKKRPVEQSPQEPDSSSGIGKTGQQPAKKRLNFGQTGDSESVPDPQPLGEPPATPAAVGPTTMASGGGAPMADNNEGADGVGNASGNWHCDSTWLGGRVITTSTRTWALPTYNNHLYKQISSASTGASNDNHYFGHSTPWGYFDFNRFHCHFSPRDWQRLINNNWGFRPKRLNFKLFNIQVKEVTTNDGVTTIANNLTSTVQVFSDSEYQLPYVLGSAHQGCLPPSPADVFMIPQYGYLTLNNGSQAVGRSSFYCLEYFPSQMLRTGNNFTFSYTFEEVPFHSSYAHSQSLDRLMNPLIDQYLYYLNRTQNQSGSAQNKDLLFSRGSPAGMSVQPKNWLPGPCYRQQRVSKTKTDNNNSNFTWTGASKYNLNGRESIINPGTAMASHKDDKDKFFPMSGVMIFGKESAGASNTALDNVMITDEEEIKATNPVATERFGTVAVNFQSSNTDPATGDVHVMGALPGMVWQDRDVYLQGPIWAKIPHTDGHFHPSPLMGGFGLKHPPPQILIKNTPVPANPPAEFSATKFASFITQYSTGQVSVEIEWELQKENSKRWNPEVQYTSNYAKSANVDFTVDNNGLYTEPRPIGTRYLTRPL

SEQ ID NO: 759 - protein, 736 aa, Artificial Sequence
  Description of Artificial Sequence: Synthetic polypeptide
MAADGYFPDWLEDNLSEGIREWWDLKPGAPKPKANQQKQDDGRGLVLPGYKYLGPFNGLDKGEPVNAADAAALEHDKAYDQQLKAGDNPYLRYNHADAEFQERLQEDTSFGGNLGRAVFQAKKRVLEPFGLVEEGAKTAPGKKRPVEQSPQEPDSSSGIGRTGQQPAKKRLNFGQTGDSESVPDPQPLGEPPATPAAVGPTTMASGGGAPMADNNEGADGVGNASGNWHCDSTWLGDRVITTSTRTWALPTYNNHLYKQISSASTGASNDNHYFGYSTPWGYFDFNRFHCHFSPRDWQRLINNNWGFRPKRLNFKLFNIQVKEVTTNDGVTTIANNLTSTVQVFSDSEYQLPYVLGSAHQGCLPPFPADVFMIPQYGYLTLNNGSQAVGRSSFYCLEYFPSQMLRTGNNFTFSYTFEEVPFHSSYAHSQSLDRLMNPLIDQYLYYLNRTQNQSGSAQNKDLLFSRGSPAGMSVQPKNWLPGPCYRQQRVSKTKTDNNNSNFTWTGASKYNLNGRESIINPGTAMASHKDDEDKFFPMSGVMIFGKESAGASNTALDNVMITDEEEIKATNPVATERFGTVAVNFQSSSPDPATGDVHVMGALPGMVWQDRDVYLQGPIWAKIPHTDGHFHPSPLMGGFGLKHPPPQILIKNTPVPANPPAEFSATKFASFITQYSTGQVSVEIEWELQKENSKRWNPEVQYTSNYAKSANVDFTVDNNGLYSEPRPIGTRYLTRPL

SEQ ID NO: 760 - protein, 736 aa, Artificial Sequence
  Description of Artificial Sequence: Synthetic polypeptide
MAADGYLPDWLEDNLSEGIREWWDLKPGAPKPKANQQKQDDGRGLVLPGYKYLGPFNGLDKGEPVNAADAAALEHDKAYDQQLKAGDNPYLRYNHADAEFQERLQEDTSFGGNLGRAVFQAKKRVLEPFGLVEEGAKTAPGKKRPVEQSPQEPDSSSGIGKTGQQPAKKRLNFGQTGDSESVPDPQPLGEPPATPAAVGPTTMASGGGAPMADNNEGADGVGNASGNWHCDSTWLGDRVITTSTRTWALPTYNNHLYKQTSSASTGASNDNHYFGYSTPWGYFDFNRFHCHFSPRDWQRLINNNWGFRPKRLNFKLFNIQVKEVTTNDGVTTIANNLTSTVQVFSDSEYQLPYVLGSAHQGCLPPFPADVFMIPQYGYLTLNNGSQAVGRSSFYCLEYFPSQMLRTGNNFTFSYTFEEVPFHSSYAHSQSLDRLMNPLIDQYLYYLNRTQNQSGSAQNKDLLFSRGSPAGMSVQPKNWLPGPCYRQQRVSKTKTDYNNSNFTWTGASKYNLNGRESIINPGTAMASHKDDEDKFFPMSGVMIFGKESAGASNTALDNVMITDEEEIKATNPVATERFGTVAVNFQSSSTDPATGDVHVMGALPGMVWQDRDVYLQGPIWAKIPHTDGHFHPSPLMGGFGLKHPPPQILIKNTPVPANPPAEFSATKFASFITQYSTGQVSVEIEWELQKENSKRWNPEVQYTSNYAKSANVDFTVDNNGLYTEPRPIGTRYLTRPL

SEQ ID NO: 761 - protein, 736 aa, Artificial Sequence
  Description of Artificial Sequence: Synthetic polypeptide
MAADGYPPDWLEDNLSEGIREWWDLKPGVPKPKANQQKQDDGRGLVLPGYKYLGPFNGLDKGEPVNAADAAALEHDKAYDQQLKAGDNPYLRYNHADAEFQERLQEDTSFGGNLGRAVFQAKKRVLEPFGLVEEGAKTAPGKKRPVEQSPQEPDSSSGIGKTGQQPAKKRLNFGQTGDSESVPDPQPLGEPPATPAAVGPTTMASGGGAPMADNNEGADGVGNASGNWHCDSTWLGDRVITTSTRTWALPTYNNHLYKQISSASTGASNDNHYFGYSTPWGYFDFNRFHCHFSPRDWQRLINNNWGFRPKRLNFKLFNIQVKEVTTNDGVTTIANNLTSTVQVFSDSEYQLPYVLGSAHQGCLPPFPADVFMIPQYGYLTLNNGSQAVGRSSFYCLEYFPSQMLRTGNNFTFSYTFEEVPFHSSYAHSQSLDRLMNPLIDQYLYYLNRTQNQSGSAQNKDLLFSRGSPAGMSVQPKNWLPGPCYRQQRVSKTKTDNNNSNFTWTGASKYNLNGRESIINPGTAMASHKDDEDKFFPMSGVMIFGKESAGASNTALDNVMITDEEEIKATNPVATERFGTVAVNFQSSSTDPATGDVHVMGALPGMVWQDRDVYLQGPIWAKIPHTDGHFHPSPLMGGFGLKHPPPQILIKNTPVPANPPAEFSATKFASFITQYSTGQVSVEIEWELQKENSKRWNPEVQYTSNYAKSANVDFTVDNNGLYTEPRPIGTRYLTRPL

SEQ ID NO: 762 - protein, 732 aa, Artificial Sequence
  Description of Artificial Sequence: Synthetic polypeptide
MAADGYLPDWLEDNLSEGIREWWDLKPGAPKPKANQQKQDDGRGLVLPGYKYLGPFNGLDKGEPVNAADAAALEHDKAYDQQLKAGDNPYLRYNHADAEFQERLQEDTSFGGNLGRAVFQAKKRVLEPFGLVEEGAKTAPGKKRPVEQSPQEPDSSSGIGKTGQQPAKKRLNFGQTGDSESVPDPQPLGEPPATPAAVGPTTMASGGGAPMADNNEGADGVGNASGNWHCDSTWLGDRVITTSTRTWALPTYNNHLYKQISSASTGASNDNHYFGYSTPWGYFDFNRFHCHFSPRDWQRLINNNWGFRPKRLNFKLFNIQVKEVTTNDGVTTIANNLTSTVQAFSDSEYQLPYVLGSAHQGCLPPFPADVFMIPQYGYLTLNNGSQAVGRSSFYCLEYFPSQMLRTGNNFTFSYTFEEVPFHSSYAHSQSLDRLMNPLIDPYLYYLNRTQNQSGSAQNKDLLFSRGSPAGMSVQPKNWLPGPCYRQQRVSKTKTDNNNSNFTWTGASKYNLNGRESIINPGTAMASHKDDEDKFFPMSGVMIFGKESAGASNTALDNVMITDEEEIKATNPVATERFGTVAVNFQSSSTDPATGDVHVMGALPGMVWQDRDVYLQGPIWAKIPHTDGHFHPSPLMGGFGLKHPPPQILIKNTPVPANPPAEFSATKFASFITQYSTGQVSVEIEWELQKENSKRWNPEVQYTSNYAKSANVDFTVDNNGLYTEPRPIGTRYL

SEQ ID NO: 763 - protein, 736 aa, Artificial Sequence
  Description of Artificial Sequence: Synthetic polypeptide
MAADGYLPDWLEDNLSEGIREWWDLKPGAPKPKANQQKQDDGRGLVLPGYKYLGPFNGLDKGEPVNAADAAALEHDKAYDQQLKAGDNPYLRYNHADAEFQERLQEDTSFGGNLGRAVFQAKKRVLEPFGLVEEGAKTAPGKKRPVEQSPQEPDSSSGIGKTGQQPAKKRLNFGQTGDSESVPDPQPLGEPPATPAAVGPTTMASGGGAPMADNNEGADGVGNASGNWHCDSTWLGDRVITTSTRTWALPTYNNHLYKQISSASTGASNDNHYFGYSTPWGYFDFNRFHCHFSPRDWQRLINNNWGFRPKRLNFKLFNIQVKEVTTNDGVTTIANNLTSTVQVFSDSEYQLPYVLGSAHQGCLPPFPADVFMIPQYGYLTLNNGSQAVGRSSFYCLEYFPSQMLRTGNNFTFSYTFEEVPFHSSYAHSQSLDRLMNPLIDQYLYYLNRTQNQSGSAQNKDLLFSRGSPAGMSVQPKNWLPGPCYRQQRVSKTKTDNNNSNFTWTGASKYNLNGRESIINPGTAMASHKDDEDKFFPMSGVMIFGKESAGASNTALDNVMITDEEEIKATNPVATERFGTVAVNFQSSSTDPATGDVHVMGALPGMVWQDRDVYLQGPIWAKIPHTDGHSHPSPLMGGFGLKHPPPQILIKNTPVPANPPAEFSATKFASFITQYSTGQVSVEIEWELQKENSKRWNPEVQYTSNYAKSANVDFTVDNNGLYTEPRPIGTRYLTRPL

SEQ ID NO: 764 - protein, 736 aa, Artificial Sequence
  Description of Artificial Sequence: Synthetic polypeptide
MAADGYLPDWLEDNLSEGIREWWDLKPGAPKPKANQQKQDDGRGLVLPGYKYLGPFNGLDKGEPVNAADAAALEHDKAYDQQLKAGDNPYLRYNHADAEFQERLQEDTSFGGNLGRAVFQAKKRVLEPFGLVEEGAKTAPGKKRPVEQSPQEPDSSSGIGKTGQQPAKKRLNFGQTGDSESVPDPQPLGEPPATPAAVGPTTMASGGGAPMADNNEGADGVGNASGNWHCDSTWLGDRVITTSTRTWALPTYNNHLYKQISSASTGASNDNHYFGYSTPWGYFDFNRFHCHFSPRDWQRLINNNWGFRPKRLNFKLFNIQVKEVTTNDGVTTIANNLTSTVQVFSDSEYQLPYVLGSAHQGCLPPFPADVFMIPQYGYLTLNNGSQAVGRSSFYCLEYFPSQMLRTGNNFTFSYTFEEVPFHSSYAHSQSLDRLMNPLIDLYLYYLNRTQNQSGSAQNKDLLFSRGSPAGMSVQPKNWLPGPCYRQQRVSKTKTDNNNSNFTWTGASKYNLNGRESIINPGTAMASHKDDEDKFFPMSGVMIFGKESAGTSNTALDNVMITDEEEIKATNPVATERFGTVAVNFQSSSTDPATGDVHVMGALPGMVWQDRDVYLQGPIWAKIPHTDGHFHPSPLMGGFGLKHPPPQILIKNTPVPANPPAEFSATKFASFITQYSTGQVSVEIEWELQKENSKRWNPEVQYTSNYAKSANVDFTVDNNGLYTEPRPIGTRYLTRPL

SEQ ID NO: 765 - protein, 736 aa, Artificial Sequence
  Description of Artificial Sequence: Synthetic polypeptide
MAADGYLPDWLEDSLSEGIREWWDLKPGAPKPKANQQKQDDGRGLVLPGYKYLGPFNGLDKGEPVNAADAAALEHDKAYDQQLKAGDNPYLRYNHADAEFQERLQEDTSFGGNLGRAVFQAKKRVLEPFGLVEEGAKTAPGKKRPVEQSPQEPDSSSGIGKTGQQPAKKRLNFGQTGDSESVPDPQPLGEPPATPAAVGPTTMASGGGAPMADNNEGADGVGNASGNWHCDSTWLGDRVITTSTRTWALPTYNNHLYKQISSASTGASNDNHYFGYSTPWGYFDFNRFHCHFSPRDWQRLINNNWGFRPKRLNFKLFNIQVKEVTTNDGVTTIANNLTSTVQVFSDSEYQLPYVLGSAHQGCLPPFPADVFMIPQYGYLTPNNGSQAVGRSSFYCLEYFPSQMLRTGNNFTFSYTFEEVPFHSSYAHSQSLDRLMNPLIDQYQYYLNRTQNQSGSAQNKDLLFSRGSPAGMSVQPKNWLPGPCYRQQRVSKTKTDNNNSNFTWTGASKYNLNGRESIINPGTAMASHKDDEDKFFPMSGVMIFGKESAGASNTALDNVMITDEEEIKATNPVATERFGTVAVNFQSSSTDPATGDVHVMGALPGMVWQDRDVYLQGPIWAKIPHTDGHFHPSPLMGGFGLKHPPPQILIKNTPVPANPPAEFSATKFASFITQYSTGQVSVEIEWELQKENSKRWNPEVQYTSNYAKSANVDFTVDNNGLYTEPRPIGTRYLTRPL

SEQ ID NO: 766 - protein, 736 aa, Artificial Sequence; identical to SEQ ID NO: 757
  Description of Artificial Sequence: Synthetic polypeptide

SEQ ID NO: 767 - protein, 735 aa, Artificial Sequence
  Description of Artificial Sequence: Synthetic polypeptide
MAADGYLPDWLEDTLSEGIRQWWKLKPGPPPPKPAERHKDDSRGLVLPGYKYLGPFNGLDKGEPVNEADAAALEHDKAYDRQLDSGDNPYLKYNHADAEFQERLKEDTSFGGNLGRAVFQAKKRVLEPLGLVEEPVKTAPGKKRPVEHSPVEPDSSSGTGKAGQQPARKRLNFGQTGDADSVPDPQPLGQPPAAPSGLGTNTMATGSGAPMADNNEGADGVGNSSGNWHCDSTWMGDRVITTSTRTWALPTYNNHLYKQISSQSGASNDNHYFGYSTPWGYFDFNRFHCHFSPRDWQRLINNNWGFRPKRLNFKLFNIQVKEVTQNDGTTTIANNLTSTVQVFTDSEYQLPYVLGSAHQGCLPPFPADVFMVPQYGYLTLNNGSQAVGRSSFYCLEYFPSQMLRTGNNFTFSYTFEDVPFHSSYAHSQSLDRLMNPLIDQYLYYLSRTNTPSGTTTQSRLQFSRAGASDIRDQSRNWLPGPCYRQQRVSKTSADNNNSEYSWTGATKYHLNGRDSLVNPGPAMASHKDDEEKFFPQSGVLIFGKQGSEKTNVDIEKVMITDEEEIRTTNPVATEQYGSVSTNLQRGNRQAATADVNTQGVLPGMVWQDRDVYLQGPIWAKIPHTDGHFHPSPLMGGFGLKHPPPQILIKNTPVPANPSTTFSAAKFASFITQYSTGQVSVEIEWELQKENSKRWNPEIQYTSNYNKSVNVDFTVDTNGVYSEPRPIGTRYLTRNL

SEQ ID NO: 768 - DNA, 2211 bp, Artificial Sequence
  Description of Artificial Sequence: Synthetic polynucleotide
atggctgctgacggttatcttccagattggctcgaggacaacctttctgaaggcattcgtgagtggtgggctctgaaacctggagtccctcaacccaaagcgaaccaacaacaccaggacaaccgtcggggtcttgtgcttccgggttacaaatacctcggacccggtaacggactcgacaaaggagagccggtcaacgaggcggacgcggcagccctcgaacacgacaaagcttacgaccagcagctcaaggccggtgacaacccgtacctcaagtacaaccacgccgacgccgagtttcaggagcgtcttcaagaagatacgtcttttgggggcaaccttggcagagcagtcttccaggccaaaaagaggatccttgagcctcttggtctggttgaggaagcagctaaaacggctcctggaaagaagaggcctgtagatcagtctcctcaggaaccggactcatcatctggtgttggcaaatcgggcaaacagcctgccagaaaaagactaaatttcggtcagactggcgactcagagtcagtcccagaccctcaacctctcggagaaccaccagcagcccccacaagtttgggatctaatacaatggcttcaggcggtggcgcaccaatggcagacaataacgagggtgccgatggagtgggtaattcctcaggaaattggcattgcgattcccaatggctgggcgacagagtcatcaccaccagcaccagaacctgggccctgcccacttacaacaaccatctctacaagcaaatctccagccaatcaggagcttcaaacgacaaccactactttggctacagcaccccttgggggtattttgactttaacagattccactgccacttctcaccacgtgactggcagcgactcattaacaacaactggggattccggcccaagaaactcagcttcaagctcttcaacatccaagttaaagaggtcacgcagaacgatggcacgacgactattgccaataaccttaccagcacggttcaagtgtttacggactcggagtatcagctcccgtacgtgctcgggtcggcgcaccaaggctgcctcccgccgtttccagcggacgtcttcatggtccctcagtatggatacctcaccctgaacaacggaagtcaagcggtgggacgctcatccttttactgcccggagtacttcccttcgcagatgctaaggactggaaataacttccaattcagctataccttcgaggatgtaccttttcacagcagctacgctcacagccagagtttggatcgcttgatgaatcctcttattgatcagtatctgtactacctgaacagaacgcaaggaacaacctctggaacaaccaaccaatcacggctgctttttagccaggctgggcctcagtctatgtctttgcaggccagaaattggctacctgggccctgctaccggcaacagagactttcaaagactgctaacgacaacaacaacagtaactttccttggacagcggccagcaaatatcatctcaatggccgcgactcgctggtgaatccaggaccagctatggccagtcacaaggacgatgaagaaaaatttttccctatgcacggcaatctaatatttggcaaagaagggacaacggcaagtaacgcagaattagataatgtaatgattacggatgaagaagagattcgtaccaccaatcctgtggcaacagagcagtatggaactgtggcaaataacttgcagagctcaaatacagctcccacgactagaactgtcaatgatcagggggccttacctggcatggtgtggcaagatcgtgacgtgtaccttcaaggacctatctgggcaaagattcctcacacggatggacactttcatccttctcctctgatgggaggctttggactgaaacatccgcctcctcaaatcatgatcaaaaatactccggtaccggcaaatcctccgacgactttcagcccggccaagtttgcttcatttatcactcagtactccactggacaggtcagcgtggaaattgagtgggagctacagaaagaaaacagcaaacgttggaatccagagattcagtacacttccaactacaacaagtctgttaatgtggactttactgtagacactaatggtgtttatagtgaacctcaccctattggaacccggtatctcacacgaaacttgtaa

SEQ ID NO: 769 - DNA, 2211 bp, Artificial Sequence
  Description of Artificial Sequence: Synthetic polynucleotide
atggctgctgatggttatcttccagattggctcgaggacaacctttctgaaggcattcgtgagtggtgggctctgaaacctggagtccctcaacccaaagcgaaccaacaacaccaggacaaccgtcggggtcttgtgcttccgggttacaaatacctcggacccggtaacggactcgacaaaggagagccggtcaacgaggcggacgcggcagccctcgaacacgacaaagcttacgaccagcagctcaaggccggtgacaacccgtacctcaagtacaaccacgccgacgccgagtttcaggagcgtcttcaagaagatacgtcttttgggggcaaccttggcagagcagtcttccaggccaaaaagaggatccttgagcctcttggtctggttgaggaagcagctaaaacggctcctggaaagaagaggcctgtagatcagtctcctcaggaaccggactcatcatctggtgttggcaaatcgggcaaacagcctgccagaaaaagactaaatttcggtcagactggcgactcagagtcagtcccagaccctcaacctctcggagaaccaccagcagcccccacaagtttgggatctaatacaatggcttcaggcggtggcgcaccaatggcagacaataacgagggtgccgatggagtgggtaattcctcaggaaattggcattgcgattcccaatggctgggcgacagagtcatcaccaccagcaccagaacctgggccctgcccacttacaacaaccatctctacaagcaaatctccagccaatcaggagcttcaaacgacaaccactactttggctacagcaccccttgggggtattttgactttaacagattccactgccacttctcaccacgtgactggcagcgactcattaacaacaactggggattccggcccaagaaactcagcttcaagctcttcaacatccaagttaaagaggtcacgcagaacgatggcacgacgactgttgccaataaccttaccagcacggttcaagtgtttacggactcggagtatcaactcccgtacgtgctcgggtcggcgcaccaaggctgtctcccgccgtttccagcggacgtcttcatggtccctcagtatggatacctcaccctgaacaacggaagtcaagcggtgggacgctcatccttttactgcctggagtacttcccttcgcagatgctaaggactggaaataacttccaattcagctataccttcgaggatgtaccttttcacagcagctacgctcacagccagagtttggatcgcttgatgaatcctcttattgatcagtatctgtactacctgaacagaacgcaaggaacaacctctggaacaaccaaccaatcacggctgctttttagccaggctgggcctcagtctatgtctttgcaggccagaaattggctacctgggccctgctaccggcaacagagactttcaaagactgctaacgacaacaacaacagtaactttccttggacagcggccagcaaatatcatctcaatggccgcgactcgctggtgaatccaggaccagctatggccagtcacaaggacgatgaagaaaaatttttccctatgcacggcaatctaatatttggcaaagaagggacaacggcaagtaacgcagaattagataatgtaatgattacggatgaagaagagattcgtaccaccaatcctgtggcaacagagcagtatggaactgtggcaaataacttgcagagctcaaatacagctcccacgactagaactgtcaatgatcagggggccttacctggcatggtgtggcaagatcgtgacgtgtaccttcaaggacctatctgggcaaagattcctcacacggatggacactttcatccttctcctctgatgggaggctttggactgaaacatccgcctcctcaaatcatgatcaaaaatactccggtaccggcaaatcctccgacgactttcagcccggccaagtttgcttcatttatcactcagtactccactggacaggtcagcgtggaaattgagtgggagctacagaaagaaaacagcaaacgttggaatccagagattcagtacacttccaactacaacaagtctgttaatgtggactttactgtagacactaatggtgtttatagtgaacctcgccctattggaacccggtatctcacacgaaacttgtaa

SEQ ID NO: 770 - DNA, 2211 bp, Artificial Sequence
  Description of Artificial Sequence: Synthetic polynucleotide
atggctgctgacggttatcttccagattggctcgaggacaacctttctgaaggcattcgtgagtggtgggctctgaaacctggagtccctcaacccaaagcgaaccaacaacaccaggacaaccgtcggggtcttgtgcttccgggttacaaatacctcggacccggtaacggactcgacaaaggagagccggtcaacgaggcggacgcggcagccctcgaacacgacaaagcttacgaccagcagctcaaggccggtgacaacccgtacctcaagtacaaccacgccgacgccgagtttcaggagcgtcttcaagaagatacgtcttttgggggcaaccttggcagagcagtcttccaggccaaaaagaggatccttgagcctcttggtctggttgaggaagcagctaaaacggctcctggaaagaagaggcctgtagatcagtctcctcaggaaccggactcatcatctggtgttggcaaatcgggcaaacagcctgccagaaaaagactaaatttcggtcagactggcgactcagagtcagtcccagaccctcaacctctcggagaaccaccagcagcccccacaagtttgggatctaatacaatggcttcaggcggtggcgcaccaatggcagacaataacgagggtgccgatggagtgggtaattcctcaggaaattggcattgcgattcccaatggctgggcgacagagtcatcaccaccagcaccagaacctgggccctgcccacttacaacaaccatctctacaagcaaatctccggccaatcaggagcttcaaacgacaaccactactttggctacagcaccccttgggggtattttgactttaacagattccactgccacttctcaccacgtgactggcagcgactcattaacaacaactggggattccggcccaagaaactcagcttcaagctcttcaacatccaagttaaagaggtcacgcagaacgatggcacgacgactattgccaataaccttaccagcacggttcaagtgtttacggactcggagtatcagctcccgtacgtgctcgggtcggcgcaccaaggctgtctcccgccgtttccagcggacgtcttcatggtccctcagtatggatacctcaccctgaacaacggaagtcaagcggtgggacgctcatccttttactgcctggagtacttcccttcgcagatgctaaggactggaaataacttccaattcagctataccttcgaggatgtaccttttcacagcagctacgctcacagccagagtttggatcgcttgatgaatcctcttattgatcagtatctgtactacctgaacagaacgcaaggaacaacctctggaacaaccaaccaatcacggctgctttttagccaggctgggcctcagtctatgtctttgcaggccagaaattggctacctgggccctgctaccggcaacagagactttcaaagactgctaacggcaacaacaacagtaactttccttggacagcggccagcaaatatcatctcaatggccgcgactcgctggtgaatccaggaccagctatggccagtcacaaggacgatgaagaaaaatttttccctatgcacggcaatctaatatttggcaaagaagggacaacggcaagtaacgcagaattagataatgtaatgattacggatgaagaagagattcgtaccaccaatcctgtggcaacagagcagtgtggaactgtggcaaataacttgcagagctcaaatacagctcccacgactagaactgtcaatgatcagggggccttacctggcatggtgtggcaagatcgtgacgtgtaccttcaaggacctatctgggcaaagattcctcacacggatggacactttcatccttctcctctgatgggaggctttggactgaaacatccgcctcctcaaatcatgatcaaaaatactccggtaccggcaaatcctccgacgactttcagcccggccaagtttgcttcatttatcactcagtactccactggacaggtcagcgtggaaattgagtgggagctacagaaagaaaacagcaaacgttggaatccagagattcagtacacttccaactacaacaagtctgttaatgtggactttactgtagacactaatggtgtttatagtgaacctcgccctattggaacccggtatctcacacgaaacttgtaa

SEQ ID NO: 771 - DNA, 2212 bp, Artificial Sequence
  Description of Artificial Sequence: Synthetic polynucleotide
  modified_base (1283)..(1283): a, t, c, or g
atggctgctgacggttatcttccagattggctcgaggacaacctttctgaaggcattcgtgagtggtgggctctgaaacctggagtccctcaacccaaagcgaaccaacaacaccaggacaaccgtcggggtcttgtgcttccgggttacaaatacctcggaccgggtaacggactcgacaaaggagagccggtcaacgaggcggacgcggcagccctcgaacacgacaaagcttacgaccagcagctcaaggccggtgacaacccgtacctcaagtacaaccacgccgacgccgagtttcaggagcgtcttcaagaagatacgtcttttgggggcaaccttggcagagcagtcttccaggccaaaaagaggatccttgagcctcttggtctggttgagggagcagctaaaacggctcctggaaagaagaggcctgtagatcagtctcctcaggaaccggactcatcatctggtgttggcaaatcgggcaaacagcctgccagaaaaagactaaatttcggtcagactggcgactcagagtcagtcccagaccctcaacctctcggagaaccaccagcagcccccacaagtttgggatctaatacaatggcttcaggcggtggcgcaccaatggcagacaataacgagggtgccgatggagtgggtaattcctcaggaaattggcattgcgattcccaatggctgggcgacagagtcatcaccaccagcaccagaacctgggccctgcccacttacaacagccatctctacaagcaaatctccagccaatcaggagcttcaaacgacaaccactactttggctacagcaccccttgggggtattttgactttaacagattccactgccacttctcaccacgtgactggcagcgactcattaacaacaactggggattccggcccaagaaactcagcttcaagctcttcaacatccaagttaaagaggtcacgcagaacgatggcacgacgactattgccaataaccttaccagcacggtccaagtgtttacggactcggagtatcagctcccgtacgtgctcgggtcggcgcaccaaggctgtctcccgccgtttccagcggacgccttcatggtccctcagtatggatacctcaccctgaacaacggaagtcaagcggtgggacgctcatccttttactgcctggagtacttcccttcgcagatgctaaggactggaaataacttccaattcagctataccttcgaggatgtaccttttcacggcagctacgctcacagccngagtttggatcgcttgatgaatcctcttattgatcagtatctgtactacctgaacagaacgcaaggaacaacctctggaacaaccaaccaatcacggctgctttttagccaggctgggcctcagtctatgtctttgcaggccagaaattggctacctgggccctgctaccggcaacagagacttttcaaagactgctaacgacaacaacaacagtaactttccttggacagcggccagcaaatatcatctcaatggccgcgactcgctggtgaatccaggaccagctatggccagtcacaaggacgatgaagaaaaatttttccctatgcacggcaatctaatatttggcaaagaagggacaacggcaagtaacgcagaattagataatgtaatgattacggatgaagaagagattcgtaccaccaatcctgtggcaacagagcagtatggaactgtggcaaataacttgcagagctcaaatacagctcccacgactagaactgtcaatgatcagggggccttacctggcatggtgtggcaagatcgtgacgtgtaccttcaaggacctatctgggcaaagattcctcacacggatggacactttcatccttctcctctgatgggaggctttggactgaaacatccgcctcctcaaatcatgatcaaaaatactccggtaccggcaaatcctccgacgactttcagcccggccaagtttgcttcatttatcactcagtactccactggacaggtcagcgtggaaattgagtgggagctacagaaagaaaacagcaaacgttggaatccagagattcagtacacttccaactacaacaagtctgttaatgtggactttactgtagacactaatggtgtttatagtgaacctcgccctattggaacccggtatctcacacgaaactcgtaa

SEQ ID NO: 772 - DNA, 2212 bp, Artificial Sequence
  Description of Artificial Sequence: Synthetic polynucleotide
atggctgctgacggttatcttccagattggctcgaggacaacctttctgaaggcattcgtgagtggtgggctctgaaacctggagtccctcaacccaaagcgaaccaacaacaccaggacaaccgtcggggtcttgtgcttccgggttacaaatacctcggacccggtaacggactcgacaaaggagagccggtcaacgaggcggacgcggcagccctcgaacacgacaaagcttacgaccagcagctcaaggccggtgacaacccgtacctcaagtacaaccacgccgacgccgagtttcaggagcgtcttcaagaagatacgtcttttgggggcaaccttggcagagcagtcttccaggccaaaaagaggatccttgagcctcttggtctggttgagggagcagctaaaacggctcctggaaagaagaggcctgtagatcagtctcctcaggaaccggactcatcatctggtgttggcaaatcgggcaaacagcttgccagaaaaagactaaatttcggtcagactggcgactcagagtcagtcccagaccctcaacctctcggagaaccaccagcagcccccacaagtttgggatctaatacaatggcttcaggcggtggcgcaccaatggcagacaataacgagggtgccgatggagtgggtaattcctcaggaaattggcattgcgattcccaatggctgggcgacagagtcatcaccaccagcaccagaacctgggccctgcccacttacaacagccatctctacaagcaaatctccggccaatcaggagcttcaaacgacaaccactactttggctacagcaccccctgggggtattttgactttaacagattccactgccacttctcaccacgtgactggcagcgactcattaacaacaactggggattccggcccaagaaactcagcttcaagctcttcaacatccaagttaaagaggtcacgcagaacgatggcacgacgactattgccaataaccttaccagcacggttcaagtgtttacggactcggagtatcagctcccgtacgtgctcgggtcggcgcaccaaggctgtctcccgccgtttccagcggacgtcttcatggtccctcagtatggatacctcaccctgaacaacggaagtcaagcggtgggacgctcatccttttactgcctggagtacttcccttcgcagatgctaaggactggaaataacttccaattcagctataccttcgaggatgtaccttttcacagcagctacgctcacagccagagtttggatcgcttgatgaatcctcttattgatcagtatctgtactacctgaacagaacgcaaggaacaacctctggaacaaccaaccaatcacggctgctttttagccaggctgggcctcagtctatgtctttgcaggccagaaattggctacctgggccctgctaccggcaacagagactttcaaagactgctaacgacaacaacaacagtaactttccttggacagcggccagcaaatatcatctcaatggccgcgactcgctggtgaatcccaggaccagctatggccagtcacaaggacgatgaagaaaaatttttccctatgcacggcaatctaatatttggcaaagaagggacaacggcaagtaacgcagaattagataatgtaatgattacggatgaagaagagattcgtaccaccaatcctgtggcaacagagcagtatggaactgtggcaaataacttgcagagctcaaatacagctcccacgactagaactgtcaatgatcagggggccttacctggcatggtgtggcaagatcgtgacgtgtaccttcaaggacctatctgggcaaagattcctcacacggatggacactttcatccttctcctctgatgggaggctttggactgaaacatccgcctcctcaaatcatgatcaaaaatactccggtaccggcaaatcctccgacgactttcagcccggccaagtttgcttcatttatcactcagtactccactggacaggtcagcgtggaaattgagtgggagctacagaaagaaaacagcaaacgttggaatccagagattcagtacacttccaactacaacaagtctgttaatgtggactttactgtagacactaatggtgtttatagtgaacctcgccctattggaacccggtatctcacacgaaacttgtaa

SEQ ID NO: 773 - DNA, 2212 bp, Artificial Sequence
  Description of Artificial Sequence: Synthetic polynucleotide
atggctgctgacggttatcttccagattggctcgaggacaacctttctgaaggcattcgtgagtggtgggctctgaaacctggagtccctcaacccaaagcgaaccaacaacaccaggacgaccgtcggggtcttgtgcttccgggttacaaatacctcggacccggtaacggactcgacaaaggagagccggtcaacgaggcggacgcggcagccctcgaacacgacaaagcttacgaccagcagctcaaggccggtgacaacccgtgcctcaagtacaaccacgccgacgccgagtttcaggagcgtcttcaagaagatacgtcttttgggggcaaccttggcagagcagtcttccaggccaaaaagaggatccttgagcctcttggtctggttgaggaagcagctaaaacggctcctggaaagaagaggcctgtagatcagtctcctcaggaaccggactcatcatctggtgttggcaaatcgggcaaacagcctgccagaaaaagactaaatttcggtcagactggcgactcagagtcagtcccagaccctcaacctctcggagaaccaccagcagcccccacaagtttgggatctaatacaatggcttcaggcggtagcgcaccaatggcagacaataacgagggtgccgatggagtgggtaattcctcaggaaattggcattgcgattcccaatggctgggcgacagagtcatcaccaccagcaccagaacctgggccctgcccacttacaacaaccatctctacaagcaaatctccagccaatcaggagcttcaaacgacaaccactactttggctacagcaccccttgggggtattttgactttaacagattccactgccacttctcaccacgtgactggcagcgactcattaacaacaactggggattccggcccaagaaactcagcttcaagctcttcaacatccaagttaaagaggtcacgcagaacgatggcacgacgactattgccaataaccttaccagcacggttcaagtgtttacggactcggagtatcagctcccgtacgtgctcgggtcggcgcaccaaggctgtctcccgccgtttccagcggacgtcttcatggtccctcagtatggatacctcaccctgaacaacggaagtcaagcggtgggacgctcatccttttactgcctggagtacttcccttcgcagatgctaaggactggaaataacttccaattcagctataccttcgaggatgtaccttttcacagcagctacgctcacagccagagtttggatcgcttgatggatcctcttattgatcagtatctgtactacctgaacagaacgcaaggaacaacctctggaacaaccaaccaatcacggctgctttttagccaggctgggcctcagtctatgtctttgcaggccagaaattggctacctgggccctgctaccggcaacagagactttcaaagactgctaacgacaacaacaacagtaactttccttggacagcggccagcaaatatcatctcaatggccgcgactcgctggtgaatccaggaccagctatggccagtcacaaaggacgatgaagaaaaatttttccctatgcacggcaatctaatatttggcaaagaagggacaacggcaagtaacgcagaattagataatgtaatgattacggatgaagaagagattcgtaccaccaatcctgtggcaacagagcagtatggaactgtggcaaataacttgcagagctcaaatacagctcccacgactagaactgtcaatgatcagggggccttacctggcatggtgtggcaagatcgtgacgtgtaccttcaaggacctatctgggcaaagattcctcacacggatggacactttcatccttctcctctgatgggaggctttggactgaaacatccgcctcctcaaatcatgatcaaaaatactccggtaccggcaaatcctccgacgactttcagcccggccaagtttgcttcatttatcactcagtactccactggacaggtcagcgtggaaattgagtgggagctacagaaagaaaacagcaaacgttggaatccagagattcagtacacttccaactacaacaagtctgttaatgtggactttactgtagacactaatggtgtttatagtgaacctcgccctattggaacccggtatctcacacgaaacctgtaa

SEQ ID NO: 774 - DNA, 2211 bp, Artificial Sequence
  Description of Artificial Sequence: Synthetic polynucleotide
atggctgctgacggttatcttccagattggctcgaggacaacctttctgaaggcattcgtgagtggtgggctctgaaacctggagtccctcaacccaaagcgaaccaacaacaccaggacgaccgtcggggtcttgtgcttccgggttacaaatacctcggacccggtaacggactcgacaaaggagagccggtcaacgaggcggacgcggcagccctcgaacacgacaaagcttacgaccagcagctcaaggccggtgacaacccgtacctcaagtacaaccacgccgacgccgagtttcaggagcgtcttcaagaagatacgtcttttgggggcaaccttggcagagcagtcttccaggccaaaaagaggatccttgagcctcttggtctggttgaggaagcagctaaaacggctcctggaaagaagaggcctgtagatcagtctcctcaggaaccggactcatcatctggtgttggcaaatcgggcaaacagcctgccagaaaaagactaaatttcggtcagactggcgactcagagtcagtcccagaccctcaacctctcggagaaccaccagcagcccccacaagtttgggatctaatacaatggcttcaggcggtggcgcaccaatggcagacaataacgagggtgccgatggagtgggtaattcctcaggaaattggcattgcgattcccaatggctgggcaacagagtcatcaccaccagcaccagaacctgggccctgcccacttacaacaaccatctctacaagcaaatctccagccaatcaggagcttcaaacgacaaccactactttggctacagcaccccttgggggtattttgactttaacagattccactgccacttctcaccacgtgactggcagcgactcattaacaacaactggggattccggcccaagaaactcagcttcaagctcttcaacatccaagttaaagaggtcacgcagaacgatggcacgacgactattgccaataaccttaccagcacggttcaagtgtttacggactcggagtatcagctcccgtacgtgctcgggtcggcgcaccaaggctgtctcccgccgtttccagcggacgtcttcatggtccctcagtatggatacctcaccctgaacaacggaagtcaagcggtgggacgctcatccttttactgcctggagtacttcccttcgcagatgctaaggactggaaataacttccaattcagctataccttcgaggatgtaccttttcacagcagctacgctcacagccagagtttggatcgcttgatgaatcctcttattgatcagtatctgtactacctgaacagaacgcaaggaacaacctctggaacaaccaaccaatcacggctgctttttagccaggctgggcctcagtctatgtctttgcaggccagaaattggctacctgggccctgctaccggcaacagagactttcaaagactgctaacgacaacaacaacagtaactttccttggacagcggccagcaaatatcatctcaatggccgcgactcgctggtgaatccaggaccagctatggccagtcacaaggacgatgaagaaaaatttttccctatgcacggcaatctaatatttggcaaagaagggacaacggcaagtaacgcagaattagataatgtaatgattacggatgaagaagagattcgtaccaccaatcctgtggcaacagagcagtatggaactgtggcaaataacttgcagagctcaaatacagctcccacgactagaactgtcaatgatcagggggccttacctggcatggtgtggcaagatcgtgacgtgtaccttcaaggacctatctgggcaaagattcctcacacggatggacactttcatccttctcctctgatgggaggctttggactgaaacatccgcctcctcaaatcatgatcaaaaatactccggtaccggcaaatcctccgacgactttcagcccggccaagtttgcttcatttatcactcagtactccactggacaggtcagcgtggaaattgagtgggagctacagaaagaaaacagcaaacgttggaatccagagattcagtacacttccaactacaacaagtctgttaatgtggactttactgtagacactaatggtgtttatagtgaacctcgccctattggaacccggtatctcacacgaaacttgtaa

SEQ ID NO: 775 - DNA, 2211 bp, Artificial Sequence
  Description of Artificial Sequence: Synthetic polynucleotide
atggctgctgacggttatcttccagattggctcgaggacaacctttctgaaggcattcgtgagtggtgggctctgaaacctggagtccctcaacccaaagcgaaccaacaacaccaggacgaccgtcggggtcttgtgcttccgggttacaaatacctcggacccggtaacggactcgacaaaggagagccggtcaacgaggcggacgcggcagccctcgaacacgacaaagcttacgaccagcagctcaaggccggtgacaacccgtacctcaagtacaaccacgccgacgccgagtttcaggagcgtcttcaagaagatacgtcttttgggggcaaccttggcagagcagtcttccaggccaaaaagaggatccttgagcctcttggtctggttgaggaagcagctaaaacggctcctggaaagaagaggcctgtagatcagtctcctcaggaaccggactcatcatctggtgttggcaaatcgggcaaacagcctgccagaaaaagactaaatttcggtcagactggcgactcagagtcagtcccagaccctcaacctctcggagaaccaccagcagcccccacaagtttgggatctaatacaatggcttcaggcggtggcgcaccaatggcggacaataacgagggtgccgatggagtgggtaattcctcaggaaattggcattgcgattcccaatggctgggcgacagagtcatcaccaccagcaccagaacctgggccctgcccacttacaacaaccatctctacaagcaaatctccagccaatcaggagcttcaaacgacaaccactactttggctacagcaccccttgggggtattttgactttaacagattccactgccacttctcaccacgtgactggcagcgactcattaacaacaactggggattccggcccaagaaactcagcttcaagctcttcaacatccaagttaaagaggtcacgcagaacgatggcacgacgactattgccaataaccttaccagcacggttcaagtgtttacggactcggagtatcagctcccgtacgtgctcgggtcggcgcaccaaggctgtctcccgccgtttccagcggacgtcttcatggtccctcagtatggatacctcaccctgaacaacggaagtcaagcggtgggacgctcatccttttactgcctggagtacttcccttcgcagatgctaaggactggaaataacttccaattcagctataccttcgaggatgtaccttttcacagcagctacgctcacagccagagtttggatcgcttgatgaatcctcttattgatcagtatctgtactacctgaacagaacgcaaggaacaacctctggaacaaccaaccaatcacggctgctttttagccaggctgggcctcagtctatgtctttgcaggccagaaattggctacctgggccctgctaccggcaacagagactttcaaagactgctaacgacaacaacaacagtaactttccttggacagcggccagcaaatatcatctcaatggccgcgactcgctggtgaatccaggaccagctatggccagtcacaaggacgatgaagaaaaatttttccctatgcacggcaatctaatatttggcaaagaagggacaacggcaagtaacgcagaattagataatgtaatgattacggatgaagaagagattcgtaccaccaatcctgtggcaacagtgcagtatggaactgtggcaaataacttgcagagctcaaatacagctcccacgactagaactgtcaatgatcagggggccttacctggcatggtgtggcaagatcgtgacgtgtaccttcaaggacctatctgggcaaagattcctcacacggatggacactttcatccttctcctctgatgggaggctttggactgaaacatccgcctcctcaaatcatgatcaaaaatactccggtaccggcaaatcctccgacgactttcagcccggccaagtttgcttcatttatcactcagtactccactggacaggtcagcgtggaaattgagtgggagctacagaaagaaaacagcaaacgttggaatccagagattcagtacacttccaactacaacaagtctgttaatgtggactttactgtagacactaatggtgtttatagtgaacctcgccctattggaacccggtatctcacacgaaacttgtaa

SEQ ID NO: 776 - DNA, 2211 bp, Artificial Sequence
  Description of Artificial Sequence: Synthetic polynucleotide
atggctgctgacggttatcttccagattggctcgaggacaacctttctgaaggcattcgtgagtggtgggctctgaaacctggagtccctcaacccaaagcgaaccaacaacaccaggacaaccgtcggggtcttgtgcttccgggttacaaatacctcggacccggtaacggactcgacaaaggagagccggtcaacgaggcggacgcggcagccctcgaacacgacaaagcttacgaccagcagctcaaggccggtgacaacccgtacctcaagtacaaccacgccgacgccgagtttcaggagcgtcttcaagaagatacgtcttttgggggcaaccttggcagagcagtcttccaggccaaaaaggggatccttgagcctcttggtctggttgaggaagcagctaaaacggctcctggaaagaagaggcctgtagatcagtctcctcaggaaccggactcatcatctggtgttggcaaatcgggcaaacagcctgccagaaaaagactaaatttcggtcagactggcgactcagagtcagtcccagaccctcaacctctcggagaaccaccagcagcccccacaagtttgggatctaatacaatggcttcaggcggtggcgcaccaatggcagacaataacgagggtgccgatggagtgggtaattcctcaggaaattggcattgcgattcccaatggctgggcgacagagtcatcaccaccagcaccagaacctgggccctgcccacttacaacaaccatctctacaagcaaatctccagccaatcaggagcttcaaacgacaaccactactttggctacagcaccccttgggggtattttgactttaacagattccactgccacttctcaccacgtgactggcagcgactcattaacaacaactggggattccggcccaagaaactcagcttcaagctcttcaacatccaagttaaagaggtcacgcagaacgatggcacgacgactattgccaataaccttaccagcacggttcaagtgtttacggactcggagtatcagctcccgtacgtgttcgggtcggcgcaccaaggctgtctcccgccgtttccagcggacgtcttcatggtccctcagtatggatacctcaccctgaacaacggaagtcaagcggtgggacgctcatccttttactgcctggagtacttcccttcgcagatgctaaggactggaaataacttccaattcagctataccttcgaggatgtaccttttcacagcagctacgctcacagccagagttcggatcgcttgatgaatcctcttattgatcagtatctgtactacctgaacagaacgcaaggaacaacctctggaacaaccaaccaatcacggctgctttttagccaggctgggcctcagtctatgtctttgcaggccagaaattggctacctgggccctgctaccggcaacagagactttcaaagactgctaacgacaacaacaacagtaactttccttgaacagcggccagcaaatatcatctcaatggccgcgactcgctggtgaatccaggaccagctatggccagtcacaaggacgatgaagaaaaatttttccctatgcacggcaatctaatatttggcaaagaagggacaacggcaagtaacgcagaattagataatgtaatgattacggatgaagaagagattcgtaccaccaatcctgtggcaacagagcagtatggaactgtggcaaataacttgcagagctcaaatacagctcccacgactagaactgtcaatgatcagggggccttacctggcatggtgtggcaagatcgtgacgtgtaccttcaaggacctatctgggcaaagattcctcacacggatggacactttcatccttctcctctgatgggaggctttggactgaaacatccgcctcctcaaatcatgatcaaaaatactccggtaccggcaaatcctccgacgactttcagcccggccaagtttgcttcatttatcactcagtactccactggacaggtcagcgtggaaattgagtgggagctacagaaagaaaacagcaaacgttggaatccagagattcagtacacttccaactacaacaagtctgttaatgtggactttactgtagacactaatggtgtttatagtgaacctcgccctattggaacccggtatctcacacgaaacttgtaa

SEQ ID NO: 777 - DNA, 2211 bp, Artificial Sequence
  Description of Artificial Sequence: Synthetic polynucleotide
atggctgctgacggttatcttccagattggctcgaggacaacctttctgaaggcattcgtgagtggtgggctctgaaacctggagtccctcaacccaaagcgaaccaacaacaccaggacaaccgtcggggtcttgtgcttccgggttacaaatacctcggacccggtaacggactcgacgaaggagagccggtcaacgaggcggacgcggcagccctcgaacacgacaaagcttacgaccagcagctcaaggccggtgacaacccgtacctcaagtacaaccacgccgacgccgagtttcaggagcgtcttcaagaagatacgtcttttgggggcaaccttggcagagcagtcttccaggccaaaaagaggatccttgagcctcttggtctggttgagggagcagctaaaacggctcctggaaagaagaggcctgtagatcagtctcctcaggaaccggactcatcatctggtgttggcaaatcgggcaaacagcctgccagaaaaagactaaatttcggtcagactggcgactcagagtcagtcccagaccctcaacctctcggagaaccaccagcagcccccacaagtttgggatctaatacaatggcttcaggcggtggcgcaccaatggcagacaataacgagggtgccgatggagtgggtaattcctcaggaaattggcattgcgattcccaatggctgggcgacagagtcatcaccaccagcaccagaacctgggccctgcccacttacaacagccacctctacaagcaaatctccagccaatcaggagcttcaaacgacaaccactactttggctacagcaccccttgggggtattttgactttaacagattccactgccacttctcaccacgtgactggcagcgactcattaacaacaactggggattccggcccaagaaactcagcttcaagctcttcaacatccaagttaaagaggtcacgcagaacgatggcacgacgactattgccaataaccttaccagcacggttcaagtgtttacggactcggagtatcagctcccgtacgtgctcgggtcggcgcaccaaggctgtctcccgccgtttccagcggacgtcttcatggtccctcagtatggatacctcaccctgaacaacggaagtcaagcggtgggacgctcatccttttactgcctggagtacttcccttcgcagatgctaaggactggaaataacttccaattcagctataccttcgaggatgtaccttttcacagcagctacgctcacagccagagtttggatcgcttgatgaatcctcttattgatcagtatctgtactacctgaacagaacgcaaggaacaacctctggaacaaccaaccaatcacggctgctttttagccaggctgggcctcagtctatgtctttgcaggccagaaattggctacctgggccctgctaccggcaacagagactttcaaagactgctaacgacaacaacaacagtaactttccttggacagcggccagcaaatatcatctcaatggccgcgactcgctggtgaatccaggaccagctatggccagtcacaaggacgatgaagaaaaatttttccctatgcacggcaatctaatatttggcaaagaagggacaacggcaagtaacgcagaattagataatgtaatgattacggatgaagaagagattcgtaccaccaatcctgtggcaacagagcagtatggaactgtggcaaataacttgcagagctcaaatacagctcccacgactagaactgtcaatgatcagggggccttacctggcatggtgtggcaagatcgtgacgtgtaccttcaaggacctatctgggcaaagattcctcacacggatggacactttcatccttctcctctgatgggaggctttggactgaaacatccgcctcctcaaatcatgatcaaaaatactccggtaccggcaaatcctccgacgactttcagcccggccaagtttgcttcatttatcactcagtactccactggacaggtcagcgtggaaattgagtgggagctacagaaagaaaacagcaaacgttggaatccagagattcagtacacttccaactacaacaagtctgttaatgtggactttactgtagacactaatggtgtttatagtgaacctcgccctattggaacccggtatctcacacgaaacttgtaa

SEQ ID NO: 778 - DNA, 2211 bp, Artificial Sequence
  Description of Artificial Sequence: Synthetic polynucleotide
atggctgctgacggttatcttccagattggctcgaggacaacctttctgaaggcattcgtgagtggtgggctctgaaacctggagtccctcaacccaaagcgaaccaacaacaccaggacaaccgtcggggtcttgtgcttccgggttacaaatacctcggacccggtaacggactcgacaaaggagagccggtcaacgaggcggacgcggcagccctcgaacacgacaaagcttacgaccagcagctcaaggccggtgacaacccgtacctcaagtacaaccacgccgacgccgagtttcaggagcgtcttcaagaagatacgtcttttgggggcaaccttggcagagcagtcttccaggccaaaaagaggatccttgagcctcttggtctggttgagggagcagctaaaacggctcctggaaagaagaggcctgtagatcagtctcctcaggaaccggactcatcatctggtgttggcaaatcgggcaaacagcctgccagaaaaagactaaatttcggtcagactggcgactcagagtcagtcccagaccctcaacctctcggagaaccaccagcagcccccacaagtttgggatctaatacaatggcttcaggcggtggcgcaccaatggcagacaataacgagggtgccgatggagtgggtaattcctcaggaaattggcattgcgattcccaatggctgggcgacagagtcatcaccaccagcaccagaacctgggccctgcccacttacaacagccatctctacaagcaaatctccagccaatcaggagcttcaaacgacaaccactactttggctacagcaccccttggggtattttgactttaacagattccactgccacttctcaccacgtgactggcagcgactcattaacaacaactggggattccggcccaagaaactcagcttcaagctcttcaacatccaagttaaagaggtcacgcagaacgatggcacgacgactattgccaataaccttaccagcacggttcaagtgtttacggactcggagtatcagctcccgtacgtgctcgggtcggcgcaccaaggctgtctcccgccgtttccagcggacgccttcatggtccctcagtatggatacctcaccctgaacaacggaagtcaagcggtgggacgctcatccttttactgcctggagtacttcccttcgcagatgctaaggactggaaataacttccaattcagctataccctcgaggatgtaccttttcacagcagctacgctcacagccagagtttggatcgcttgatgaatcctcttattgatcagtatctgtactacctgaacagaacgcaaggaacaacctctggaacaaccaaccaatcacggctgctttttagccaggctgggcctcagtctatgtctttgcaggccagaaattggctacctgggccctgctaccggcaacagagactttcaaagactgctaacgacaacaacaacagtaactttccttggacagcggccagcaaatatcatctcaatggccgcgactcgctggtgaatccaggaccagctatggccagtcacaaaggacgatgaagaaaaatttttccctatgcacggcaatctaatatttggcaaagaagggacaacggcaagtaacgcagaattagatagtgtaatgattacggatgaagaagagattcgtaccaccaatcctgtggcaacagagcagtatggaactgtggcaaataacttgcagagctcaaatacagctcccacgactagaactgtcaatgatcagggggccttacctggcatggtgtggcaagatcgtgacgtgtaccttcaaggacctatctgggcaaagattcctcacacggatggacactttcatccttctcctctgatgggaggctttggactgaaacatccgcctcctcaaatcatgatcaaaaatactccggtaccggcaaatcctccgacgactttcagcccggccaagtttgcttcatttatcactcagtactccactggacaggtcagcgtggaaattgagtgggagctacagaaagaaaacagcaaacgttggaatccagagattcagtacacttccaactacaacaagtctgttaatgtggactttactgtagacactaatggtgtttatagtgaacctcgccctattggaacccggtatctcacacgaaacttgtaa

SEQ ID NO: 779 - DNA, 2205 bp, Artificial Sequence
  Description of Artificial Sequence: Synthetic polynucleotide
atgactgacggttaccttccagattggctagaggacaacctctctgagggcgttcgagagtggtgggcgctgcaacctggagcccctaaacccaaggcaaatcaacaacatcaggacaacgctcggggtcttgtgcttccgggttacaaatacctcggacccggcaacggactcgacaagggggaacccgtcaacgcagcggacgcggcagccctcgagcacgacaaggcctacgaccagcagctcaaggccggtgacaacccctacctcaagtacaaccacgccgacgcggagttccagcagcggcttcagggcgacacatcgtttgggggcaacctcggcagagcagtcttccaggccaaaaagagggttcttgaacctcttggtctggttgagcaagcgggtgagacggctcctggaaagaagagaccgttgattgaatccccccagcagcccgactcctccacgggtatcggcaaaaaaggcaagcagccggctaaaaagaagctcgttttcgaagacgaaactggagcaggcgacggaccccctgagggatcaacttccggagccatgtctgatgacagtgagatgcgtgcagcaactggcggagctgcagtcgagggcggacaaggtgccgatggagtgggtaatgcctcgggtgattggcattgcgattccacctggtctgagggccacgtcacgaccaccagcaccagaacctgggtcttgcccacctacaacaaccacctctacaagcgactcggagagagcctgcagtccaacacctacaacggattctccaccccctggggatactttgacttcaaccgcttccactgccacttctcaccacgtgactggcagcgactcatcaacaacaactggggcatgcgacccaaagccatgcgggtcaaaatcttcaacatccaggtcaaggaggtcacgacgtcgaacggcgagacaacggtggctaataaccttaccagcacggttcagatctttgcggactcgtcgtacgaactgccgtacgtgatggatgcgggtcaagagggcagcctgcctccttttcccaacgacgtctttatggtgccccagtacggctactgtggactggtgaccggcaacacttcgcagcaacagactgacagaaatgccttctactgcctggagtactttccttcgcagatgctgcggactggcaacaactttgaaattacgtacagttttgagaaggtgcctttccactcgatgtacgcgcacagccagagcctggaccggctgatgaaccctctcatcgaccagtacctgtggggactgcaatcgaccaccaccggaaccaccctgaatgccgggactgccaccaccaactttaccaagctgcggcctaccaacctttccaactttaaaaagaactggctgcccgggccttcaatcaagcagcagggcttctcaaagactgccaatcaaaactacaagatccctgccaccgggtcagacagtctcatcaaatacgagacgcacagcactctggacggaagatggagtgccctgacccccggacctccaatggccacggctggacctgcggacagcaagttcagcaacagccagctcatctttgcggggcctaaacagaacggcaacacggccaccgtacccgggactctgatcttcacctctgaggaggagctggcagccaccaacgctaccgatacggacatgtggggcaacctacctggcggtgaccagagcaacagcaacctgccgaccgtggacagactgacagccttgggagccgtgcctggaatggtctggcaaaacagagacatttactaccagggtcccatttgggccaagattcctcataccgatggacactttcacccctcaccgctgattggtgggtttgggctgaaacacccgcctcctcaaatttttatcaagaacaccccggtacctgcgaatcctgcgacgaccttcagctctactccggtaaactccttcattactcagtacagcactggccaggtgtcggtgcagattgactgggagatccagaaggagcggtccaaacgctggaaccccgaggtccagtttacctccaactacggacagcaaaactctctgttgtgggctcccgatgcggctgggaaatacactgagcctagggctatcggtacccgctacctcacccaccacctgtaa

SEQ ID NO: 780 - DNA, 2205 bp, Artificial Sequence
  Description of Artificial Sequence: Synthetic polynucleotide
atgactgacggttaccttccagattggctagaggacaacctctctgaaggcgttcgagagtggtgggcgctgcaacctggagcccctaaacccaaggcaaatcaacaacatcaggacaacgctcggggtcttgtgcttccgggttacaaatacctcggacccggcaacggactcgacaagggggaacccgtcaacgcagcggacgcggcagccctcgagcacgacaaggcctacgaccagcagctcaaggccggtgacaacccctacctcaagtacaaccacgccgacgcggagttccagcagcggcttcagggcgacacatcgtttgggggcaacctcggcagagcagtcttccaggccaaaaagagggttcttgaacctcttggtctggttgagcaagcgggtgagacggctcctggaaagaagagaccgttgattgaatccccccagcagcccgactcctccacgggtatcggcaaaaaaggcaagcagccggctaaaaagaagctcgttttcgaagacgaaactggagcaggcgacggaccccctgagggatcaacttccggagccatgtctgatgacagtgagatgcgtgcagcagctggcggagctgcagtcgagggcggacaaggtgccgatggagtgggtaatgcctcgggtgattggcattgcgattccacctggtctgagggccacgtcacgaccaccagcaccagaacctgggtcttgcccacctacaacaaccacctctacaagcgactcggagagagcctgcagtccaacacctacaacggattctccaccccctggggatactttgacttcaaccgcttccactgccacttcttaccacgtgactggcagcgactcatcaacaacaactggggcgtgcgacccaaagccatgcgggtcaaaatcttcaacatccaggtcaaggaggtcacgacgtcgaacggcgagacaacggtggctaataaccttaccagcacggttcagatctttgcggactcgtcgtacgaactgccgtacgtgatggatgcgggtcaagagggcagcctgcctccttttcccaacgacgtctttatggtgccccagtacggctactgtggactggtgaccggcgacacttcgcagcaacagactgacagaaatgccttctactgcctggagtactttccttcgcagatgctgcggactggcaacaactttgaaattacgtacagttttgagaaggtgcctttccactcgatgtacgcgcacagccagagcctggaccggctgatgaaccctctcatcgaccagtacctgtggggactgcaatcgaccaccaccggaaccaccctgaatgccgggactgccaccaccaactttaccaagctgcggcctaccaacttttccaactttaaaaagaactggctgcccgggccttcaatcaagcagcagggcttctcaaagactgccaatcaaaactacaagatccctgccaccgggtcagacagtctcatcaaatacgagacgcacagcactctggacggaagatggagtgccctgacccccggacctccaatggccacggctggacctgcggacagcaagttcagcaacagccagctcatctttgcggggcctaaacagaacggcaacacggccaccgtacccgggactctgatcttcacctctgaggaggagctggcagccaccaacgccaccgatacggacatgtggggcaacctacctggcggtgaccagagcaacagcaacctgccgaccgtggacagactgacagccttgggagccgtgcctggaatggtctggcaaaacagagacatttactaccagggtcccatttgggccaagattcctcataccgatggacactttcacccctcaccgctgattggtgggtttgggctgaaacacccgcctcctcaaatttttatcaagaacaccccggtacctgcgaatcctgcgacgaccttcagctctactccggtaaactccttcattactcagtacagcactggccaggtgtcggtgcagattgactgggagatccagaaggagcggtccaaacgctggaaccccgaggtccagtttacctccaactacggacagcaaaactctctgttgtgggctcccgatgcggctgggaaatacactgagcctagggctatcggtacccgctacctcacccaccacctgtaa

SEQ ID NO: 781 - DNA, 2205 bp, Artificial Sequence
  Description of Artificial Sequence: Synthetic polynucleotide
atgactgacggttaccttccagattggctagaggacaacctctctgaaggcgttcgagagtggtgggcgctgcaacctggagcccctaaacccaaggcaaatcaacaacatcaggacaacgctcggggtcttgtgcttccgggttacaaatacctcggacccggcaacggactcgacgagggggaacccgtcaacgcagcggacgcggcagccctcgagcacgacaaggcctacgaccagcagctcaaggccggtgacaacccctacctcaagtacaaccacgccgacgcggagttccagcagcggcttcagggcgacacatcgtttgggggcaacctcggcagagcagtcttccaggccaaaaagagggttcttgaacctcttggtctggttgagcaagcgggtgagacggctcctggaaagaagagaccgttgattgaatccccccagcagcccgactcctccacgggtatcggcaaaaaaggcaagcagccggctaaaaagaagctcgttttcgaagacgaaactggagcaggcgacggaccccctgagggatcaacttccggagccatgtctgatgacagtgagatgcgtgcagcagctggcggagctgcagtcgagggcggacaaggtgccgatggagtgggtaatgcctcgggtgattggcattgcgattccacctggtctgagggccacgtcacgaccaccagcaccagaacctgggtcttgcccacctacaacaaccacctctacaagcgactcggagagagcctgcagtccaacacctacaacggattctccaccccctggggatactttgacttcaaccgcttccactgccacttctcaccacgtgactggcagcgactcatcaacaacaactggggcatgcgacccaaagccatgcgggtcaaaatcttcaacatccaggtcaaggaggtcacgacgtcgaacggcgagacaacggtggctaataaccttaccagcacggttcagatctttgcggactcgtcgtacgaactgccgtacgtgatggatgcgggtcaagagggcagcctgcctccttttcccaacgacgtctttatggtgccccagtacggctactgtggactggtgaccggcaacacttcgcagcaacagactgacagaaatgccttctactgcctggagtactttccttcgcagatgctgcggactggcaacaactttgaaattacgtacagttttgagaaggtgcctttccactcgatgtacgcgcacagccagagcctggaccggctgatgaaccctctcatcgaccagtacctgtggggactgcaatcgaccaccaccggaaccaccctgaatgccgggactgccaccaccaactttaccaagctgcggcctaccaacttttccaactttaaaaagaactggctgcccgggccttcaatcaagcagcagggcttctcaaagactgccaatcaaaactacaagatccctgccaccgggtcagacagtctcatcaaatacgagacgcacagcactctggacggaagatggagtgccctgacccccggacctccaatggccacggctggacctgcggacagcaagttcagcaacagccagctcatctttgcggggcctaaacagaacggcaacacggccaccgtacccgggactctgatcttcacctctgaggaggagctggcagccaccaacgctaccgatacggacatgtggggcaacctacctggcggtgaccagagcaacagcaacctgccgaccgtggacagactgacagccttgggagccgtgcctggaatggtctggcaaaacagagacatttactaccagggtcccatttgggccaagattcctcataccgatggacactttcacccctcaccgctgattggtgggtttgggctgaaacacccgcctcctcaaatttttatcaagaacaccccggtacctgcgaatcctgcgacgaccttcagctctactccggtaaactccttcattactcagtacagcactggccaggtgtcggtgcagattgactgggagatccagaaggagcggtccaaacgctggaaccccgaggtccagtttacctccaactacggacagcaaaactctctgttgtgggctcccgatgcggctgggaaatacactgagcctagggctatcggtacccgctacctcacccaccacctgtaa

SEQ ID NO: 782 - DNA, 2205 bp, Artificial Sequence
  Description of Artificial Sequence: Synthetic polynucleotide
atgactgacggttaccttccagattggctagaggacaacctctctgaaggcgttcgagagtggtgggcgctgcaacctggagcccctaaacccaaggcaaatcaacaacatcaggacaacgctcggggtcttgtgcttccgggttacaaatacctcggacccggcaacggactcgacaagggggaacccgtcaacgcagcggacgcggcagccctcgagcacgacaaggcctacgaccagcagctcaaggccggtgacaacccctacctcaagtacaaccacgccgacgcggagttccagcagcggcttcagggcgacacatcgtttgggggcaacctcggcagagcagtcttccaggccaaaaagagggttcttgaacctcttggtctggttgagcaagcgggtgagacggctcctggaaagaagagaccgttgattgaatccccccagcagcccgactcctccacgggtatcggcaaaaaaggcaagcagccggctaaaaagaagctcgttttcgaagacggaactggagcaggcgacggaccccctgagggatcaacttccggagccatgtctgatgacagtgagatgcgtgcagcagctggcggagctgcagtcgagggcggacaaggtgccgatggagtgggtaatgcctcgggtgattggcattgcgattccacctggtctgagggccacgtcacgaccaccagcaccagaacctgggtcttgcccacctacaacaaccacctctacaagcgactcggagagagcctgcagtccaacacctacaacggattccccaccccctggggatactttgacttcaaccgcttccactgccacttctcaccacgtgactggcagcgactcatcaacaacaactggggcatgcgacccaaagccatgcgggtcaaaatcttcaacatccaggtcaaggaggtcacgacgtcgaacggcgagacaacggcggctaataaccttaccagcacggttcagatctttgcggactcgtcgtacgaactgccgtacgtgatggatgcgggtcaagagggcagcctgcctccttttcccaacgacgtctttatggtgccccagtacggctactgtggactggtgaccggcaacacttcgcagcaacagactgacagaaatgccttctactgcctggagtactttccttcgcagatgctgcggactggcaacaactttgaaattacgtacagttttgagaaggtgcctttccactcgatgtacgcgcacagccagagcctggaccggctgatgaaccctctcatcgaccagtacctgtggggactgcaatcgaccaccaccggaaccaccctgaatgccgggactgccaccaccaactttaccaagctgcggcctaccaacttttccaactttaaaaagaactggctgcccgggccttcaatcaagcagcagggcttctcaaagactgccaatcaaaactacaagatccctgccaccgggtcagacagtctcatcaaatacgagacgcacagcactctggacggaagatggagtgccctgacccccggacctccaatggccacggctggacctgcggacagcaagttcagcaacagccagctcatctttgcggggcctaaacagaacggcaacacggccaccgtacccgggactctgatcttcacctctgaggaggagctggcagccaccaacgccaccgatacggacatgtggggcaacctacctggcggtgaccagagcaacagcaacctgccgaccgtggacagactgacagccttgggagccgtgcctggaatggtctggcaaaacagagacatttactaccagggtcccatttgggccaagattcctcataccgatggacactttcacccctcaccgctgattggtgggtttgggctgaaacacccgcctcctcaaatttttatcaagaacaccccggtacctgcgaatcctgcgacgaccttcagctctactccggtaaactccttcattactcagtacagcactggccaggtgtcggtgcagattgactgggagatccagaaggagcggtccaaacgctggaaccccgaggtccagtttacctccaactacggacagcaaaactctctgttgtgggctcccgatgcggctgggaaatacactgagcctagggctatcggtacccgctacctcacccaccacctgtaa

SEQ ID NO: 783 - DNA, 2205 bp, Artificial Sequence
  Description of Artificial Sequence: Synthetic polynucleotide
atgactgacggttaccttccagattggctagaggacaacctctctgaaggcgttcgagagtggtgggcgctgcaacctggagcccctaaacccaaggcaaatcaacaacatcaggacaacgctcggggtcttgtgcttccgggttacaaatacctcggacccggcaacggactcgacaagggggaacccgtcaacgcagcggacgcggcagccctcgagcacgacaaggcctacgaccagcagctcaaggccggtgacaacccctacctcaagtacaaccacgccgacgcggagttccagcagcggcttcagggcgacacatcgtttgggggcaacctcggcagagcagtcttccaggccaaaaagagggttcttgaacctcttggtctggttgagcaagcgggtgagacggctcctggaaagaagagaccgttgattgaatccccccagcagcccgactcctccacgggtatcggcaaaaaaggcaagcagccggctaaaaagaagctcgttttcgaagacgaaactggagcaggcgacggaccccctgagggatcaacttccggagccatgtctgatgacagtgagatgcgtgcagcagctggcggagctgcagtcgagggcggacaaggtgccgatggagtgggtaatgcctcgggtgattggcattgcgattccacctggtctgagggccacgtcacgaccaccagcaccagaacctgggtcttgcccacctacaacaaccacctctacaagcgactcggagagagcctgcagtccaacacctacaacggattctccaccccctggggatactttgacttcaaccgcttccactgccacttctcaccacgtgactggcagcgactcatcaacaacaactggggcatgcgacccaaagccatgcgggtcaaaatcttcaacatccaggtcaaggaggtcacgacgtcgaacggcgagacaacggtggctaataaccttaccagcacggttcagatctttgcggactcgtcgtacgaactgccgtacgtgatggatgcgggtcaagagggcagcctgcctccttttcccaacgacgtctttatggtgccccagtacggctaccgtggactggtgaccggcaacacttcgcagcaacagactgacagaaatgccttctactgcctggagtactttccttcgcagatgctgcggactggcaacaactttgaaattacgtacagttttgagaaggtgcctttccactcgatgtacgcgcacagccagagcctggaccggctgatgaaccctctcatcgaccagtacctgtggggactgcaatcgaccaccaccggaaccaccctgaatgccgggactgccaccaccaactttaccaagctgcggcctaccaacttttccaactttaaaaagaactggctgcccgggccttcaatcaagcagcagggcttctcaaagactgccaatcaaaactacaagatccctgccaccgggtcagacagtctcatcaaatacgagacgcacagcactctggacggaagatggagtgccctgacccccggacctccaatggccacggctggacctgcggacagcaagttcagcaacagccagctcatctttgcggggcctaaacagaacggcaacacggccaccgtacccgggactctgatcttcacctctgaggaggagctggcagccaccaacgccaccgatacggacatgtggggcaacctacctggcggtgaccagagcaacagcaacctgccgaccgtggacagactgacagccttgggagccgtgcctggaatggtctggcaaaacagagacatttactaccagggtcccatttgggccaagattcctcataccgatggacactttcacccctcaccgctgattggtgggtttgggctgaaacacccgcctcctcaaatttttatcaagaacaccccggtacctgcgaatcctgcgacgaccttcagctctactccggtaaactccttcattactcagtacagcactggccaggtgtcggtgcagattgactgggagatccagaaggagcggtccaaacgctggaaccccgaggtccagtttacctccaactacggacagcaaaactctctgttgtgggctcccgatgcggctgggaaatacactgagcctagggctatcggtacccgctacctcacccaccacctgtaa

SEQ ID NO: 784 - DNA, 2205 bp, Artificial Sequence
  Description of Artificial Sequence: Synthetic polynucleotide
atgactgacggttaccttccagattggctagaggacaacctctctgaaggcgttcgagagtggtgggcgctgcaacctggagcccctaaacccaaggcaaatcaacaacatcaggacaacgctcggggtcttgtgcttcagggttacaaatacctcggacccggcaacggactcgacaagggggaacccgtcaacgcagcggacgcggcagccctcgagcacgacaaggcctacgaccagcagctcaaggccggtgacaacccctacctcaagtacaaccacgccgacgcggagttccagcagcggcttcagggcgacacatcgtttgggggcaacctcggcagagcagtcttccaggccaaaaagagggttcttgaaccccttggtctggttgagcaagcgggtgagacggctcctggaaagaagagaccgttgattgaatccccccagcagcccgactcctccacgggtatcggcaaaaaaggcaagcagccggctaaaaagaagctcgttttcgaagacgaaactggagcaggcgacggaccccctgagggatcaacttccggagccatgtctgatgacagtgagatgcgtgcagcagctggcggagctgcagtcgagggcggacaaggtgccgatggagtgggtaatgcctcgggtgattggcattgcgattccacccggtctgagggccacgtcacgaccaccagcaccagaacctgggtcttgcccacctacaacaaccacctctacaagcgactcggagagagcctgcagtccaacacctacaacggattctccaccccctggggatactttgacttcaaccgcttccactgccacttctcaccacgtgactggcagcgactcatcaacaataactggggcatgcgacccaaagccatgcgggtcaaaatcttcaacatccaggtcaaggaggtcacgacgtcgaacggcgagacaacggtggctaataaccttaccagcacggttcagatctttgcggactcgtcgtacgaactgccgtacgtgatggatgcgggtcaagagggcagcctgcctccttttcccaacgacgtctttatggtgccccagtacggctactgtggactggtgaccggcaacacttcgcagcaacagactgacagaaatgccttctactgcctggagtactttccttcgcagatgctgcggactggcaacaactttgaaattacgtacagttttgagaaggtgcctttccactcgatgtacgcgcacagccagagcctggaccggctgatgaaccctctcatcgaccagtacctgtggggactgcaatcgaccaccaccggaaccaccctgaatgccgggactgccaccaccaactttaccaagctgcggcctaccaacttttccaactttaaaaagaactggctgcccgggccttcaatcaagcagcagggcttctcaaagactgccaatcaaaactacaagatccctgccaccgggtcagacagtctcatcaaatacgagacgcacagcactctggacggaagatggagtgcccggacccccggacctccaatggccacggctggacctgcggacagcaagttcagcaacagccagctcatctttgcggggcctaaacagaacggcaacacggccaccgtacccgggactctgatcttcacctctgaggaggagctggcagccaccaacgccaccgatacggacatgtggggcaacctacctggcggtgaccagagcaacagcaacctgccgaccgtggacagactgacagccttgggagccgtgcctggaatggtctggcaaaacagagacatttactaccagggtcccatttgggccaagattcctcataccgatggacactttcacccctcaccgctgattggtgggtttgggctgaaacacccgcctcctcaaatttttatcaagaacaccccggtacctgcgaatcctgcgacgaccttcagctctactccggtaaactccttcattactcagtacagcactggccaggtgtcggtgcagattgactgggagatccagaaggagcggtccaaacgctggaaccccgaggtccagtttacctccaactacggacagcaaaactctctgttgtgggctcccgatgcggctgggaaatacactgagcctagggctatcggtacccgctacctcacccaccacctgtaa

SEQ ID NO: 785 - DNA, 2175 bp, Artificial Sequence
  Description of Artificial Sequence: Synthetic polynucleotide
atgtcttttgttgatcaccctccagattggttggaagaagttggtgaaggtcttcgcgagtttttgggccttgaagcgggcccaccgaaaccaaaacccaatcagcagcatcaagatcaagcccgtggtcttgtgctgcctggttataactatctcggacccggaaacggtctcgatcgaggagagcctgtcaacagggcagacgaggtcgcgcgagagcacgacatctcgtacaacgagcagcttgaggcgggagacaacccctacctcaagtacaaccacgcggacgccgagtttcaggagaggctcgccgacgacacatccttcgggggaaacctcggaaaggcagtctttcaggccaagaaaagggttctcgaaccttttggcctggttgaagagggtgctaagacggcccctaccggaaagcggatagacgaccactttccaaaaagaaagaaggcccggaccgaagaggactccaagccttccacctcgtcagacgccgaagctggacccagcggatcccagcagctgcaaatcccagcccaaccagcctcaagtttgggagctgatacaatgtctgcgggaggtggcggcccattgggcgacaataaccaaggtgccgatggagtgggcaatgcctcgggagattggcattgcgattccacgtggatgggggacagagtcgtcaccaagtccacccgaacctgggtgctgcccagctacaacaaccaccagtaccgagagatcaaaagcggctccgtcgacggaagcaacgccaacgcctactttggatacagcaccccctgggggtactttgactttaaccgcttccacagccactggagcccccgagactggcaaagactcatcaacaactactggggcttcagaccccggtccctcagagtcaaaatcttcaacattcaagtcaaagaggtcacggtgcaggactccaccaccaccatcgccaacaacctcacctccaccgtccaagtgtttacggacgacgactaccagctgccctacgtcgtcggcaacgggaccgagggatgcctgccggccttccctccgcaggtctttacgctgccgcagtacggttacgcgacgctgaaccgcgacaacacagaaaatcccaccgagaggagcagcttcttctgcctagagtactttcccagcaagatgctgagaacgggcaacaactttgagtttacctacaactttgaggaggtgcccttccactccagcttcgctcccagtcagaacctcttcaagctggccaacccgctggtggaccagtacttgtaccgcttcgtgagcacaaataacactggcggagtccagttcaacaagaacctggccgggagatacgccaacacctacaaaaactggttcccggggcccatgggccgaacccagggctggaacctgggctccggggtcaaccgcgccagtgtcagcgccttcgccacgaccaataggatggagctcgagggcgcgagttaccaggtgcccccgcagccgaacggcatgaccaacaacctccagggcagcaacacctatgccctggagaacactatgatcttcaacagccagccggcgaacccgggcaccaccgccacgtacctcgagggcaacatgctcatcaccagcgagagcgagacgcagccggtgaaccgcgtggcgtacaacgtcggcgggcagatggccaccaacaaccagagctccaccactgcccccgcgaccggcacgtacaacctccaggaaatcgtgcccggcagcgtgtggatggagagggacgtgtacctccaaggacccatctgggccaagatcccagagacggaggcgcactttcacccctctccggccatgggcggattcggactcaaacacccaccgcccatgatgctcatcaagaacacgcctgtgcccggaaatatcaccagcttctcggacgtgcccgtcagcagcttcatcacccagtacagcaccgggcaggtcaccgtggagatggagtgggagctcaagaaggaaaactccaagaggtggaacccagagatccagtacacaaacaactacaacgacccccagtttgtggactttgccccggacagcaccggggaatacagaaccaccagacctatcggaacccgataccttacccgacccctttaa

SEQ ID NO: 786 - DNA, 2175 bp, Artificial Sequence
  Description of Artificial Sequence: Synthetic polynucleotide
atgtcttttgttgatcaccctccagattggttggaagaagttggtgaaggtcttcgcgagtttttgggccttgaagcgggcccaccgaaaccaaaacccaatcagcagcatcaagatcaagcccgtggtcttgtgctgcctggttataactatctcggacccggaaacggtctcgatcgaggagagcctgtcaacagggcagacgaggtcgcgcgagagcacgacatctcgtacaacgagcagcttgaggcgggagacaacccctacctcaagtacaaccacgcggacgccgagtttcaggagaagctcgccgacgacacatcctccgggggaaacctcggaaaggcagtctttcaggccaagaaaagggttctcgaaccttttggcctggttgaagagggtgctaagacggcccctaccggaaagcggatagacgaccactttccaaaaagaaagaaggcccggaccgaagaggactccaagccttccacctcgtcagacgccgaagctggacccagcggatcccagcagctgcaaatcccagcccaaccagcctcaagtttgggagctgatacaatgtctgcgggaggtggcggcccattgggcgacaataaccaaggtgccgatggagtgggcaatgcctcgggagattggcattgcgattccacgtggatgggggacagagtcgtcaccaagtccacccgaacctgggtgctgcccagctacaacaaccaccagtaccgagagatcaaaagcggctccgtcgacggaagcaacgccaacgcctactttggatacagcaccccctgggggtactttgactttaaccgcttccacagccactggagcccccgagactggcaaagactcatcaacaactactggggcttcagaccccggtccctcagagtcaaaatcttcaacattcaagtcaaagaggtcacggtgcaggactccaccaccaccatcgccaacaacctcacctccaccgtccaagtgtttacggacgacgactaccagctgccctacgtcgtcggcaacgggaccgagggatgcctgccggccttccctccgcaggtctttacgctgccgcagtacggttacgcgacgctgaaccgcgacaacacagaaaatcccaccgagaggagcagcttcttctgcctagagtactttcccagcaagatgctgagaacgggcaacaactttgagtttacctacaactttgaggaggtgcccttccactccagcttcgctcccagtcagaacctcttcaagctggccaacccgctagtggaccagtacttgtaccgcttcgtgagcacaaataacactggcggagtccagttcaacaagaacctggccgggagatacgccaacacctacaaaaactggttcccggggcccatgggccgaacccagggctggaacctgggctccggggtcaaccgcgccagtgtcagcgccttcgccacgaccaataggatggagctcgagggcgcgagttaccaggtgcccccgcagccgaacggcatgaccaacaacctccagggcagcaacacctatgccctggagaacactatgatcttcaacagccagccggcgaacccgggcaccaccgccacgtacctcgagggcaacatgctcatcaccagcgagagcgagacgcagccggtgaaccgcgtggcgtacaacgtcggcgggcagatggccaccaacaaccagagctccaccactgcccccgcgaccggcacgtacaacctccaggaaatcgtgcccggcagcgtgtggatggagagggacgtgtacctccaaggacccatctgggccaagatcccagagacgggggcgcactttcacccctctccggccatgggcggattcggactcaaacacccaccgcccatgatgctcatcaagaacacgcctgtgcccggaaatatcaccagcttctcggacgtgcccgtcagcagcttcatcacccagtacagcaccgggcaggtcaccgtggagatggagtgggagctcaagaaggaaaactccaagaggtggaacccagagatccagtacacaaacaactacaacgacccccagtttgtggactttgccccggacagcaccggggaatacagaaccaccagacctatcggaacccgataccttacccgacccctttaa

SEQ ID NO: 787 - DNA, 2175 bp, Artificial Sequence
  Description of Artificial Sequence: Synthetic polynucleotide
atgtcttttgttgatcaccctccagattggttggaagaagttggtgaaggtcttcgcgagtttttgggccttgaagcgggcccaccgaaaccaaaacccaatcagcagcatcaagatcaagcccgtggtcttgtgctgcctggttataactatctcggacccggaaacggtctcgatcgaggagagcctgtcaacagggcagacgaggtcgcgcgagagcacgacatctcgtacaacgagcagcttgaggcgggagacaacccctacctcaagtacaaccacgcggacgccgagtttcaggagaagctcgccgacgacacatccttcgggggaaacctcggaaaggcagtctttcaggccaagaaaagggttctcgaaccttttggcctggttgaagagggtgctaagacggcccctaccggaaagcggatagacgaccactttccaaaaagaaagaaggcccggaccgaagaggactccaagccttccacctcgtcagacgccgaagctggacccagcggatcccagcagctgcaaatcccagcccaaccagcctcaagtttgggagctgatacaatgtctgcgggaggtggcggcccattgggcgacaataaccaaggtgccgatggagtgggcaatgcctcgggagattggcattgcgattccacgtggatgggggacagagtcgtcaccaagtccacccgaacctgggtgctgcccagctacaacaaccaccagtaccgagagatcaaaagcggctccgtcgacggaagcaacgccaacgcctactttggatacagcaccccctgggggtactttgactttaaccgcttccacagccactggagcccccgagactggcaaagactcatcaacaactactggggcttcagaccccggtccctcagagtcaaaatcttcaacattcaagtcaaagaggtcacggtgcaggactccaccaccaccatcgccaacaacctcacctccaccgtccaagtgtttacggacgacgactaccagctgccctacgtcgtcggcaacgggaccgagggatgcctgccggccttccctccgcaggtctttacgctgccgcagtacggttacgcgacactgaaccgcgacaacacagaaaatcccaccgagaggagcagcttcttctgcctagagtactttcccagcaagatgctgagaacgggcaacaactttgagtttacctacaactttgaggaggtgcccttccactccagcttcgctcccagtcagaacctcttcaagctggccaacccgctggtggaccagtacttgtaccgcttcgtgagcacaaataacactggcggagtccagttcaacaagaacctggccgggagatacgccaacacctacaaaaactggttcccggggcccatgggccgaacccagggctggaacctgggctccggggtcaaccgcgccagtgtcagcgccttcgccacgaccaataggatggagctcgagggcgcgagttaccaggtgcccccgcagccgaacggcatgaccaacaacctccagggcagcaacacctatgccctggagaacactatgatcttcaacagccagccggcgaacccgggcaccaccgccacgtacctcgagggcaacatgctcatcaccagcgagagcgagacgcagccggtgaaccgcgtggcgtacaacgtcggcgggcagatggccaccaacaaccagagctccaccactgcccccgcgaccggcacgtacaacctccaggaaatcgtgcccggcagcgtgtggatggagagggacgtgtacctccaaggacccatctgggccaagatcccagagacgggggcgcactttcacccctctccggccatgggcggattcggactcaaacacccaccgcccatgatgctcatcaagagcacgcctgtgcccggaaatatcaccagcttctcggacgtgcccgtcagcagcttcatcacccagtacagcaccgggcaggtcaccgtggagatggagtgggagctcaagaaggaaaactccaagaggtggaacccagagatccagtacacaaacaactacaacgacccccagtttgtggactttgccccggacagcaccggggaatacagaaccaccagacctatcggaacccgataccttacccgacccctttaa

SEQ ID NO: 788 - DNA, 2175 bp, Artificial Sequence
  Description of Artificial Sequence: Synthetic polynucleotide
atgtcttttgttgatcaccctccagattggttggaagaagttggtgaaggtcttcgcgagtttttgggccctgaagcgggcccaccgaaaccaaaacccaatcagcagcatcaagatcaagcccgtggtcttgtgctgcctggttataactatctcggacccggaaacggtctcgatcgaggagagcctgtcaacagggcagacgaggtcgcgcgagagcacgacatctcgtacaacgagcagcttgaggcgggagacaacccctacctcaagtacaaccacgcggacgccgagtttcaggagaagctcgccgacgacacatccttcgggggaaacctcggaaaggcagtctttcaggccaagaaaagggttctcgaaccttttggcctggttgaagagggtgctaagacggcccctaccggaaagcggatagacgaccactttccaaaaagaaagaaggtccggaccgaagaggactccaagccttccacctcgtcagacgccgaagctggacccagcggatcccagcagctgcaaatcccagcccaaccagcctcaagtttgggagctgatacaatgtctgcgggaggtggcggcccattgggcgacaataaccaaggtgccgatggagtgggcaatgcctcgggagattggcattgcgattccacgtggatgggggacagagtcgtcaccaagtccacccgaacctgggtgccgcccagctacaacaaccaccagtaccgagagatcaaaagcggctccgtcgacggaagcaacgccaacgcctactttggatacagcaccccctgggggtactttgactttaaccgcttccacagccactggagcccccgagactggcaaagactcatcaacaactactggggcttcagaccccggtccctcagagtcaaaatcttcaacattcaagtcaaagaggtcacggtgcaggactccaccaccaccatcgccaacaacctcacctccaccgtccaagtgtttacggacgacgactaccagctgccctacgtcgtcggcaacgggaccgagggatgcctgccggccttccctccgcaggtctttacgctgccgcagtacggttacgcgacgctgaaccgcgacaacacagaaaatcccaccgagaggagcagcttcttctgcctagagtactttcccagcaagatgctgagaacgggcaacaactttgagtttacctacaactttgaggaggtgcccttccactccagcttcgctcccagtcagaacctcttcaagctggccaacccgctggtggaccagtacttgtaccgcttcgtgagcacaaataacactggcggagtccagttcaacaagaacctggccgggagatacgccaacacctacaaaaactggttcccggggcccatgggccgaacccagggctggaacctgggctccggggtcaaccgcgccagtgtcagcgccttcgccacgaccaataggatggagctcgagggcgcgagttaccaggtgcccccgcagccgaacggcatgaccaacaacctccagggcagcaacacctatgccctggagaacactatgatcttcaacagccagccggcgaacccgggcaccaccgccacgtacctcgagggcaacatgctcatcaccagcgagagcgagacgcagccggtgaaccgcgtggcgtgcaacgtcggcgggcagatggccaccaacaaccagagctccaccactgcccccgcgaccggcacgtacaacctccaggaaatcgtgcccggcagcgtgtggatggagagggacgtgtacctccaaggacccatctgggccaagatcccagagacgggggcgcactttcacccctctccggccatgggcggattcggactcaaacacccaccgcccatgatgctcatcaagaacacgcctgtgcccggaaatatcaccagcttctcggacgtgcccgtcagcagcttcatcacccagtacagcaccgggcaggtcaccgtggagatggagtgggagctcaagaaggaaaactccaagaggtggaacccagagatccagtacacaaacaactacaacgacccccagtttgtggactttgccccggacagcaccggggaatacagaaccaccagacctattggaacccgataccttacccgacccctttaa

SEQ ID NO: 789 - DNA, 2175 bp, Artificial Sequence
  Description of Artificial Sequence: Synthetic polynucleotide
atgtcttttgttgatcaccctccagattggttggaagaagttggtgaaggtcttcgcgagtttttgggccttgaagcgggcccaccgaaaccaaaacccaatcagcagcatcaagatcaagcccgtggtcttgtgctgcctggttataactatctcggacccggaaacggtctcgatcgaggagagcctgtcaacagggcagacgaggtcgcgcgagagcacgacatctcgtacaacgagcagcttgaggcgggagacaacccctacctcaagtacaaccacgcggacgccgagtttcaggagaagctcgccgacgacacatccttcgggggaaacctcggaaaggcagtctttcaggccaagaaaagggttctcgaaccttttggcctggttgaagagggtgctaagacggcccctaccggaaagcggatagacgaccactttccaaaaagaaagaaggcccggaccgaagaggactccaagccttccacctcgtcagacgccgaagctggacccagcggatcccagcagctgcaaatcccagcccaaccagcctcaagtttgggagctgatacaatgtctgcgggaggtggcggcccattgggcgacaataaccaaggtgccgatggagtgggcaatgcctcgggagattggcattgcgattccacgtggatgggggacagagtcgtcaccaagtccacccgaacctgggtgctgcccagctacaacaaccaccagtaccgagagatcaaaagcggctccgtcgacggaagcaacgccaacgcctactttggatacagcaccccctgggggtactttgactttaaccgcttccacagccactggagcccccgagactggcaaagactcatcaacaactactggggcttcagaccccggtccctcagagtcaaaatcttcaacattcaagtcaaagaggtcacggtgcaggactccaccaccaccatcgccaacaacctcacctccaccgtccaagtgtttacggacgacgactaccagctgccctacgtcgtcggcaacgggaccgagggatgcctgccggccttccctccgcaggtctttacgctgccgcagtacggttacgcgacgctgaaccgcgacaacaccgaaaatcccaccgagaggagcagcttcttctgcctagagtactttcccagcaagatgctgagaacgggcaacaactttgagtttacctacaactttgaggaggtgcccttccactccagcttcgctcccagtcagaacctcttcaagctggccaacccgctggtggaccagtacttgtaccgcttcgtgagcacaaataacactggcggagtccagttcaacaagaacctggccgggagatacgccaacacctacaaaaactggttcccggggcccatgggccgaacccagggctggaacctgggctccggggtcaaccgcgccagtgtcagcgccttcgccacgaccaataggatggagctcgagggcgcgagttaccaggtgcccccgcagccgaacggcatgaccaacaacctccagggcagcaacacctatgccctggagaacactatgatcttcaacagccagccggcgaacccgggcaccaccgccacgtacctcgagggcaacatgctcatcaccagcgagagcgagacgcagccggtgaaccgcgtggcgtacaacgtcggcgggcagatggccaccaacaaccagagctccaccactgcccccgcgaccggcgcgtacaacctccaggaaatcgtgcccggcagcgtgtggatggagagggacgtgtacctccaaggacccatctgggccaagatcccagagacgggggcgcactttcacccctctccggccatgggcggattcggactcaaacacccaccgcccatgatgctcatcaagaacacgcctgtgcccggaaatatcaccagcttctcggacgtgcccgtcagcagcttcatcacccagtacagcaccgggcaggtcaccgtggagatggagtgggagctcaagaaggaaaactccaagaggtggaacccagagatccagtacacaaacaactacaacgacccccagtttgtggactttgccccggacagcaccggggaatacagaaccaccagacctatcggaacccgataccttacccgacccctttaa

SEQ ID NO: 790 - DNA, 2175 bp, Artificial Sequence
  Description of Artificial Sequence: Synthetic polynucleotide
atgtcttttgttgatcaccctccagattggttggaagaagttggtgaaggtcttcgcgagtttttgggccttgaagcgggcccaccgaaaccaaaacccaatcagcagcatcaagatcaagcccgtggtcttgtgctgcctggttataactatctcggacccggaaacggtctcgatcgaggagagcctgtcaacagggcagacggggtcgcgcgagagcacgacatctcgtacaacgagcagcttgaggcgggagacaacccctacctcaagtacaaccacgcggacgccgagtttcaggagaagctcgccgacgacacatccttcgggggaaacctcggaaaggcagtctttcaggccaagaaaagggttctcgaaccttttggcctggttgaagagggtgctaagacggcccctaccggaaagcggatagacgaccactttccaaaaagaaagaaggcccggaccgaagaggactccaagccttccacctcgtcagacgccgaagctggacccagcggatcccagcagctgcaaatcccagcccaaccagcctcaagtttgggagctgatacaatgtctgcgggaggtggcggcccattgggcgacaataaccaaggtgccgatggagtgggcaatgcctcgggagattggcattgcgattccacgtggatgggggacagagtcgtcaccaagtccacccgaacctgggtgctgcccagctacaacaaccaccagtaccgagagatcaaaagcggctccgtcgacggaagcaacgccaacgcctactttggatacagcaccccctgggggtactttgactttaaccgcttccacagccactggagcccccgagactggcaaagactcatcaacaactactggggcttcagaccccggtccctcagagtcaaaatcttcaacattcaagtcaaagaggtcacggtgcaggactccaccaccaccatcgccaacaacctcacctccaccgtccaagcgtttacggacgacgactaccagctgccctacgtcgtcggcaacgggaccgagggatgcctgccggccttccctccgcaggtctttacgctgccgcagtacggttacgcgacgctgaaccgcgacaacacagaaaatcccaccgagaggagcagcttcttctgcctagagtactttcccagcaagatgctgagaacgggcaacaactttgagtttacctacaactttgaggaggtgcccttccactccagcttcgctcccagtcagaacctcttcaagctggccaacccgctggtggaccagtacttgtaccgcttcgtgagcacaaataacactggcggagtccagttcaacaagaacctggccgggagatacgccaacacctacaaaaactggttcccggggcccatgggccgaacccagggctggaacctgggctccggggtcaaccgcgccagtgtcagcgccttcgccacgaccaataggatggagctcgagggcgcgagttaccaggtgcccccgcagccgaacggcatgaccaacaacctccagggcagcaacacctatgccctggagaacactatgatcttcaacagccagccggcgaacccgggcaccaccgccacgtacctcgagggcaacatgctcatcaccagcgagagcgagacgcagccggtgaaccgcgtggcgtacaacgtcggcgggcagatggccaccaacaaccagagctccaccactgcccccgcgaccggcacgtacaacctccaggaaatcgtgcccggcagcgtgtggatggagagggacgtgtacctccaaggacccatctgggccaagatcccagagacgggggcgcactttcacccctctccggccatgggcggattcggactcaaacacccaccgcccatgatgctcatcaagaacacgcctgtgcccggaaatatcaccagcttctcggacgtgcccgtcagcagcttcatcacccagtacagcaccgggcaggtcaccgtggagatggagtgggagctcaagaaggaaaactccaagaggtggaacccagagatccagtacacaaacaactacaacgacccccagtttgtggactttgccccggacagcaccggggaatacagaaccaccagacctatcggaacccgataccttacccgacccctttaa

SEQ ID NO: 791 - DNA, 2175 bp, Artificial Sequence
  Description of Artificial Sequence: Synthetic polynucleotide
atgtcttttgttgatcaccctccagattggttggaagaagttggtgaaggtcttcgcgagtttttgggccttgaagcgggcccaccgaaaccaaaacccaatcagcagcatcaagatcaagcccgtggtcttgtgctgcctggttataactatctcggacccggaaacggtctcgatcgaggagagcctgtcaacagggcagacgaggtcgcgcgagagcacgacatctcgtacaacgagcagcttgaggcgggagacaacccctacctcaagtacaaccacgcggacgccgagtttcaggagaagctcgccgacgacacatccttcgggggaaacctcggaaaggcagtctttcaggccaagaaaagggttctcgaaccttttggcctggttgaagagggtgctaagacggcccctaccggaaagcggatagacgaccactttccaaaaagaaagaaggcccggaccgaagaggactccaagccttccacctcgtcagacgccgaagctggacccagcggatcccagcagctgcaaatcccagcccaaccagcctcaagtttgggagctgatacaatgtctgcgggaggtggcggcccattgggcgacaataaccaaggtgccgatggagtgggcaatgcctcgggagattggcattgcgattccacgtggatgggggacagagtcgtcaccaagtccacccgaacctgggtgctgcccagctacaacaaccaccagtaccgagagatcaaaagcggctccgtcgacggaagcaacgccaacgcctactttggatacagcaccccctgggggtactttgactttaaccgcttccacagccactggagcccccgagactggcaaagactcatcaacaactactggggcttcagaccccggtccctcagagtcaaaatcttcaacattcaagtcaaagaggtcacggtgcaggactccaccaccaccatcgccaacaacctcacctccaccgtccaagtgtttacggacgacgactaccagctgccctacgtcgtcggcaacgggaccgagggatgcctgccggccttccctccgcaggtctttacgctgccgcagtacggttacgcgacgctgaaccgcgacaacacagaaaatcccaccgagaggagcagcttcttctgcctagagtactttcccagcaagatgctgagaacgggcaacaactttgagtttacctacaactttgaggaggtgcccttccactccagcttcgctcccagtcagaacctcttcaagctggccaacccgctggtggaccagtacttgtaccgcttcgtgagcacaaataacactggcggagtccagttcaacaagaacctggccgggagatacgccaacacctacaaaaactggttcccggggcccatgggccgaacccagggctggaacctgggctccggggtcaaccgcgccagtgtcagcgccttcgccacgaccaataggatggagctcgagggcgcgagttactaggtgcccccgcagccgaacggcatgaccaacaacctccagggcagcaacacctatgccctggagaacactatgatcttcaacagccagccggcgaacccgggcaccaccgccacgtacctcgagggcaacatgctcatcaccagcgagagcgagacgcagccggtgaaccgcgtggcgtacaacgtcggcgggcagatggccaccaacaaccagagctccaccactgcccccgcgaccggcacgtacaacctccaggaaatcgtgcccggcagcgtgtggatggagggggacgtgtacctccaaggacccatctgggccaagatcccagagacgggggcgcactttcacccctctccggccatgggcggattcggactcaagcacccaccgcccatgatgctcatcaagaacacgcctgtgcccggaaatatcaccagcttctcggacgtgcccgtcagcagcttcatcacccagtacagcaccgggcaggtcaccgtggagatggagtgggagctcaagaaggaaaactccaagaggtggaacccagagatccagtacacaaacaactacaacgacccccagtttgtggactttgccccggacagcaccggggaatacagaaccaccagacctatcggaacccgataccttacccgacccctttaa

SEQ ID NO: 792 - DNA, 2175 bp, Artificial Sequence
  Description of Artificial Sequence: Synthetic polynucleotide
atgtcttttgttgatcaccctccagattggttggaagaagttggtgaaggtcttcgcgagtttttgggccttgaagcgggcccaccgaaaccaaaacccaatcagcagcatcaagatcaagcccgtggtcttgtgctgcctggttataactatctcggacccggaaacggtctcgatcgaggagagcctgtcaacagggcagacgaggtcgcgcgagagcacgacatctcgtacaacgagcagcttgaggcgggagacaacccctacctcaagtacaaccacgcggacgccgagtttcaggagaagctcgccgacgacacatccttcgggggaaacctcggaaaggcagtctttcaggccaagaaaagggttctcgaaccttttggcctggttgaagagggtgctaagacggcccctaccggaaagcggatagacgaccactttccaaaaagaaagaaggtccggaccgaagaggactccaagccttccacctcgtcagacgccgaagctggacccagcggatcccagcagctgcaaatcccagcccaaccagcctcaagtttgggagctgatacaatgtctgcgggaggtggcggcccattgggcgacaataaccaaggtgccgatggagtgggcaatgcctcgggagattggcattgcgattccacgtggatgggggacagagtcgtcaccaagtccacccgaacctgggtgctgcccagctacaacaaccaccagtaccgagagatcaaaagcggctccgtcgacggaagcaacgccaacgcctactttggatacagcaccccctgggggtactttgactttaaccgcttccacagccactggagcccccgagactggcaaagactcatcaacaactactggggcttcagaccccggtccctcagagtcaaaatcttcaacattcaagtcaaagaggtcacggtgcaggactccaccaccaccatcgccaacaacctcacctccaccgtccaagtgtttacggacgacgactaccagctgccctacgtcgtcggcaacgggaccgagggatgcctgccggccttccctccgcaggtctttacgctgccgcagtacggttacgcgacgctgaaccgcgacaacacagaaaatcccaccgagaggagcagcttcttctgcctagagtactttcccagcaagatgctgagaacgggcaacaactttgagtttacctacaactttgaggaggtgcccttccactccagcttcgctcccagtcagaacctcttcaagctggccaacccgctggtggaccagtacttgtaccgcttcgtgagcacaaataacactggcggagtccagttcaacaagaacctggccgggagatacgccaacacctacaaaaactggttcccggggcccatgggccgaacccagggctggaacctgggctccggggtcaaccgcgccagtgtcagcgccttcgccacgaccaataggatggagctcgagggcgcgagttaccaggtgcccccgcagccgaacggcatgaccaacaacctccagggcagcaacacctatgccctggagaacactatgatcttcaacagccagccggcgaacccgggcaccaccgccacgtacctcgagggcaacatgctcatcaccagcgagagcgagacgcagccggtgaaccgcgtggcgtacaacgtcggcgggcagatggccaccaacaaccagagctccaccactgcccccgcgaccggcacgtacaacctccaggaaatcgtgcccggcagcgtgtggatggagagggacgtgtacctccaaggacccatctgggccaagatcccagagacgggggcgcactttcacccctctccggccatgggcggattcggactcaaacacccaccgcccatgatgctcatcaagaacacgcctgtgcccggaaatatcaccagcttctcggacgtgcccgtcagcagcttcatcacccagtacagcaccgggcaggtcaccgtggagatggagtgggagctcaagaaggaaaactccgagaggtggaacccagagatccagtacacaaacaactacaacgacccccagtttgtggactttgccccggacagcaccggggaatacagaaccaccagacctattggaacccgataccttacccgacccctttaa

SEQ ID NO: 793 - DNA, 2175 bp, Artificial Sequence
  Description of Artificial Sequence: Synthetic polynucleotide
atgtcttttgttgatcaccctccagattggttggaagaagttggtgaaggtcttcgcgagtttttgggccttgaagcgggcccaccgaaaccaaaacccaatcagcagcatcaagatcaagcccgtggtcttgtgctgcctggttataactatctcggacccggaaacggtctcgatcgaggagagcctgtcaacagggcagacgaggtcgcgcgagagcacgacatctcgtacagcgagcagcttgaggcgggagacaacccctacctcaagtacaaccacgcggacgccgagtttcaggagaagctcgccgacgacacatccttcgggggaaacctcggaaaggcagtctttcaggccaagaaaagggttctcgaaccttttggcctggttgaagagggtgctaagacggcccctaccggaaagcggatagacgaccactttccaaaaagaaagaaggcccggaccgaagaggactccaagccttccacctcgtcagacgccgaagctggacccagcggatcccagcagctgcaaatcccagcccaaccagcctcaagtttgggagctgatacaatgtctgcgggaggtggcggcccattgggcgacaataaccaaggtgccgatggagtgggcaatgcctcgggagattggcattgcgattccacgtggatgggggacagagtcgtcaccaagtccacccgaacctgggtgctgcccagctacaacaaccaccagtaccgagagatcaaaagcggctccgtcgacggaagcaacgccaacgcctactttggatacagcaccccctgggggtactttgactttaaccgcttccacagccactggagcccccgagactggcaaagactcatcaacaactactggggcttcagaccccggtccctcagagtcaaaatcttcaacattcaagtcaaagaggtcacggtgcaggactccaccaccaccatcgccaacaacctcacctccaccgtccaagtgtttacggacgacgactaccagctgccctacgtcgtcggcaacgggaccgagggatgcctgccggccttccctccgcaggtctttacgctgccgcagtacggttacgcgacgctgaaccgcgacaacacagaaaatcccaccgagaggagcagcttcttctgcctagagtactttcccagcaagatgctgagaacgggcaacaactttgagtttacctacaactttgaggaggtgcccttccactccagcttcgctcccagtcagaacctcttcaagctggccaacccgctggtggaccagtacttgtaccgcttcgtgagcacaaataacactggcggagtccagttcaacaagaacctggccgggagatacgccaacacctacaaaaactggttcccggggcccatgggccgaacccagggctggaacctgggctccggggtcaaccgcgccagtgtcagcgccttcgccacgaccaataggatggagctcgagggcgcgagttaccaggtgcccccgcagccgaacggcatgaccaacaacctccagggcagcaacacctatgccctggagaacactatgatcttcaacagccagccggcgaacccgggcaccaccgccacgtacctcgagggcaacatgctcatcaccagcgagagcgagacgcagccggtgaaccgcgtggcgtacaacgtcggcgggcagatggccaccaacaaccagagctccaccactgcccccgcgaccggcacgtacaacctccaggaaatcgtgcccggcagcgtgtggatggagagggacgtgtacctccaaggacccatctgggccaagatcccagagacgggggcgcactttcacccctctccggccatgggcggattcggactcaaacacccaccgcccatgatgctcatcaagaacacgcctgtgcccggaaatatcaccagcttctcggacgtgcccgtcagcagcttcatcacccagtacagcaccgggcaggtcaccgtggagatggagtgggagctcaagaaggaaaactccaagaggtggaacccagagatccagtacacaaacaactacaacgacccccagtttgtggactttgccccggacagcaccggggaatacagaaccgccagacctatcggaacccgataccttacccgacccctttaa

SEQ ID NO: 794 - DNA, 2175 bp, Artificial Sequence
  Description of Artificial Sequence: Synthetic polynucleotide
atgtcttttgttgatcaccctccagattggttggaagaagttggtgaaggtcttcgcgagtttttgggccctgaagcgggcccaccgaaaccaaaacccaatcagcagcatcaagatcaagcccgtggtcttgtgctgcctggttataactatctcggacccggaaacggtctcgatcgaggagagcctgtcaacagggcagacgaggtcgcgcgagagcacgacatctcgtacaacgagcagcttgaggcgggagacaacccctacctcaagtacaaccacgcggacgccgagtttcaggagaagctcgccgacgacacatccttcgggggaaacctcggaaaggcagtctttcaggccaagaaaagggttctcgaaccttttggcctggttgaagagggtgctaagacggcccctaccggaaagcggatagacgaccactttccaaaaagaaagaaggcccggaccgaagaggactccaagccttccacctcgtcagacgccgaagctggacccagcggatcccagcagctgcaaatcccagcccaaccagcctcaagtttgggagctgatacaatgtctgcgggaggtggcggcccattgggcgacaataaccaaggtgccgatggagtgggcaatgcctcgggagattggcattgcgattccacgtggatgggggacagagtcgtcaccaagtccacccgaacctgggtgctgcccagctacaacaaccaccagtaccgagagatcaaaagcggctccgtcgacggaagcaacgccaacgcctactttggatacagcaccccctgggggtactttgactttaaccgcttccacagccactggagcccccgagactggcaaagactcatcaacaactactggggcttcagaccccggtccctcagagtcaaaatcttcaacattcaagtcaaagaggtcacggtgcaggactccaccaccaccatcgccaacaacctcacctccaccgtccaagtgtttacggacgacgactaccagctgccctacgtcgtcggcaacgggaccgagggatgcctgccggccttccctccgcaggtctttacgctgccgcagtacggttacgcgacgctgaaccgcgacaacacagaaaatcccaccgagaggagcagcttcttctgcctagagtactttcccagcaagatgctgagaacgggcaacaactttgagtttacctacaactttgaggaggtgcccttccactccagcttcgctcccagtcagaacctcttcaagctggccaacccgctggtggaccagtacttgtaccgcttcgtgagcacaaataacactggcggagtccagttcaacaagaacctggccgggagatacgccaacacctacaaaaactggttcccggggcccatgggccgaacccagggctggaacctgggctccggggtcaaccgcgccagtgtcagcgccttcgccacgaccaataggatggagctcgagggcgcgagttaccaggtgcccccgcagccgaacggcatgaccaacaacctccagggcagcaacacctatgccctggagaacactatgatcttcaacagccagccggcgaacccgggcaccaccgccacgtacctcgagggcaacatgctcatcaccagcgagagcgagacgcagccggtgaaccgcgtggcgtacaacgtcggcgggcagatgaccaccaacaaccagagctccaccactgcccccgcgaccggcacgtacaacctccaggaaatcgtgcccggcagcgtgtggatggagagggacgtgtacccccaaggacccatctgggccaagatcccagagacgggggcgcactttcacccctctccggccatgggcggattcggactcaaacacccaccgcccatgatgctcatcaagaacacgcctgtgcccggaaatatcaccagcttctcggacgtgcccgtcagcagcttcatcacccagtacagcaccgggcaggtcaccgtggagatggagtgggagctcaagaaggaaaactccaagaggtggaacccagagatccagtacacaaacaactacaacgacccccagtttgtggactttgccccggacagcaccggggaatacaggaccaccagacctatcggaacccgataccttacccgacccctttaa

SEQ ID NO: 795 - DNA, 2175 bp, Artificial Sequence
  Description of Artificial Sequence: Synthetic polynucleotide
atgtcttttgttgatcaccctccagattggttggaagaagttggtgaaggtcttcgcgagtttttgggccttgaagcgggcccaccgaaaccaaaacccaatcagcagcatcaagatcaagcccgtggtcttgtgctgcctggttataactatctcggacccggaaacggtctcgatcgaggagagcctgtcaacagggcagacgaggtcgcgcgagagcacgacatctcgtacaacgagcagcttgaggcgggagacaacccctacctcaagtacaaccacgcggacgccgagtttcaggagaagctcgccgacgacacatccttcgggggaaacctcggaaaggcagtctttcaggccaagaaaagggttctcgaaccttttggcctggttgaagagggtgctaagacggcccctaccggaaagcggatagacgaccactttccaaaaagaaagaaggcccggaccgaagaggactccaagccttccacctcgtcagacgccgaagctggacccagcggatcccagcagctgcaaatcccagcccaaccagcctcaagtttgggagctgatacaatgtctgcgggaggtggcggcccattgggcgacaataaccaaggtgccgatggagtgggcaatgcctcgggagattggcattgcgattccacgtggatgggggacagagtcgtcaccaagtccacccgaacctgggtgctgcccagctacaacaaccaccagtaccgagagatcaaaagcggctccgtcgacggaagcaacgccaacgcctactttggatacagcaccccctgggggtactttgactttaaccgcttccacagccactggagcccccgagactggcaaagactcatcaacaactactggggcttcagaccccggtccctcagagtcaaaatcttcaacattcaagtcaaagaggtcacggtgcaggactccaccaccaccatcgccaacaacctcacctccaccgtccaagtgtttacggacgacgactaccagctgccctacgtcgtcggcaacgggaccgagggatgcctgccggccttccctccgcaggtctttacgctgccgcagtacggttacgcgacgctgaaccgcgacaacacagaaaatcccaccgagaggagcagcttcctctgcctagagtactttcccagcaagatgctgagaacgggcaacaactttgagtttacctacaactttgaggaggtgcccttccactccagcttcgctcccagtcagaacctcttcaagctggccaacccgctggtggaccagtacttgtaccgcttcgtgagcacaaataacactggcggagtccagttcaacaagaacctggccgggagatacgccaacacctacaaaaactggttcccggggcccatgggccgaacccagggctggaacctgggctccggggtcaaccgcgccagtgtcagcgccttcgccacgaccaataggatggagctcgagggcgcgagttaccaggtgcccccgcagccgaacggcatgaccaacaacctccagggcagcaacacctatgccctggagaacactatgatcttcaacagccagccggcgaacccgggcaccaccgccacgtacctcgagggcaacatgctcatcaccagcgagagcgagacgcagccggtgaaccgcgtggcgtacaacgtcggcgggcagatggccaccaacaaccagagctccaccactgcccccgcgaccggcacgtacaacctccaggaaatcgtgcccggcagcgtgtggatgaagagggacgtgtacctccaaggacccatctgggccaagatcccagagacgggggcgcactttcacccctctccggccatgggcggattcggactcaaacacccaccgcccatgatgctcatcaagaacacgcctgtgcccggaaatatcaccagcttctcggacgtgcccgtcagcagcttcatcacccagtacagcaccgggcaggtcaccgtggagatggagtgggagctcaagaaggaaaactccaagaggtggaacccagagatccagtacacaaacaactacaacgacccccagtttgtggactttgccccggacagcaccggggaatacagaaccaccagacctatcggaacccgataccttacccgacccctttaa

SEQ ID NO: 796 - DNA, 2175 bp, Artificial Sequence
  Description of Artificial Sequence: Synthetic polynucleotide
atgtcttttgttgatcaccctccagattggttggaagaagttggtgaaggtcttcgcgagtttttgggccttgaggcgggcccaccgaaaccaaaacccaatcagcagcatcaagatcaagcccgtggtcttgtgctgcctggttataactatctcggacccggaaacggtctcgatcgaggagagcctgtcaacagggcagacgaggtcgcgcgagagcacgacatctcgtacaacgagcagcttgaggcgggagacaacccctacctcaagtacaaccacgcggacgccgagtttcaggagaagctcgccgacgacacatccttcgggggaaacctcggaaaggcagtctttcaggccaagaaaagggttctcgaaccttttggcctggttgaagagggtgctaagacggcccctaccggaaagcggatagacgaccactttccaaaaagaaagaaggcccggaccgaagaggactccaagccttccaccccgtcagacgccgaagctggacccagcggatcccagcagctgcaaatcccagcccaaccagcctcaagtttgggagctgatacaatgtctgcgggaggtggcggcccattgggcgacaataaccaaggtgccgatggagtgggcaatgcctcgggagattggcattgcgattccacgtggatgggggacagagtcgtcaccaagtccacccgaacctgggtgctgcccagctacaacaaccaccagtaccgagagatcaaaagcggctccgtcgacggaagcaacgccaacgcctactttggatacagcaccccctgggggtactttgactttaaccgcttccacagccactggagcccccgagactggcaaagactcatcaacaactactggggcttcagaccccggtccctcagagtcaaaatcttcaacattcaagtcaaagaggtcacggtgcaggactccaccaccaccatcgccaacaacctcacctccaccgtccaagtgtttacggacgacgactaccagctgccctacgtcgtcggcaacgggaccgagggatgcctgccggccttccctccgcaggtctttacgctgccgcagtacggttacgcgacgctgaaccgcgacaacacagaaaatcccaccgagaggagcagcttcttctgcctagagtactttcccagcaagatgctgagaacgggcaacaactttgagtttacctacaactttgaggaggtgcccttccactccagcttcgctcccagtcagaacctcttcaagctggccaacccgctggtggaccagtacttgtaccgcttcgtgagcacaaataacactggcggagtccagttcaacaagaacctggccgggagatacgccaacacctacaaaaactggttcccggggcccatgggccgaacccagggctggaacctgggctccggggtcaaccgcgccagtgtcagcgccttcgccacgaccaataggatggagctcgagggcgcgagttaccaggtgcccccgcagccgaacggcatgaccaacaacctccagggcagcaacacctatgccctggagaacactatgatcttcaacagccagccggcgaacccgggcaccaccgccacgtacctcgagggcaacatgctcatcaccagcgagagcgagacgcagccggtgaaccgcgtggcgtacaacgtcggcgggcagatggccaccaacaaccagagctccaccactgcccccgcgaccggcacgtacaacctccaggaaatcgtgcccggcagcgtgtggatggagagggacgtgtacctccaaggacccatctgggccaagatcccagagacgggggcgcactttcacccctctccggccatgggcggattcggactcaaacacccaccgcccatgatgctcatcaagaacacgcctgtgcccggaaatatcaccagcttctcggacgtgcccgtcagcagcttcatcacccagtacagcaccgggcaggtcaccgtggagatggagtgggagctcaagaaggaaaactccaagaggtggaacccagagatccagtacacaaacaactacaacgacccccagtttgtggactttgccccggacagcaccggggaatacagaaccaccagacctatcggaacccgataccttacccgacccctttaa

SEQ ID NO: 797 - DNA, 2175 bp, Artificial Sequence
  Description of Artificial Sequence: Synthetic polynucleotide
atgtcttttgttgatcaccctccagattggttggaagaagttggtgaaggtcttcgcgagtttttgggccttgaagcgggcccaccgaaaccaaaacccaatcagcagcatcaagatcaagcccgtggtcttgtgctgcctggttataactatctcggacccggaaacggtctcgatcgaggagagcctgtcaacagggcagacgaggtcgcgcgagagcacgacatctcgtacaacgagcagcttgaggcgggagacaacccctacctcaagtacaaccacgcggacgccgagtttcaggagaagctcgccgacgacacatccttcgggggaaacctcggaaaggcagtctttcaggccaagaaaagggttctcgaaccttttggcctggttgaagagggtgctaagacggcccctaccggaaagcggatagacgaccactttccaaaaagaaagaaggcccggaccgaagaggactccaagccttccacctcgtcagacgccgaagctggacccagcggatcccagcagctgcaaatcccagcccaaccagcctcaagtttgggagctgatacaatgtctgcgggaggtggcggcccattgggcgacaataaccaaggtgccgatggagtgggcaatgcctcgggagattggcattgcgattccacgtggatgggggacagagtcgtcaccaagtccacccgaacctgggtgctgcccagctacaacaaccaccagtaccgagagatcaaaagcggctccgtcgacggaagcaacgccaacgcctactttggatacagcaccccctgggggtactttgactttaaccgcttccacagccactggagcccccgagactggcaaagactcatcaacaactactggggcttcagaccccggtccctcagagtcaaaatcttcaacattcaagtcaaagaggtcacggtgcaggactccaccaccaccatcgccaacaacctcacctccaccgtccaagtgtttacggacgacgactaccagctgccctacgtcgtcggcaacgggaccgagggatgcctgccggccttccctccgcaggtctttacgctgccgcagtacggttacgcgacgctgaaccgcgacaacacagaaaatcccaccgagaggagcagcttcttctgcctagagtactttcccagcaagatgctgagaacgggcaacaactttgagtttacctacaactttgaggaggtgcccttccactccagcttcgctcccagtcagaacctcttcaagctggccaacccgctggtggaccagtacttgtaccgcttcgtgagcacaaataacactggcggagtccagttcaacaagaacctggccgggagatacgccaacacccacaaaaactggttcccggggcccatgggccgaacccagggctggaacctgggctccggggtcaaccgcgccagtgtcagcgccttcgccacgaccaataggatggagctcgagggcgcgagttaccaggtgcccccgcagtcgaacggcatgaccaacaacctccggggcagcaacacctatgccctggagaacactatgatcttcaacagccagccggcgaacccgggcaccaccgccacgtacctcgagggcaacatgctcatcaccagcgagagcgagacgcagccggtgaaccgcgtggcgtacaacgtcggcgggcagatggccaccaacaaccagagctccaccactgcccccgcgaccggcacgtacaacctccaggaaatcgtgcccggcagcgtgtggatggagagggacgtgtacctccaaggacccatctgggccaagatcccagagacgggggcgcactttcacccctctccggccatgggcggattcggactcaaacacccaccgcccatgatgctcatcaagaacacgcctgtgcccggaaatatcaccagcttctcggacgtgcccgtcagcagcttcatcacccagtacagcaccgggcaggtcaccgtggagatggagtgggagctcaagaaggaaaactccaagaggtggaacccagagatccagtacacaaacaactacaacgacccccagtttgtggactttgccccggacagcaccggggaatacagaaccaccagacctatcggaacccgataccttacccgacccctttaa

SEQ ID NO: 798 - DNA, 2175 bp, Artificial Sequence
  Description of Artificial Sequence: Synthetic polynucleotide
atgtcttttgttgatcaccctccagattggttggaagaagttggtgaaggtcttcgcgagtttttgggccttgaagcgggcccaccgaaaccaaaacccaatcagcagcatcaagatcaagcccgtggtcttgtgctgcctggttataactatctcggacccggaaacggtctcgatcgaggagagcctgtcaacagggcagacgaggtcgcgcgagagcacgacatctcgtacaacgagcagcttgaggcgggagacaacccctacctcaagtacaaccacgcggacgccgagtttcaggagaagctcgccgacgacacatccttcgggggaaacctcggaaaggcagtctttcaggccaagaaaagggttctcgaaccttttggcctggttgaagagggtgctaagacggcccctaccggaaagcggatagacgaccactttccaaaaagaaagaaggcccggaccgaagaggactccaagccttccacctcgtcagacgccgaagctggacccagcggatcccagcagctgcaaatcccagcccaaccagcctcaagtttgggagctgatacaatgtctgcgggaggtggcggcccattgggcgacaataaccaaggtgccgatggagtgggcaatgcctcgggagattggcattgcgattccacgtggatgggggacagagtcgtcaccaagtccacccgaacctgggtgctgcccagctacaacaaccaccagtaccgagagatcaaaagcggctccgtcgacggaagcaacgccaacgcctactttggatacagcaccccctgggggtactttgactttaaccgcttccacagccactggagcccccgagactggcaaagactcatcaacaactactggggcttcagaccccggtccctcagagtcaaaatcttcaacattcaagtcaaagaggtcacggtgcaggactccaccaccaccatcgccaacaacctcacctccaccgtccaagtgtttacggacgacgactaccagctgccctacgtcgtcggcaacgggaccgagggatgcctgccggccttccctccgcaggtctttacgctgccgcagtacggttacgcgacgctgaaccgcgacaacacagaaaatcccaccgagaggagcagcttcttctgcctagagtactttcccagcaagatgctgagaacgggcaacaactttgagtttacctacaactttgaggaggtgcccttccactccagcttcgctcccagtcagaacctcttcaagctggccaacccgctggtggaccagtacttgtaccgcttcgtgagcacaaataacactggcggagtccagttcaacaagaacctggccgggagatacgccaacacctacaaaaactggttcccggggcccatgggccgaacccagggctggaacctgggctccggggtcaaccgcgccagtgtcagcgccttcgccacgaccaataggatggagctcgagggcgcgagttaccaggtgcccccgcagccgaacggcatgaccaacaacctccagggcagcaacacctatgccctggagaacactatgatcttcaacagccagccggcgaacccgggcaccaccgccacgtacctcgagggcaacatgctcatcaccagcgagagcgagacgcagccggtgaaccgcgtggcgtacagcgtcggcgggcagatggccaccaacaaccagagctccaccactgcccccacgaccggcacgtacaacctccaggaaatcgtgcccggcagcgtgtggatggagagggacgtgtacctccaaggacccatctgggccaagatcccagagacgggggcgcactttcacccctctccggccatgggcggattcagactcaaacacccaccgcccatgatgctcatcaagaacacgcctgtgcccggaaatatcaccagcttctcggacgtgcccgtcagcagcttcatcacccagtacagcaccgggcaggtcaccgtggagatggagtgggagctcaagaaggaaaactccaagaggtggaacccagagatccagtacacaaacaactacaacgacccccagtttgtggactttgccccggacagcaccggggaatacagaaccaccagacctatcggaacccgataccttacccgacccctttaa

SEQ ID NO: 799 - DNA, 2175 bp, Artificial Sequence
  Description of Artificial Sequence: Synthetic polynucleotide
atgtcttttgttgatcaccctccagattggttggaagaagttggtgaaggtcttcgcgagtttttgggccttgaagcgggcccaccgaaaccaaaacccaatcagcagcatcaagatcaagcccgtggtcttgtgctgcctggttataactatctcggacccggaaacggtctcgatcgaggagagcctgtcaacagggcagacgaggtcgcgcgagagcacgacatctcgtacaacgagcagcttgaggcgggagacaacccctacctcaagtacaaccacgcggacgccgagtttcaggagaagctcgccgacgacacatccttcgggggaaacctcggaaaggcagtctttcaggccaagaaaagggttctcgaaccttttggcctggttgaagagggtgctaagacggcccctaccggaaagcggatagacgaccactttccaaaaagaaagaaggcccggaccgaagaggactccaagccttccacctcgtcagacgccgaagctggacccagcggatcccagcagctgcaaatcccagcccaaccagcctcaagtttgggagctgatacaatgtctgcgggaggtggcggcccattgggcgacaataaccaaggtgccgatggagtgggcaatgcctcgggagattggcattgcgattccacgtggatgggggacagagtcgtcaccaagtccacccgaacctgggtgctgcccagctacaacaaccaccagtaccgagagatcaaaagcggctccgtcgacggaagcaacgccaacgcctactttggatacagcaccccctgggggtactttgactttaaccgcttccacagccactggagcccccgagactggcaaagactcatcaacaactactggggcttcagaccccggtccctcagagtcaaaatcttcaacattcaagtcaaagaggtcacggtgcaggactccaccaccaccatcgccaacaacctcacctccaccgtccaagtgtttacggacgacgactaccagctgccctacgtcgtcggcaacgggaccgagggatgcctgccggccttccctccgcaggtctttacgctgccgcagtacggttacgcgacgctgaaccgcgacaacacagaaaatcccaccgagaggagcagcttcttctgcctagagtactttcccagcaagatgctgagaacgggcaacaactttgagtttacctacaactttgaggaggtgcccttccactccagcttcgctcccagtcagaacctcttcaagctggccaacccgctggtggaccagtacttgtaccgcttcgtgagcacaaataacactggcggagtccagttcaacaagaacctggccgggagatacgccaacacctacaaaaactggttcccggggcccatgggccgaacccagggctggaacctgggctccggggtcaaccgcgccagtgtcagcgccttcgccgcgaccaataggatggagctcgagggcgcgagttaccaggtgcccccgcagccgaacggcatgaccaacaacctccagggcagcaacacctatgccctggagaacactatgatcttcaacagccagccggcgaacccgggcaccaccgccacgtacctcgagggcaacatgctcatcaccagcgagagcgagacgcagccggtgaaccgcgtggcgtacaacgtcggcgggcagatggccaccaacaaccagagctccaccactgcccccgcgaccggcacgtacaacctccaggaaatcgtgcccggcggcgtgtggatggagagggacgtgtacctccaaggacccatctgggccaagatcccagagacgggggcgcactttcacccctctccggccatgggcggattcggactcaaacacccaccgcccatgatgctcatcaagaacacgcctgtgcccggaaataccaccagcttctcggacgtgcccgtcagcagcttcatcacccagtacagcaccgggcaggtcaccgtggagatggagtgggagctcaagaaggaaaactccaagaggtggaacccagagatccagtacacaaacaactacaacgacccccagtttgtggactttgccccggacagcaccggggaatacagaaccaccagacctatcggaacccgataccttacccgacccctttaa

SEQ ID NO: 800 - DNA, 2175 bp, Artificial Sequence
  Description of Artificial Sequence: Synthetic polynucleotide
atgtcttttgttgatcaccctccagattggttggaagaagttggtgaaggtcttcgcgagtttttgggccttgaagcgggcccaccgaaaccaaaacccaatcagcagcatcaagatcaagcccgtggtcttgtgctgcctggttataactatctcggacccggaaacggtctcgatcgaggagagcctgtcaacagggcagacgaggtcgcgcgagagcacgacatctcgtacaacgagcagcttgaggcgggagacaacccctacctcaagtacaaccacgcggacgccgagtttcaggagaagctcgccgacgacacatccttcgggggaaacctcggaaaggtagtctttcaggccaagaaaagggttctcgaaccttttggcctggttgaagagggtgctaagacggcccctaccggaaagcggatagacgaccactttccaaaaagaaagaaggcccggaccgaagaggactccaagccttccacctcgtcagacgccgaagctggacccagcggatcccagcagctgcaaatcccagcccaaccagcctcaagtttgggagctgatacaatgtctgcgggaggtggcggcccattgggcggcaataaccaaggtgccgatggagtgggcaatgcctcgggagattggcattgcgattccacgtggatgggggacagagtcgtcaccaagtccacccgaacctgggtgctgcccagctacaacaaccaccagtaccgagagatcaaaagcggctccgtcgacggaagcaacgccaacgcctactttggatacagcaccccctgggggtactttgactttaaccgcttccacagccactggggcccccgagactggcaaagactcatcaacaactactggggcttcagaccccggtccctcagagtcaaaatcttcaacattcaagtcaaagaggtcacggtgcaggactccaccaccaccatcgccaacaacctcacctccaccgtccaagtgtttacggacgacgactaccagctgccctacgtcgtcggcaacgggaccgagggatgcctgccggccttccctccgcaggtctttacgctgccgcagtacggttacgcgacgctgaaccgcgacaacacagaaaatcccaccgagaggagcagcttcttctgcctagagtactttcccagcaagatgctgagaacgggcaacaactttgagtttacctacaactttgaggaggtgcccttccactccagcttcgctcccagtcagaacctcttcaagctggccaacccgctggtggaccagtacttgtaccgcttcgtgagcacaaataacactggcggagtccagttcaacaagaacctggccgggagatacgccaacacctacaaaaactggttcccggggcccatgggccgaacccagggctggaacctgggctccggggtcaaccgcgccagtgtcagcgccctcgccacgaccaataggatggagctcgagggcgcgagttaccaggtgcccccgcagccgaacggcatgaccaacaacctccagggcagcaacacctatgccctggagaacactatgatcttcaacagccagccggcgaacccgggcaccaccgccacgtacctcgagggcaacatgctcatcaccagcgagagcgagacgcagccggtgaaccgcgtggcgtacaacgtcggcgggcagatggccaccaacaaccagagctccaccactgcccccgcgaccggcacgtacaacctccaggaaatcgtgcccggcagcgtgtggatggagagggacgtgtacctccaaggacccatctgggccaagatcccagagacgggggcgcactttcacccctctccggccatgggcggattcggactcaaacacccaccgcccatgatgctcatcaagaacacgcctgtgcccggaaatatcaccagcttctcggacgtgcccgtcagcagcttcatcacccagtacagcaccgggcaggtcaccgtggagatggagtgggagctcaagaaggaaaactccaagaggtggaacccagagatccagtacacaaacaactacaacgacccccagtttgtggactttgccccggacagcaccggggaatacagaaccaccagacctatcggaacccgataccttacccgacccctttaa

SEQ ID NO: 801 - DNA, 2175 bp, Artificial Sequence
  Description of Artificial Sequence: Synthetic polynucleotide
atgtcttttgttgatcaccctccagattggttggaagaagttggtgaaggtcttcgcgagtttttgggccttgaagcgggcccaccgaaaccaaaacccaatcagcagcatcaagatcaagcccgtggtcttgtgctgcctggttataactatctcggacccggaaacggtctcgatcgaggagagcctgtcaacagggcagacgaggtcgcgcgagagcacgacatctcgtacaacgagcagcttgaggcgggagacaacccctacctcaagtacaaccacgcggacgccgagtttcaggagaagctcgccgacgacacatccttcgggggaaacctcggaaaggcagtctttcaggccaagaaaagggttctcgaaccttttggcctggttgaagagggtgctaagacggcccctaccggaaagcggatagacgaccactttccaaaaagaaagaaggcccggaccgaagaggactccaagccttccacctcgtcagacgccgaagctggacccagcggatcccagcagctgcaaatcccagcccaaccagcctcaagtttgggagctgatacaatgtctgcgggaggtggcggcccattgggcgacaataaccaaggtgccgatggagtgggcaatgcctcgggagattggcattgcgattccacgtggatgggggacagagtcgtcaccaagtccacccgaacctgggtgctgcccagctacaacaaccaccagtaccgagagatcaaaagcggctccgtcgacggaagcaacgccaacgcctactttggatacagcaccccctgggggtactttgactttaaccgcttccacagccactggagcccccgagactggcaaagactcatcaacaactactggggcttcagaccccggtccctcagagtcaaaatcttcaacattcaagtcaaagaggtcacggtgcaggactccaccaccaccatcgccaacaacctcacctccaccgtccaagtgtttacggacgacgactaccagctgccctacgtcgtcggcaacgggaccgagggatgcctgccggccttccctccgcaggtctttacgctgccgcagtacggttacgcgacgctgaaccgcgacaacacagaaaatcccaccgagaggagcagcttcttctgcctagagtactttcccagcaagatgctgagaacgggcaacaactttgagtttacctacaactttgaggaggtgcccttccactccagcttcgctcccagtcagaacctcttcaagctggccaacccgctggtggaccagtacttgtaccgcttcgtgagcacaaataacactggcggagtccagttcaacaagaacctggccgggagatacgccaacacctacaaaaactggttcccggggcccatgggccgaacccagggctggaacctgggctccggggtcaaccgcgccagtgtcagcgccttcgccacgaccaataggatggagctcgagggcgcgagttaccaggtgcccccgcagccgaacggcatgaccaacaacctccagggcagcaacacctatgccctggagaacactatgatcttcaacagccagccggcgaacccgggcaccaccgccacgtacctcgagggcaacatgctcatcaccagcgagagcgagacgcagccggtgaaccgcgtggcgtacaacgtcggcgggcagatggccaccaacaaccagagctccaccactgcccccgcgaccggcacgtacaacctccaggaaatcgtgcccggcagcgtgtggatggagagggacgtgtacctccaaggacccatctgagccaagatcccagagacgggggcgcactttcacccctctccggccatgggcggattcggactcaaacacccaccgcccatgatgctcatcaagaacacgcctgtgcccggaaatatcaccagcttctcggacgtgcccgtcagcagcttcatcacccagtacagcaccgggcaggtcaccgtggagatggagtgggagctcaagaaggaaaactccaagaggtggaacccagagatccagtacacaaacaactacaacgacccccagtttgtggactttgccccggacagcaccggggaatgcagaaccaccagacctatcggaacccgataccttacccgacccctttaa

SEQ ID NO: 802 - DNA, 2175 bp, Artificial Sequence
  Description of Artificial Sequence: Synthetic polynucleotide
atgtcttttgttgatcaccctccagattggttggaagaagttggtgaaggtcttcgcgagtttttgggccttgaagcgggcccaccgaaaccaaaacccaatcagcagcatcaagatcaagcccgtggtcttgtgctgcctggttataactatctcggacccggaaacggtctcgatcgaggagagcctgtcaacagggcagacgaggtcgcgcgagagcacgacatctcgtacaacgagcagcttgaggcgggagacaacccctacctcaagtacaaccacgcggacgccgagtttcaggagaagctcgccgacgacacatccttcgggggaaacctcggaaaggcagtctttcaggccaagaaaagggttctcgaaccttttggcctggttgaagagggtgctaagacggcccctaccggaaagcggatagacgaccactttccaaaaagaaagaaggcccggaccgaagaggactccaagccttccacctcgtcagacgccgaagctggacccagcggatcccagcagctgcaaatcccagcccaaccagcctcaagtttgggagctgatacaatgtctgcgggaggtggcggcccattgggcgacaataaccaaggtgccgatggagtgggcaatgcctcgggagattggcattgcgattccacgtggatgggggacagagtcgtcaccaagtccacccgaacctgggtgctgcccagctacaacaaccaccagtaccgagagatcaaaagcggctccgtcgacggaagcaacgccaacgcctactttggatacagcaccccctgggggtactttgactttaaccgcttccacagccactggagcccccgagactggcaaagactcatcaacaactactggggcttcagaccccggtccctcagagtcaaaatcctcaacattcaagtcaaagaggtcacggtgcaggactccaccaccaccatcgccaacaacctcacctccaccgtccaagtgtttacggacgacgactaccagctgccctacgtcgtcggcaacgggaccgagggatgcctgccggccttccctccgcaggtctttacgctgccgcagtacggttacgcgacgctgaaccgcgacaacacagaaaatcccaccgagaggagcagcttcttctgcctagagtactttcccagcaagatgctgagaacgggcaacaactttgagtttacctacaactttgaggaggtgcccttccactccagcttcgctcccagtcagaacctcttcaagctggccaacccgctggtgggccagtacttgtaccgcttcgtgagcacaaataacactggcggagtccagttcaacgagaacctggccgggagatacgccaacacctacaaaaactggttcccggggcccatgggccgaacccagggctggaacctgggctccggggtcaaccgcgccagtgtcagcgccttcgccacgaccaataggatggagctcgagggcgcgagttaccaggtgcccccgcagccgaacggcatgaccaacaacctccagggcagcaacacctatgccctggagaacactatgatcttcaacagccagccggcgaacccgggcaccaccgccacgtacctcgagggcaacatgctcatcaccagcgagagcgagacgcagccggtgaaccgcgtggcgtacaacgtcggcgggcagatggccaccaacaaccagagctccaccactgcccccgcgaccggcacgtacaacctccaggaaatcgtgcccggcagcgtgtggatggagagggacgtgtacctccaaggacccatctgggccaagatcccagagacgggggcgcactttcacccctctccggccatgggcggattcggactcaaacacccaccgcccatgatgctcatcaagaacacgcctgtgcccggaaatatcaccagcttctcggacgtgcccgtcagcagcttcatcacccagtacagcaccgggcaggccaccgtggagatggagtgggagctcaagaaggaaaactccaagaggtggaacccagagatccagtacacaaacaactacaacgacccccagtttgtggactttgccccggacagcaccggggaatacagaaccaccagacctatcggaacccgataccttacccgacccctttaa

SEQ ID NO: 803 - DNA, 2175 bp, Artificial Sequence
  Description of Artificial Sequence: Synthetic polynucleotide
atgtcttttgttgatcaccctccagattggttggaagaagttggtgaaggtcttcgcgagtttttgggccttgaagcgggcccaccgaaaccaaaacccaatcagcagcatcaagatcaagcccgtggtcttgtgctgcctggttataactatctcggacccggaaacggcctcgatcgaggagagcctgtcaacagggcagacgaggtcgcgcgagagcacgacatctcgtacaacgagcagcttgaggcgggagacaacccctacctcaagtacaaccacgcggacgccgagtttcaggagaagctcgccgacgacacatccttcgggggaaacctcggaaaggcagtctttcaggccaagaaaagggttctcgaaccttttggcctggttgaagagggtgctaagacggcccctaccggaaagcggatagacgaccactttccaaaaagaaagaaggcccggaccgaagaggactccaagccttccacctcgtcagacgccgaagctggacccagcggatcccagcagctgcaaatcccagcccaaccagcctcaagtttgggagctgatacaatgtctgcgggaggtggcggcccattgggcgacaataaccaaggtgccgatggagtgggcaatgcctcgggagattggcattgcgattccacgtggatgggggacagagtcgtcaccaagtccacccgaacctgggtgctgcccagctacaacaaccaccagtaccgagagatcaaaagcggctccgtcgacggaagcaacgccaacgcctactttggatacagcaccccctgggggtactttgactttaaccgcttccacagccactggagcccccgagactggcaaagactcatcaacaactactggggcttcagaccccggtccctcagagtcaaaatcttcaacattcaagtcaaagaggtcacggtgcaggactccaccaccatcatcgccaacaacctcacctccaccgtccaagtgtttacggacgacgactaccagctgccctacgtcgtcggcaacgggaccgagggatgcctgccggccttccctccgcaggtctttacgctgccgcagtacggttacgcgacgctgaaccgcgacaacacagaaaatcccaccgagaggagcagcttcttctgcctagagtactttcccagcaagatgctgagaacgggcaacaactttgagtttacctacaactttgaggaggtgcccttccactccagcttcgcccccagtcagaacctcttcaagctggccaacccgctggtggaccagtacttgtaccgcttcgtgagcacaaataacactggcggagtccagttcaacaagaacctggccgggagatacgccaacacctacaaaaactggttcccggggcccatgggccgaacccagggctggaacctgggctccggggtcaaccgcgccagtgtcagcgccttcgccacgaccaataggatggagctcgagggcgcgagttaccaggtgcccccgcagccgaacggcatgaccaacaacctccagggcagcaacacctatgccctggagaacactatgatcttcaacagccagccggcgaacccgggcaccaccgccacgtacctcgagggcaacatgctcatcaccagcgagagcgagacgcagccggtgaaccgcgtggcgtacaacgtcggcgggcagatggccaccaacaaccagagctccaccactgcccccgcgaccggcacgtacaacctccaggaaatcgtgcccggcagcgtgtggatggagagggacgtgtacctccaaggacccatctgggccaagatcccagagacgggggcgcactttcacccctctccggccatgggcggattcggactcaaacacccaccgcccatgatgctcatcaagaacacgcctgtgcccggaaatatcaccagcttctcggacgtgcccgtcagcagcttcatcacccagtacagcaccgggcaggtcaccgtggagatggagtgggagctcaagaaggaaaactccaagaggtggaacccagagatccagtacacaaacaactacaacgacccccagtttgtggactttgccccggacagcaccggggaatacagaaccaccagacctatcggaacccgataccttacccgacccctttaa

SEQ ID NO: 804 - DNA, 2175 bp, Artificial Sequence
  Description of Artificial Sequence: Synthetic polynucleotide
atgtcttttgttgatcaccctccagattggttggaagaagttggtgaaggtcttcgcgagtttttgggccttgaagcgggcccaccgaaaccaaaacccaatcagcagcatcaagatcaagcccgtggtcttgtgctgcctggttataactatctcggacccggaaacggtctcgatcgaggagagcctgtcaacagggcagacgaggtcgcgcgagagcacgacatctcgtacaacgagcagcttgaggcgggagacaacccctacctcaagtacaaccacgcggacgccgagtttcaggagaagctcgccgacgacacatccttcgggggaaacctcggaaaggcagtctttcaggccaagaaaagggttctcgaaccttttggcctggttgaagagggtgctaagacggcccctaccggaaagcggatagacgaccactttccaaaaagaaagaaggcccggaccgaagaggactccaagccttccacctcgtcagacgccgaagctggacccagcggatcccagcagctgcaaatcccagcccaaccagcctcaagtttgggagctgatacaatgtctgcgggaggtggcggcccattgggcgacaataaccaaggtgccgatggagtgggcaatgcctcgggagattggcattgcgattccacgtggatgggggacagagtcgtcaccaagtccacccgaacctgggtgctgcccagctacaacaaccaccagtaccgagagatcaaaagcggctccgtcgacggaagcaacgccaacgcctactttggatacagcaccccctgggggtactttgactttaaccgcttccacagccactggagcccccgagactggcaaagactcatcaacaactactggggcttcagaccccggtccctcagagtcaaaatcttcaacattcaagtcaaagaggtcacggtgcaggactccaccaccaccatcgccaacaacctcacctccaccgtccaagtgtttacggacgacgactaccagctgccctacgtcgtcggcaacgggaccgagggatgcctgccggccttccctccgcaggtctttacgctgccgcagtacggttacgcgacgctgaaccgcgacaacacagaaaatcccaccgagaggagcagcttcttctgcctagagtactttcccagcaagatgctgagaacgggcaacaactttgagtttacctacaactttgaggaggtgcccttccactccagcttcgctcccagtcagaacctcttcaagctggccaacccgctggtggaccagtacttgtaccgcttcgtgagcacaaataacactggcggagtccagttcaacaagaacctggccgggagatacgccaacacctacaaaaactggttcccggggcccatgggccgaacccagggctggaacctgggctccggggtcaaccgcgccagtgtcagcgccttcgccacgaccaataggatggagctcgagggcgcgagttaccaggtgcccccgcagccgaacggcatgaccaacaacctccagggcagcaacacctatgccctggagaacactatgatcttcaacagccagccggcgaacccgggcaccaccgccacgtacctcgagggcaacatgctcatcaccagcgagagcgagacgcagccggtgaaccgcgtggcgtacaacgtcggcgggcagatggccaccaacaaccagagctccaccactgcccccgcgaccggcacgtacaacctccaggaaatcgtgcccggcagcgtgtggatggagagggacgtgtacctccaaggacccatctgggccaagatcccagagacgggggcgcactttcacccctctccggccatgggcggattcggactcaaacacccaccgcccatgatgctcatcaagaacacgcctgtgcccggaaatatcaccagcctctcggacgtgcccgtcagcagcttcatcacccagtacagcaccgggcaggtcaccgtggagatggagtgggagctcaagaaggaaaactccaagaggtggaacccagagatccagtacacaaacaactacaacgacccccagtttgtggactttgccccggacagcaccggggaatacagaaccaccagacctatcggaacccgataccttacccgacccctttaa

SEQ ID NO: 805 - DNA, 2175 bp, Artificial Sequence
  Description of Artificial Sequence: Synthetic polynucleotide
atgtcttttgttgatcaccctccagattggttggaagaagttggtgaaggtcttcgcgagtttttgggccttgaagcgggcccaccgaaaccaaaacccaatcagcagcatcaagatcaagcccgtggtcttgtgctgcctggttataactatctcggacccggaaacggtctcgatcgaggagagcctgccaacagggcagacgaggtcgcgcgagagcacgacatctcgtacaacgagcagcttgaggcgggagacaacccctacctcaagtacaaccacgcgggcgccgagtttcaggagaagctcgccgacgacacatccttcgggggaaacctcggaaaggcagtctttcaggccaagaaaagggttctcgaaccttttggcctggttgaagagggtgctaagacggcccctaccggaaagcggatagacgaccactttccaaaaagaaagaaggcccggaccgaagaggactccaagccttccacctcgtcagacgccgaagctggacccagcggatcccagcagctgcaaatcccagcccaaccagcctcaagtttgggagctgatacaatgtctgcgggaggtggcggcccattgggcgacaataaccaaggtgccgatggagtgggcaatgcctcgggagattggcattgcgattccacgtggatgggggacagagtcgtcaccaagtccacccgaacctgggtgctgcccggctacaacaaccaccagtaccgagagatcaaaagcggctccgtcgacggaagcaacgccaacgcctactttggatacagcaccccctgggggtactttgactttaaccgcttccacagccactggagcccccgagactggcaaagactcatcaacaactactggggcttcagaccccggtccctcagagtcaaaatcttcaacattcaagtcaaagaggtcacggtgcaggactccaccaccaccatcgccaacaacctcacctccaccgtccaagtgtttacggacgacgactaccagctgccctacgtcgtcggcaacgggaccgagggatgcctgccggccttccctccgcaggtctttacgctgccgcagtacggttacgcgacgctgaaccgcgacaacacagaaaatcccaccgagaggagcagcttcttctgcctagagtactttcccagcaagatgctgagaacgggcaacaactttgagtttacctacaactttgaggaggtgcccttccactccagcttcgctcccagtcagaacctcttcaagctggccaacccgctggtggaccagtacttgtaccgcttcgtgagcacaaataatactggcggagtccagttcaacaagaacctggccgggagatacgccaacacctacaaaaactggttcccggggcccatgggccgaacccagggctggaacctgggctccggggtcaaccgcgccagtgtcagcgccttcgccacgaccaataggatggagctcgagggcgcgagttaccaggtgcccccgcagccgaacggcatgaccaacaacctccagggcagcaacacctatgccctggagaacactatgatcttcaacagccagccggcgaacccgggcaccaccgccacgtacctcgagggcaacatgctcatcaccagcgagagcgagacgcagccggtgaaccgcgtggcgtacaacgtcggcgggcagatggccaccaacaaccagagctccaccactgcccccgcgaccggcacgtacaacctccaggaaatcgtgcccggcagcgtgtggatggagagggacgtgtacctccaaggacccatctgggccaagatcccagagacgggggcgcactttcacccctctccggccatgggcggattcggactcaaacacccaccgcccatgatgctcatcaagaacacgcctgtgcccggaaatatcaccagcttctcggacgtgcccgtcagcagcttcatcacccagtacagcaccgggcaggtcaccgtggagatggagtgggagctcaagaaggaaaactccaagaggtggaacccagagatccagtacacaaacaactacaacgacccccagtttgtggactttgccccggacagcaccggggaatacagaaccaccagacctatcggaacccgataccttacccgacccctttaa

SEQ ID NO: 806 - DNA, 2175 bp, Artificial Sequence
  Description of Artificial Sequence: Synthetic polynucleotide
atgtcttttgttgatcaccctccagattggttggaagaagttggtgaaggtcttcgcgagtttttgggccttgaagcgggcccaccgaaaccaaaacccaatcagcagcatcaagatcaagcccgtggtcttgtgctgcctggttataactatctcggacccggaaacggtctcgatcgaggagagcctgtcaacagggcagacgaggtcgcgcgagagcacgacatctcgtacaacgagcagcttgaggcgggagacaacccctacctcaagtacaaccacgcggacgccgagtttcaggagaagctcgccgacgacacatccttcgggggaaacctcggaaaggcagtctttcaggccaagaaaagggttctcgaaccttttggcctggttgaagagggtgctaagacggcccctaccggaaagcggatagacgaccactttccaaaaagaaagaaggcccggaccgaagaggactccaagcctcccacctcgtcagacgccgaagctggacccagcggatcccagcagctgcaaatcccagcccaaccagcctcaagtttgggagctgatacaatgtctgcgggaggtggcggcccattgggcgacaataaccaaggtgccgatggagtgggcaatgcctcgggagattggcattgcgattccacgtggatgggggacagagtcgtcaccaagtccacccgaacctgggtgctgcccagctacaacaaccaccagtaccgagagatcaaaagcggctccgtcgacggaagcaacgccaacgcctactttggatacagcaccccctgggggtactttgactttaaccgcttccacagccactggagcccccgagactggcaaagactcatcaacaactactggggcttcagaccccggtccctcagagtcaaaatcttcaacattcaagtcaaagaggtcacggtgcaggactccgccaccaccatcgccaacaacctcacctccaccgtccaagtgtttacggacgacgactaccagctgccctacgtcgtcggcaacgggaccgagggatgcctgccggccttccctccgcaggtctttacgctgccgcagtacggttacgcgacgctgaaccgcgacaacacagaaaatcccaccgagaggagcagcttcttctgcctagagtactttcccagcaagatgctgagaacgggcaacaactttgagtttacctacaactttgaggaggtgcccttccactccagcttcgctcccagtcagaacctcttcaagctggccaacccgctggtggaccagtacttgtaccgcttcgtgagcacaaataacactggcggagtccagttcaacaagaacctggccgggagatacgccaacacctacaaaaactggttcccggggcccatgggccgaacccagggctggaacctgggctccggggtcaaccgcgccagtgtcagcgccttcgccacgaccaataggatggagctcgagggcgcgagttaccaggtgcccccgcagccgaacggcatgaccaacaacctccagggcagcaacacctatgccctggagaacactatgatcttcaacagccagccggcgaacccgggcaccaccgccacgtacctcgagggcaacatgctcatcaccagcgagagcgagacgcagccggtgaaccgcgtggcgtacaacgtcggcgggcagatggccaccaacaaccagagctccaccactgcccccgcgaccggcacgtacaacctccaggaaatcgtgcccggcagcgtgtggatggagagggacgtgtacctccaaggacccatctgggccaagatcccagagacgggggcgcactttcacccctctccggccatgggcggattcggactcaaacacccaccgcccatgatgctcatcaagaacacgcctgtgcccggaaatatcaccagcttctcggacgtgcccgtcagcagcttcatcacccagtacagcaccgggcaggtcaccgtggagatggagtgggagctcaagaaggaaaactccaagaggtggaacccagagatccagtacacaaacaactacaacgacccccagtttgtggactttgccccggacagcaccggggaatacagaaccaccagacctatcggaacccgataccttacccgacccctttaa

SEQ ID NO: 807 - DNA, 2175 bp, Artificial Sequence
  Description of Artificial Sequence: Synthetic polynucleotide
atgtcttttgttgatcaccctccagattggttggaagaagttggtgaaggtcttcgcgagtttttgggccttgaagcgggcccaccgaaaccaaaacccaatcagcagcatcaagatcaagcccgtggtcttgtgctgcctggttataactatctcggacccggaaacggtctcgatcgaggagagcctgtcaacagggcagacgaggtcgcgcgagagcacgacatctcgtacaacgagcagcttgaggcgggagacaacccctacctcaagtacaaccacgcggacgccgagtttcaggagaagctcgccgacgacacatccttcgggggaaacctcggaaaggcagtctttcaggccaagaaaagggttctcgaaccttttggcctggttgaagagggtgctaagacggcccctaccggaaagcggatagacgaccactttccaaaaagaaagaaggcccggaccgaagaggactccaagccttccacctcgtcagacgccgaagctggacccagcggatcccagcagccgcaaatcccagcccaaccagcctcaagtttgggagctgatacaatgtctgcgggaggtggcggcccattgggcgacaataaccaaggtgccgatggagtgggcaatgcctcgggagattggcattgcgattccacgtggatgggggacagagtcgtcaccaagtccacccgaacctgggtgctgcccagctacaacaaccaccagtaccgagagatcaaaagcggctccgtcgacggaagcaacgccaacgcctactttggatacagcaccccctgggggtactttgactttaaccgcttccacagccactggagcccccgagactggcaaagactcatcaacaactactggggcttcagaccccggtccctcagagtcaaaatcttcaacattcaagtcaaagaggtcacggtgcaggactccaccaccaccatcgccaacaacctcacctccaccgtccaagtgtttacggacgacgactaccagctgccctacgtcgtcggcaacgggaccgagggatgcctgccggccttccctccgcaggtctttacgctgccgcagtacggttacgcgacgctgaaccgcgacaacacagaaaatcccaccgagaggagcagcttcttctgcctagagtactttcccagcaagatgctgagaacgggcaacaactttgagtttacctacaactttgaggaggtgcccttccactccagcttcgctcccagtcagaacctcttcaagctggccaacccgctggtggaccagtacttgtaccgcttcgtgagcacaaataacactggcggagtccagttcaacaagaacctggccgggagatacgccaacacctacaaaaactggttcccggggcccatgggccgaacccagggctggaacctgggctccggggtcaaccgcgccagtgtcagcgccttcgccacgaccaataggatggagctcgagggcgcgagttaccaggtgcccccgcagccgaacggcatgaccaacaacctccagggcagcaacacctatgccctggagaacactatgatcttcaacagccagccggcgaacccgggcaccaccgccacgtacctcgagggcaacatgctcatcaccagcgagagcgagacgcagccggtgaaccgcgtggcgtacaacgtcggcgggcagatggccaccaacaaccagagctccaccactgcccccgcgaccggcacgtacaacctccaggaaatcgtgcccggcagcgtgtggatggagagggacgtgtacctccaaggacccatctgggccaagatcccagagacgggggcgcactttcacccctctccggccatgggcggattcggactcaaacacccaccgcccatgatgctcatcaagaacacgcctgcgcccggaaatatcaccagcttctcggacgtgcccgtcagcagcttcatcacccagtacagcaccgggcaggtcaccgtggagatggagtgggagctcaagaaggaaaactccaagaggtggaacccagagatccagtacacaaacaactacaacgacccccagtttgtggactttgccccggacagcaccggggaatacagaaccaccagacctatcggaacccgataccttacccgacccctttaa

SEQ ID NO: 808 - DNA, 2175 bp, Artificial Sequence
  Description of Artificial Sequence: Synthetic polynucleotide
atgtcttttgttgatcaccctccagattggttggaagaagttggtgaaggtcttcgcgagtttttgggccttgaagcgggcccaccgaaaccaaaacccaatcagcagcatcaagatcaagcccgtggtcttgtgctgcctggttataactatctcggacccggaaacggtctcgatcgaggagagcctgtcaacagggcagacgaggtcgcgcgagagcacgacatctcgtacaacgagcagcttgaggcgggagacaacccctacctcaagtacaaccacgcggacgccgagtttcaggagaagctcgccgacgacacatccttcgggggaaacctcggaaaggcagtctttcaggccaagaaaagggttctcgaaccttttggcctggttgaagagggtgctaagacggcccctaccggaaagcggatagacgaccactttccaaaaagaaagaaggcccggaccgaagaggactccaagcctcccacctcgtcagacgccgaagctggacccagcggatcccagcagctgcaaatcccagcccaaccagcctcaagtttgggagctgatacaatgtctgcgggaggtggcggcccattgggcgacaataaccaaggtgccgatggagtgggcaatgcctcgggagattggcattgcgattccacgtggatgggggacagagtcgtcaccaagtccacccgaacctgggtgctgcccagctacaacaaccaccagtaccgagagatcaaaagcggctccgtcgacggaagcaacgccaacgcctactttggatacagcaccccctgggggtactttgactttaaccgcttccacagccactggagcccccgagactggcaaagactcatcaacaactactggggcttcagaccccggtccctcagagtcaaaatcttcaacattcaagtcaaagaggtcacggtgcaggactccaccaccaccatcgccaacaacctcacctccaccgtccaagtgtttacggacgacgactaccagctgccctacgtcgtcggcaacgggaccgagggatgcctgccggccttccctccgcaggtctttacgctgccgcagtacggttacgcgacgctgaaccgcgacaacacagaaaatcccaccgagaggagcagcttcttctgcctagagtactttcccagcaagatgctgagaacgggcaacaactttgagtttacctacaactttgaggaggtgcccttccactccagcttcgctcccagtcagaacctcttcaagctggccaacccgctggtggaccagtacttgtaccgcttcgtgagcacaaataacactggcggagtccagttcaacaagaacctggccgggagatacgccaacacctacaaaaactggttcccggggcccatgggccgaacccagggctggaacctgggctccggggtcaaccgcgccagtgtcagcgccttcgccacgaccaataggatggagctcgagggcgcgagttaccaggtgcccccgcagccgaacggcatgaccaacaacctccagggcagcaacacctatgccctggagaacactatgatcttcaacagccagccggcgaacccgggcaccaccgccacgtacctcgagggcaacatgctcatcaccagcgagagcgagacgcagccggtgaaccgcgtggcgtacaacgtcggcgggcagatggccaccaacaaccagagctccaccactgcccccgcgaccggcacgtacaacctccaggaaatcgtgcccggcagcgtgtggatggagagggacgtgtacctccaaggacccatctgggccaagatcccagagacgggggcgcactttcacccctctccggccatgggcggattcggactcaaacacccaccgcccatgatgctcatcaagaacacgcctgtgcccggaaatatcaccagcttctcggacgtgcccgtcagcagcttcatcacccagtacagcaccgggcaggtcaccgtggagatggagtgggagctcaagaaggaaaactccaagaggtggaacccagagatccagtacacaaacaactacaacgacccccagtttgtggactttgccccggacagcaccggggaatacagaaccaccagacctatcggaacccgataccttacccgacccctttaa

SEQ ID NO: 809 - DNA, 2175 bp, Artificial Sequence
  Description of Artificial Sequence: Synthetic polynucleotide
atgtcttttgttgatcaccctccagattggttggaagaagttggtgaaggtcttcgcgagtttttgggccttgaagcgggcccaccgaaaccaaaacccaatcagcagcatcaagatcaagcccgtggtcttgtgctgcctggttataactatctcggacccggaaacggtctcgatcgaggagagcctgtcaacagggcagacgaggtcgcgcgagagcacgacatctcgtacaacgagcagcttgaggcgggagacaacccctacctcaagtacaaccacgcggacgccgagtttcaggagaagctcgccgacgacacatccttcgggggaaacctcggaaaggcagtctttcaggccaagaaaagggttctcgaaccttttggcctggttgaagagggtgctaagacggcccctaccggaaagcggatagacgaccactttccaaaaagaaagaaggcccggaccgaagaggactccaagcctcccacctcgtcagacgccgaagctggacccagcggatcccagcagctgcaaatcccagcccaaccagcctcaagtttgggagctgatacaatgtctgcgggaggtggcggcccattgggcgacaataaccaaggtgccgatggagtgggcaatgcctcgggagattggcattgcgattccacgtggatgggggacagagtcgtcaccaagtccacccgaacctgggtgccgcccagctacaacaaccaccagtaccgagagatcaaaagcggctccgtcgacggaagcaacgccaacgcctactttggatacagcaccccctgggggtactttgactttaaccgcttccacagccactggagcccccgagactggcaaagactcatcaacaactactggggcttcagaccccggtccctcagagtcaaaatcttcaacattcaagtcaaagaggtcacggtgcaggactccaccaccaccatcgccaacaacctcacctccaccgtccaagtgtttacggacgacgactaccagctgccctacgtcgtcggcaacgggaccgagggatgcctgccggccttccctccgcaggtctttacgctgccgcagtacggttacgcgacgctgaaccgcgacaacacagaaaatcccaccgagaggagcagcttcttctgcctagagtactttcccagcaagatgctgagaacgggcaacaactttgagtttacctacaactttgaggaggtgcccttccactccagcttcgctcccagtcagaacctcttcaagctggccaacccgctggtggaccagtacttgtaccgcttcgtgagcacaaataacactggcggagtccagttcaacaagaacctggccgggagatacgccaacacctacaaaaactggttcccggggcccatgggccgaacccagggctggaacctgggctccggggtcaaccgcgccagtgtcagcgccttcgccacgaccaataggatggagctcgagggcgcgagttaccaggtgcccccgcagccgaacggcatgaccaacaacctccagggcagcaacacctatgccctggagaacactatgatcttcaacagccagccggcgaacccgggcaccaccgccacgtacctcgagggcaacatgctcatcaccagcgagagcgagacgcagccggtgaaccgcgtggcgtacaacgtcggcgggcagatggccaccaacaaccagagctccaccactgcccccgcgaccggcacgtacaacctccaggaaatcgtgcccggcagcgtgtggatggagagggacgtgtacctccaaggacccatctgggccaagatcccagagacgggggcgcactttcacccctctccggccatgggcggattcggactcaaacacccaccgcccatgatgctcatcaagaacacgcctgtgcccggaaatatcaccagcttctcggacgtgcccgtcagcagcttcatcacccagtacagcaccgggcaggtcgccgtggagatggagtgggagctcaagaaggaaaactccaagaggtggaacccagagatccagtacacaaacaactacaacgacccccagtttgtggactttgccccggacagcaccggggaatacagaaccaccagacctatcggaacccgataccttacccgacccctttaa

SEQ ID NO: 810 - DNA, 2175 bp, Artificial Sequence
  Description of Artificial Sequence: Synthetic polynucleotide
atgtcttttgttgatcaccctccagattggttggaagaagttggtgaaggtcttcgcgagtttttgggccttgaagcgggcccaccgaaaccaaaacccaatcagcagcatcaagatcaagcccgtggtcttgtgctgcctggttataactatctcggacccggaaacggtctcgatcgaggagagcctgtcaacagggcagacgaggtcgcgcgagagcacgacatctcgtacaacgagcagcttgaggcgggagacaacccctacctcaagtacaaccacgcggacgccgagtttcaggagaagctcgccgacgacacatccttcgggggaaacctcggaaaggcagtctttcaggccaagaaaagggttctcgaaccttttggcctggttgaagagggtgctaagacggcccctaccggaaagcggatagacgaccactttccaaaaagaaagaaggcccggaccgaagaggactccaagccttccacctcgtcagacgccgaagctggacccagcggatcccagcagctgcaaatcccagcccaaccagcctcaagtttgggagctgatacaatgtctgcgggaggtggcggcccattgggcgacaataaccaaggtgccgatggagtgggcaatgcctcgggagattggcattgcgattccacgtggatgggggacagagtcgtcaccaagtccacccgaacctgggtgctgcccagctacaacaaccaccagtaccgagagatcaaaagcggctccgtcgacggaagcaacgccaacgcctactttggatacagcaccccctgggggtactttgactttaaccgcttccacagccactggagcccccgagactggcaaagactcatcaacaactactggggcttcagaccccggtccctcagagtcaaaatcttcaacattcaagtcaaagaggtcacggtgcaggactccaccaccaccatcgccaacaacctcacctccaccgtccaagtgtttacggacgacgactaccagctgccctacgtcgtcggcaacgggaccgagggatgcctgccggccttccctccgcaggtctttacgctgccgcagtacggttacgcgacgctgaaccgcgacaacacagaaaatcccaccgagaggagcagcttcttctgcctagagtactttcccagcaagatgctgagaacgggcaacaactttgagtttacctacaactttgaggaggtgcccttccactccagcttcgctcccagtcagaacctcttcaagctggccaacccgctggtggaccagtacttgtaccgcttcgtgagcacaaataacactggcggagtccagttcaacaagaacctggccgggagatacgccaacacctacaaaaactggttcccggggcccatgggccgaacccagggctggaacctgggctccggggtcaaccgcgccagtgtcagcgccttcgccacgaccaataggatggagctcgagggcgcgagttaccaggtgcccccgcagccgaacggcatgaccaacaacctccagggcagcaacacctatgccctggagaacactatgatcttcaacagccagccggcgaacccgggcaccaccgccacgtacctcgagggcaacatgctcatcaccagcgagagcgagacgcagccggtgaaccgcgtggcgtacaacgtcggcgggcagatggccaccaacaaccagagctccaccactgcccccgcgaccggcacgtacaacctccaggaaatcgtgcccggcagcgtgtggatggagagggacgtgtacctccaaggacccatctgggccaagatcccagagacgggggcgcactttcacccctctccggccatgggcggattcggactcaaacacccaccgcccatgatgctcatcaagaacacgcctgcgcccggaaatatcaccagcttctcggacgtgcccgtcagcagcttcatcacccagtacagcaccgggcaggtcaccgtggagatggagtgggagctcaagaaggaaaactccaagaggtggaacccagagatccagtacacaaacaactacaacgacccccagtttgtggactttgccccggacagcaccggggaatacagaaccaccagacctatcggaacccgataccttacccgacccctttaa

SEQ ID NO: 811 - DNA, 2175 bp, Artificial Sequence
  Description of Artificial Sequence: Synthetic polynucleotide
atgtcttttgttgatcaccctccagattggttggaagaagttggtgaaggtcttcgcgagtttttgggccttgaagcgggcccaccgaaaccaaaacccaatcagcagcatcaagatcaagcccgtggtcttgtgctgcctggttataactatctcggacccggaaacggtctcgatcgaggagagcctgtcaacagggcagacgaggtcgcgcgagagcacgacatctcgtacaacgagcagcttgaggcgggagacaacccctacctcaagtacaaccacgcggacgccgagtttcaggagaagctcgccgacgacacatccttcgggggaaacctcggaaaggcagtctttcaggccaagaaaagggttctcgaaccttttggcctggctgaagagggtgctaagacggcccctaccggaaagcggatagacgaccactttccaaaaagaaagaaggcccggaccgaagaggactccaagccttccacctcgtcagacgccgaagctggacccagcggatcccagcagctgcaaatcccagcccaaccagcctcaagtttgggagctgatacaatgtctgcgggaggtggcggcccattgggcgacaataaccaaggtgccgatggagtgggcaatgcctcgggagattggcattgcgattccacgtggatgggggacagagtcgtcaccaagtccacccgaacctgggtgctgcccagctacaacaaccaccagtaccgagagatcaaaagcggctccgtcgacggaagcaacgccaacgcctactttggatacagcaccccctgggggtactttgactttaaccgcttccacagccactggagcccccgagactggcaaagactcatcaacaactactggggcttcagaccccggtccctcagagccaaaatcttcaacattcaagtcaaagaggtcacggtgcaggactccaccaccaccatcgccaacaacctcacctccaccgtccaagtgtttacggacgacgactaccagctgccctacgtcgtcggcaacgggaccgagggatgcctgccggccttccctccgcaggtctttacgctgccgcagtacggttacgcgacgctgaaccgcgacaacacagaaaatcccaccgagaggagcagcttcttctgcctagagtactttcccagcaagatgctgagaacgggcaacaaccttgagtttacctacaactttgaggaggtgcccttccactccagcttcgctcccagtcagaacctcttcaagctggccaacccgctggtggaccagtacttgtaccgcttcgtgagcacaaataacactggcggagtccagttcaacaagaacctggccgggagatacgccaacacctacaaaaactggttcccggggcccatgggccgaacccagggctggaacctgggctccggggtcaaccgcgccagtgtcagcgccttcgccacgaccaataggatggagctcgagggcgcgagttaccaggtgcccccgcagccgaacggcatgaccaacaacctccagggcagcaacacctatgccctggagaacactatgatcttcaacagccagccggcgaacccgggcaccaccgccacgtacctcgagggcaacatgctcatcaccagcgagagcgagacgcagccggtgaaccgcgtggtgcacaacgtcggcgggcagatggccaccaacaaccagagctccaccactgcccccgcgaccggcacgtacaacctccaggaaatcgtgcccggcagcgtgtggatggagagggacgtgtacctccaaggacccatctgggccaagatcccagagacgggggcgcactttcacccctctccggccatgggcggattcggactcaaacacccaccgcccatgatgctcatcaagaacacgcctgtgcccggaaatatcaccagcttctcggacgtgcccgtcagcagcttcatcacccagtacagcaccgggcaggtcaccgtggagatggagtgggagctcaagaaggaaaactccaagaggtggaacccggagatccagtacacaaacaactacaacgacccccagtttgtggactttgccccggacagcaccggggaatacagaaccaccagacctatcggaacccgataccttacccgacccctttaa

SEQ ID NO: 812 - DNA, 2175 bp, Artificial Sequence
  Description of Artificial Sequence: Synthetic polynucleotide
atgtcttttgttgatcaccctccagattggttggaagaagttggtgaaggtcttcgcgagtttttgggccttgaagcgggcccaccgaaaccaaaacccaatcagcagcatcaagatcaagcccgtggtcttgtgctgcctggttataactatctcggacccggaaacggtctcgatcgaggagagcctgtcaacagggcagacgaggtcgcgcgagagcacgacatctcgtacaacgagcagcttgaggcgggagacaacccctacctcaagtacaaccacgcggacgccgagtttcaggagaagctcgccgacgacacatccttcgggggaaacctcggaaaggcagtctttcaggccaagaaaagggttctcgaaccttttggcctggttgaagagggtgctaagacggcccctaccggaaagcggatagacgaccactttccaaaaagaaagaaggcccggaccgaagaggactccaagccttccacctcgtcagacgccgaagctggacccagcggatcccagcagctgcaaatcccagcccaaccagcctcaagtttgggagctgatacaatgtctgcgggaggtggcggcccattgggcgacaataaccaaggtgccgatggagtgggcaatgcctcgggagattggcattgcgattccacgtggatgggggacagagtcgtcaccaagtccacccgaacctgggtgctgcccagctacaacaaccaccagtaccgagagatcaaaagcggctccgtcgacggaggcaacgccaacgcctactttggatacagcaccccctgggggtactttgactttaaccgcttccacagccactggagcccccgggactggcaaagactcatcaacaactactggggcttcagaccccggtccctcagagtcaaaatcttcaacattcaagtcaaagaggtcacggtgcaggactccaccaccaccatcgccaacaacctcacctccaccgtccaagtgtttacggacgacgactaccagctgccctacgtcgtcggcaacgggaccgagggatgcctgccggccttccctccgcaggtctttacgctgccgcagtacggttacgcgacgctgaaccgcgacaacacagaaaatcccaccgagaggagcagcttcttctgcctagagtactttcccagcaagatgctgagaacgggcaacaactttgagtttacctacaactttgaggaggtgcccttccactccagcttcgctcccagtcagaacctcttcaagctggccaacccgctggtggaccagtacttgtaccgcttcgtgagcacaaataacactggcggagtccagttcaacaagaacctggccgggagatacgccaacacctacaaaaactggttcccggggcccatgggccgaacccagggctggaacctgggctccggggtcaaccgcgccagtgtcagcgccttcgccacgaccaataggatggagctcgagggcgcgagttaccaggtgcccccgcagccgaacggcatgaccaacaacctccagggcagcaacacctatgccctggagaacactatgatcttcaacagccagccggcgaacccgggcaccaccgccacgtacctcgagggcaacatgctcatcaccagcgagagcgagacgcagccggtgaaccgcgtggcgtacaacgtcggcgggcagatggccaccaacaaccagagctccaccactgcccccgcgaccggcacgtacaacctccaggaaatcgtgcccggcagcgtgtggatggagagggacgtgtacctccaaggacccatctgggccaagatcccagagacgggggcgcactttcacccctctccggccatgggcggattcggactcaaacacccaccgcccatgatgctcatcaagaacacgcctgcgcccggaaatatcaccagcttctcggacgtgcccgtcagcagcttcatcacccagtacagcaccgggcaggtcaccgtggagatggagtgggagctcaagaagggaaactccaagaggtggaacccagagatccagtacacaaacaactacaacgacccccagtttgtggactttgccccggacagcaccggggaatacagaaccaccagacctatcggaacccgataccttacccgacccctttaa

SEQ ID NO: 813 - DNA, 2175 bp, Artificial Sequence
  Description of Artificial Sequence: Synthetic polynucleotide
atgtcttttgttgatcaccctccagattggttggaagaagttggtgaaggtcttcgcgagtttttgggccttgaagcgggcccaccgaaaccaaaacccaatcagcagcatcaagatcaagcccgtggtcttgtgctgcctggttataactatctcggacccggaaacggtctcgatcgaggagagcctgtcaacagggcagacgaggtcgcgcgagagcacgacatctcgtacaacgagcagcttgaggcgggagacaacccctacctcaagtacaaccacgcggacgccgagtttcaggagaagctcgccgacgacacgtccttcgggggaaacctcggaaaggcagtctttcaggccaagaaaagggttctcgaaccttttggcctggttgaagagggtgctaagacggcccctaccggaaagcggatagacgaccactttccaaaaagaaagaaggcccggaccgaagaggactccaagccttccacctcgtcagacgccgaagctggacccagcggatcccagcagctgcaaatcccagcccaaccagcctcaagtttgggagctgatacaatgtctgcgggaggtggcggcccattgggcgacaataaccaaggtgccgatggagtgggcaatgcctcgggagattggcattgcgattccacgtggatgggggacagagtcgtcaccaagtccacccgaacctgggtgctgcccagctacaacaaccaccagtaccgagagatcaaaagcggctccgtcgacggaagcaacgccaacgcctactttggatacagcaccccctgggggtactttgactttaaccgcttccacagccactggagcccccgagactggcaaagactcatcaacaactactggggcttcagaccccggtccctcagagtcaaaatcttcaacattcaagtcaaagaggtcacggtgcaggactccaccaccaccatcgccaacaacctcacctccaccgtccaagtgtttacggacgacgactaccagctgccctacgtcgtcggcaacgggaccgagggatgcctgccggccttccctccgcaggtctttacgctgccgcagtacggttacgcgacgctgaaccgcgacaacacagaaaatcccaccgagaggagcagcttcttctgcctagagtactttcccagcaagatgctgagaacgggcaacaactttgagtttacctacaactttgaggaggtgcccttccactccagcttcgctcccagtcagaacctcttcaagctggccaacccgctggtggaccagtacttgtaccgcttcgtgagcacaaataacactggcggagtccagttcaacaagaacctggccgggagatacgccaacacctacaaaaactggttcccggggcccatgggccgaacccagggctggaacctgggctccggggtcaaccgcgccagtgtcagcgccttcgccacgaccaataggatggagctcgagggcgcgagttaccaggtgcccccgcagccgaacggcatgaccaacaacctccagggcagcaacacctatgccctggagaacactatgatcttcaacagccagccggcgaacccgggcaccaccgccacgtacctcgagggcaacatgctcatcaccagcgagagcgagacgcagccggtgaaccgcgtggcgtacaacgtcggcgggcagatggccaccaacaaccagagctccaccactgcccccgcgaccggcacgtacaacctccaggaaatcgtgcccggcagcgtgtggatggagagggacgtgtacctccaaggacccatctgggccaagatcccagagacgggggtgcactttcacccctctccggccatgggcggattcggactcaaacacccaccgcccatgatgctcatcaagaacacgcctgtgcccggaaatatcaccagcttctcggacgtgcccgtcagcagcttcatcacccagtacagcaccgggcaggtcaccgtggagatggagtgggagctcaagaaggaaaactccaagaggtggaacccagagatccagtacacaaacaactacaacgacccccagtttgtggactttgccccggacagcaccggggaatacagaaccaccagacctatcggaacccgataccttacccgacccctttaa

SEQ ID NO: 814 - DNA, 2175 bp, Artificial Sequence
  Description of Artificial Sequence: Synthetic polynucleotide
  modified_base (1652)..(1652): a, t, c, or g
atgtcttttgttgatcaccctccagattggttggaagaagttggtgaaggtcttcgcgagtttttgggccttgaagcgggcccaccgaaaccaaaacccaatcagcagcatcaagatcaagcccgtggtcttgtgctgcctggttataactatctcggacccggaaacggtctcgatcgaggagagcctgtcaacagggcagacgaggtcgcgcgagagcacgacatctcgtacaacgagcagcttgaggcgggagacaacccctacctcaagtacaaccacgcggacgccgagtttcaggagaagctcgccgacgacacatccttcgggggaaacctcggaaaggcagtctttcaggccaagaaaagggttctcgaaccttttggcctggttgaagagggtgctaagacggcccctaccggaaagcggatagacgaccactttccaaaaagaaagaaggcccggaccgaggaggactccaagccttccacctcgtcagacgccgaagctggacccagcggatcccagcagctgcaaatcccagcccaaccagcctcaagtttgggagctgatacaatgtctgcgggaggtggcggcccattgggcgacaataaccaaggtgccgatggagtgggcaatgcctcgggagattggcattgcgattccacgtggatgggggacagagtcgtcaccaagtccacccgaacctgggtgctgcccagctacaacaaccaccagtaccgagagatcaaaagcggctccgtcgacggaagcaacgccaacgcctactttggatacagcaccccctgggggtactttgactttaaccgcttccacagccactggagcccccgagactggcaaagactcatcaacaactactggggcttcagaccccggtccctcagagtcaaaatcttcaacattcaagtcaaagaggtcacggtgcaggactccaccaccaccatcgccaacaacctcacctccaccgtccaagtgtttacggacgacgactaccagctgccctacgtcgtcggcaacgggaccgagggatgcctgccggccttccctccgcaggtctttacgctgccgcagtacggttacgcgacgctgaaccgcgacaacacagaaaatcccaccgagaggagcagcttcttctgcctagagtactttcccagcaagatgctgagaacgggcaacaactttgagtttacctacaactttgaggaggtgcccttccactccagcttcgctcccagtcagaacctcttcaagctggccaacccgctggtggaccagtacttgtaccgcttcgtgagcacaaataacactggcggagtccagttcaacaagaacctggccgggagatacgccaacacctacaaaaactggttcccggggcccatgggccgaacccagggctggaacctgggctccggggtcaaccgcgccagtgtcagcgccttcgccacgaccaataggatggagctcgagggcgcgagttaccaggtgcccccgcagccgaacggcatgaccaacaacctccagggcagcaacacctatgccctggagaacactatgatcttcaacagccagccggcgaacccgggcaccaccgccacgtacctcgagggcagcatgctcatcaccancgagagcgagacgcagccggtgaaccgcgtggcgtacaacgtcggcgggcagatggccaccaacaaccagagctccaccactgcccccgcgaccggcacgtacaacctccaggaaatcgtgcccggcagcgtgtggatggagagggacgtgtacctccaaggacccatctgggccaagatcccagagacgggggcgcactttcacccctctccggccatgggcggattcggactcaaacacccaccgcccatgatgctcatcaagaacacgcctgtgcccggaaatatcaccagcttctcggacgtgcccgtcagcagcttcatcacccagtacagcaccgggcaggtcaccgtggagatggagtgggagctcaagaaggaaaactccaagaggtggaacccagagatccagtacacaaacaactacaacgacccccagtttgtggactttgccccggacagcaccggggaatacagaaccaccagacctatcggaacccgataccttacccgacccctttaa

SEQ ID NO: 815 - DNA, 2211 bp, Artificial Sequence
  Description of Artificial Sequence: Synthetic polynucleotide
atggctgctgacggttatcttccagattggctcgaggacaacctttctgaaggcattcgtgagtggtgggctctgaaacctggagtccctcaacccaaagcgaaccaacaacaccaggacaaccgtcggggtcttgtgcttccgggttacaaatacctcggacccggtaacggactcgacaaaggagagccggtcaacgaggcggacgcggcagccctcgaacacgacaaagcttacgaccagcagctcaaggccggtgacaacccgtacctcaagtacaaccacgccgacgccgagtttcaggagcgtcttcaagaagatacgtcttttgggggcaaccttggcagagcagtcttccaggccaaaaagaggatccttgagcctcttggtctggttgaggaagcagctaaaacggctcctggaaagaagaggcctgtagatcagtctcctcaggaaccggactcatcatctggtgttggcaaatcgggcaaacagcctgccagaaaaagactaaatttcggtcagactggcgactcagagtcagtcccagaccctcaacctctcggagaaccaccagcagcccccacaagtttgggatctaatacaatggcttcaggcggtggcgcaccaatggcagacaataacgagggtgccgatggagtgggtaattcctcaggaaattggcattgcgattcccaatggctgggcgacagagtcatcaccaccagcaccagaacctgggccctgcccacttacaacaaccatctctacaagcaaatctccagccaatcaggagcttcaaacgacaaccactactttggctacagcaccccttgggggtattttgactttaacagattccactgccacttctcaccacgtgactggcagcgactcattaacaacaactggggattccggcccaagaaactcagcttcaagctcttcaacatccaagttaaagaggtcacgcagaacgatggcacgacgactattgccaataaccttaccagcacggttcaagtgtttacggactcggagtatcagctcccgtacgtgctcgggtcggcgcaccaaggctgtctcccgccgtttccagcggacgtcttcatggtccctcagtatggatacctcaccctgaacaacggaagtcaagcggtgggacgctcatccttttactgcctggagtacttcccttcgcagatgctaaggactggaaataacttccaattcagctataccttcgaggatgtaccttttcacagcagctacgctcacagccagagtttggatcgcttgatgaatcctcttattgatcagtatctgtactacctgaacagaacgcaaggaacaacctctggaacaaccaaccaatcacggctgctttttagccaggctgggcctcagtctatgtctttgcaggccagaaattggctacctgggccctgctaccggcaacagagactttcaaagactgctaacgacaacaacaacagtaactttccttggacagcggccagcaaatatcatctcaatggccgcgactcgctggtgaatccaggaccagctatggccagtcacaaggacgatgaagaaaaatttttccctatgcacggcaatctaatatttggcaaagaagggacaacggcaagtaacgcagaattagataatgtaatgattacggatgaagaagagattcgtaccaccaatcctgtggcaacagagcagtatggaactgtggcaaataacttgcagagctcaaatacagctcccacgactagaactgtcaatgatcagggggccttacctggcatggtgtggcaagatcgtgacgtgtaccttcaaggacctatctgggcaaagattcctcacacggatggacactttcatccttctcctctgatgggaggctttggactgaaacatccgcctcctcaaatcatgatcaaaaatactccggtaccggcaaatcctccgacgactttcagcccggccaagtttgcttcatttatcactcagtactccactggacaggtcagcgtggaaattgagtgggagctacagaaagaaaacagcaaacgttggaatccagagattcagtacacttccaactacaacaagtctgttaatgtggactttactgtagacactaatggtgtttatagtgaacctcgccctattggaacccggtatctcacacgaaacttgtaa

SEQ ID NO: 816 - DNA, 2205 bp, Artificial Sequence; identical to SEQ ID NO: 84
  Description of Artificial Sequence: Synthetic polynucleotide

SEQ ID NO: 817 - DNA, 2234 bp, Artificial Sequence
  Description of Artificial Sequence: Synthetic polynucleotide
atgtcttttgttgatcaccctccagattggttggaagaagttggtgaaggtcttcgcgagtttttgggccttgaagcgggcccaccgaaaccaaaacccaatcagcagcatcaagatcaagcccgtggtcttgtgctgcctggttataactatctcggacccggaaacggtctcgatcgaggagagcctgtcaacagggcagacgaggtcgcgcgagagcacgacatctcgtacaacgagcagcttgaggcgggagacaacccctacctcaagtacaaccacgcggacgccgagtttcaggagaagctcgccgacgacacatccttcgggggaaacctcggaaaggcagtctttcaggccaagaaaagggttctcgaaccttttggcctggttgaagagggtgctaagacggcccctaccggaaagcggatagacgaccactttccaaaaagaaagaaggctcggaccgaagaggactccaagccttccacctcgtcagacgccgaagctggacccagcggatcccagcagctgcaaatcccagcccaaccagcctcaagtttgggagctgatacaatgtctgcgggaggtggcggcccattgggcgacaataaccaaggtgccgatggagtgggcaatgcctcgggagattggcattgcgattccacgtggatgggggacagagtcgtcaccaagtccacccgaacctgggtgctgcccagctacaacaaccaccagtaccgagagatcaaaagcggctccgtcgacggaagcaacgccaacgcctactttggatacagcaccccctgggggtactttgactttaaccgcttccacagccactggagcccccgagactggcaaagactcatcaacaactactggggcttcagaccccggtccctcagagtcaaaatcttcaacattcaagtcaaagaggtcacggtgcaggactccaccaccaccatcgccaacaacctcacctccaccgtccaagtgtttacggacgacgactaccagctgccctacgtcgtcggcaacgggaccgagggatgcctgccggccttccctccgcaggtctttacgctgccgcagtacggttacgcgacgctgaaccgcgacaacacagaaaatcccaccgagaggagcagcttcttctgcctagagtactttcccagcaagatgctgagaacgggcaacaactttgagtttacctacaactttgaggaggtgcccttccactccagcttcgctcccagtcagaacctgttcaagctggccaacccgctggtggaccagtacttgtaccgcttcgtgagcacaaataacactggcggagtccagttcaacaagaacctggccgggagatacgccaacacctacaaaaactggttcccggggcccatgggccgaacccagggctggaacctgggctccggggtcaaccgcgccagtgtcagcgccttcgccacgaccaataggatggagctcgagggcgcgagttaccaggtgcccccgcagccgaacggcatgaccaacaacctccagggcagcaacacctatgccctggagaacactatgatcttcaacagccagccggcgaacccgggcaccaccgccacgtacctcgagggcaacatgctcatcaccagcgagagcgagacgcagccggtgaaccgcgtggcgtacaacgtcggcgggcagatggccaccaacaaccagagctccaccactgcccccgcgaccggcacgtacaacctccaggaaatcgtgcccggcagcgtgtggatggagagggacgtgtacctccaaggacccatctgggccaagatcccagagacgggggcgcactttcacccctctccggccatgggcggattcggactcaaacacccaccgcccatgatgctcatcaagaacacgcctgtgcccggaaatatcaccagcttctcggacgtgcccgtcagcagcttcatcacccagtacagcaccgggcaggtcaccgtggagatggagtgggagctcaagaaggaaaactccaagaggtggaacccagagatccagtacacaaacaactacaacgacccccagtttgtggactttgccccggacagcaccggggaatacagaaccaccagacctatcggaacccgataccttacccgacccctttaacccattcatgtcgcataccctcaataaaccgtgtattcgtgtcagtaaaatactgcctc

SEQ ID NO: 818 - protein, 736 aa, Artificial Sequence
  Description of Artificial Sequence: Synthetic polypeptide
MAADGYLPDWLEDNLSEGIREWWALKPGVPQPKANQQHQDNRRGLVLPGYKYLGPGNGLDKGEPVNEADAAALEHDKAYDQQLKAGDNPYLKYNHADAEFQERLQEDTSFGGNLGRAVFQAKKRILEPLGLVEEAAKTAPGKKRPVDQSPQEPDSSSGVGKSGKQPARKRLNFGQTGDSESVPDPQPLGEPPAAPTSLGSNTMASGGGAPMADNNEGADGVGNSSGNWHCDSQWLGDRVITTSTRTWALPTYNNHLYKQISSQSGASNDNHYFGYSTPWGYFDFNRFHCHFSPRDWQRLINNNWGFRPKKLSFKLFNIQVKEVTQNDGTTTIANNLTSTVQVFTDSEYQLPYVLGSAHQGCLPPFPADVFMVPQYGYLTLNNGSQAVGRSSFYCPEYFPSQMLRTGNNFQFSYTFEDVPFHSSYAHSQSLDRLMNPLIDQYLYYLNRTQGTTSGTTNQSRLLFSQAGPQSMSLQARNWLPGPCYRQQRLSKTANDNNNSNFPWTAASKYHLNGRDSLVNPGPAMASHKDDEEKFFPMHGNLIFGKEGTTASNAELDNVMITDEEEIRTTNPVATEQYGTVANNLQSSNTAPTTRTVNDQGALPGMVWQDRDVYLQGPIWAKIPHTDGHFHPSPLMGGFGLKHPPPQIMIKNTPVPANPPTTFSPAKFASFITQYSTGQVSVEIEWELQKENSKRWNPEIQYTSNYNKSVNVDFTVDTNGVYSEPHPIGTRYLTRNL

SEQ ID NO: 819 - protein, 736 aa, Artificial Sequence
  Description of Artificial Sequence: Synthetic polypeptide
MAADGYLPDWLEDNLSEGIREWWALKPGVPQPKANQQHQDNRRGLVLPGYKYLGPGNGLDKGEPVNEADAAALEHDKAYDQQLKAGDNPYLKYNHADAEFQERLQEDTSFGGNLGRAVFQAKKRILEPLGLVEEAAKTAPGKKRPVDQSPQEPDSSSGVGKSGKQPARKRLNFGQTGDSESVPDPQPLGEPPAAPTSLGSNTMASGGGAPMADNNEGADGVGNSSGNWHCDSQWLGDRVITTSTRTWALPTYNNHLYKQISSQSGASNDNHYFGYSTPWGYFDFNRFHCHFSPRDWQRLINNNWGFRPKKLSFKLFNIQVKEVTQNDGTTTVANNLTSTVQVFTDSEYQLPYVLGSAHQGCLPPFPADVFMVPQYGYLTLNNGSQAVGRSSFYCLEYFPSQMLRTGNNFQFSYTFEDVPFHSSYAHSQSLDRLMNPLIDQYLYYLNRTQGTTSGTTNQSRLLFSQAGPQSMSLQARNWLPGPCYRQQRLSKTANDNNNSNFPWTAASKYHLNGRDSLVNPGPAMASHKDDEEKFFPMHGNLIFGKEGTTASNAELDNVMITDEEEIRTTNPVATEQYGTVANNLQSSNTAPTTRTVNDQGALPGMVWQDRDVYLQGPIWAKIPHTDGHFHPSPLMGGFGLKHPPPQIMIKNTPVPANPPTTFSPAKFASFITQYSTGQVSVEIEWELQKENSKRWNPEIQYTSNYNKSVNVDFTVDTNGVYSEPRPIGTRYLTRNL

SEQ ID NO: 820 - protein, 736 aa, Artificial Sequence
  Description of Artificial Sequence: Synthetic polypeptide
MAADGYLPDWLEDNLSEGIREWWALKPGVPQPKANQQHQDNRRGLVLPGYKYLGPGNGLDKGEPVNEADAAALEHDKAYDQQLKAGDNPYLKYNHADAEFQERLQEDTSFGGNLGRAVFQAKKRILEPLGLVEEAAKTAPGKKRPVDQSPQEPDSSSGVGKSGKQPARKRLNFGQTGDSESVPDPQPLGEPPAAPTSLGSNTMASGGGAPMADNNEGADGVGNSSGNWHCDSQWLGDRVITTSTRTWALPTYNNHLYKQISGQSGASNDNHYFGYSTPWGYFDFNRFHCHFSPRDWQRLINNNWGFRPKKLSFKLFNIQVKEVTQNDGTTTIANNLTSTVQVFTDSEYQLPYVLGSAHQGCLPPFPADVFMVPQYGYLTLNNGSQAVGRSSFYCLEYFPSQMLRTGNNFQFSYTFEDVPFHSSYAHSQSLDRLMNPLIDQYLYYLNRTQGTTSGTTNQSRLLFSQAGPQSMSLQARNWLPGPCYRQQRLSKTANGNNNSNFPWTAASKYHLNGRDSLVNPGPAMASHKDDEEKFFPMHGNLIFGKEGTTASNAELDNVMITDEEEIRTTNPVATEQCGTVANNLQSSNTAPTTRTVNDQGALPGMVWQDRDVYLQGPIWAKIPHTDGHFHPSPLMGGFGLKHPPPQIMIKNTPVPANPPTTFSPAKFASFITQYSTGQVSVEIEWELQKENSKRWNPEIQYTSNYNKSVNVDFTVDTNGVYSEPRPIGTRYLTRNL

SEQ ID NO: 821 - protein, 736 aa, Artificial Sequence
  Description of Artificial Sequence: Synthetic polypeptide
MAADGYLPDWLEDNLSEGIREWWALKPGVPQPKANQQHQDNRRGLVLPGYKYLGPGNGLDKGEPVNEADAAALEHDKAYDQQLKAGDNPYLKYNHADAEFQERLQEDTSFGGNLGRAVFQAKKRILEPLGLVEGAAKTAPGKKRPVDQSPQEPDSSSGVGKSGKQPARKRLNFGQTGDSESVPDPQPLGEPPAAPTSLGSNTMASGGGAPMADNNEGADGVGNSSGNWHCDSQWLGDRVITTSTRTWALPTYNSHLYKQISSQSGASNDNHYFGYSTPWGYFDFNRFHCHFSPRDWQRLINNNWGFRPKKLSFKLFNIQVKEVTQNDGTTTIANNLTSTVQVFTDSEYQLPYVLGSAHQGCLPPFPADAFMVPQYGYLTLNNGSQAVGRSSFYCLEYFPSQMLRTGNNFQFSYTFEDVPFHGSYAHSQSLDRLMNPLIDQYLYYLNRTQGTTSGTTNQSRLLFSQAGPQSMSLQARNWLPGPCYRQQRLSKTANDNNNSNFPWTAASKYHLNGRDSLVNPGPAMASHKDDEEKFFPMHGNLIFGKEGTTASNAELDNVMITDEEEIRTTNPVATEQYGTVANNLQSSNTAPTTRTVNDQGALPGMVWQDRDVYLQGPIWAKIPHTDGHFHPSPLMGGFGLKHPPPQIMIKNTPVPANPPTTFSPAKFASFITQYSTGQVSVEIEWELQKENSKRWNPEIQYTSNYNKSVNVDFTVDTNGVYSEPRPIGTRYLTRNS

SEQ ID NO: 822 - protein, 736 aa, Artificial Sequence
  Description of Artificial Sequence: Synthetic polypeptide
MAADGYLPDWLEDNLSEGIREWWALKPGVPQPKANQQHQDNRRGLVLPGYKYLGPGNGLDKGEPVNEADAAALEHDKAYDQQLKAGDNPYLKYNHADAEFQERLQEDTSFGGNLGRAVFQAKKRILEPLGLVEGAAKTAPGKKRPVDQSPQEPDSSSGVGKSGKQLARKRLNFGQTGDSESVPDPQPLGEPPAAPTSLGSNTMASGGGAPMADNNEGADGVGNSSGNWHCDSQWLGDRVITTSTRTWALPTYNSHLYKQISGQSGASNDNHYFGYSTPWGYFDFNRFHCHFSPRDWQRLINNNWGFRPKKLSFKLFNIQVKEVTQNDGTTTIANNLTSTVQVFTDSEYQLPYVLGSAHQGCLPPFPADVFMVPQYGYLTLNNGSQAVGRSSFYCLEYFPSQMLRTGNNFQFSYTFEDVPFHSSYAHSQSLDRLMNPLIDQYLYYLNRTQGTTSGTTNQSRLLFSQAGPQSMSLQARNWLPGPCYRQQRLSKTANDNNNSNFPWTAASKYHLNGRDSLVNPGPAMASHKDDEEKFFPMHGNLIFGKEGTTASNAELDNVMITDEEEIRTTNPVATEQYGTVANNLQSSNTAPTTRTVNDQGALPGMVWQDRDVYLQGPIWAKIPHTDGHFHPSPLMGGFGLKHPPPQIMIKNTPVPANPPTTFSPAKFASFITQYSTGQVSVEIEWELQKENSKRWNPEIQYTSNYNKSVNVDFTVDTNGVYSEPRPIGTRYLTRNL

SEQ ID NO: 823 - protein, 736 aa, Artificial Sequence
  Description of Artificial Sequence: Synthetic polypeptide
MAADGYLPDWLEDNLSEGIREWWALKPGVPQPKANQQHQDDRRGLVLPGYKYLGPGNGLDKGEPVNEADAAALEHDKAYDQQLKAGDNPCLKYNHADAEFQERLQEDTSFGGNLGRAVFQAKKRILEPLGLVEEAAKTAPGKKRPVDQSPQEPDSSSGVGKSGKQPARKRLNFGQTGDSESVPDPQPLGEPPAAPTSLGSNTMASGGSAPMADNNEGADGVGNSSGNWHCDSQWLGDRVITTSTRTWALPTYNNHLYKQISSQSGASNDNHYFGYSTPWGYFDFNRFHCHFSPRDWQRLINNNWGFRPKKLSFKLFNIQVKEVTQNDGTTTIANNLTSTVQVFTDSEYQLPYVLGSAHQGCLPPFPADVFMVPQYGYLTLNNGSQAVGRSSFYCLEYFPSQMLRTGNNFQFSYTFEDVPFHSSYAHSQSLDRLMDPLIDQYLYYLNRTQGTTSGTTNQSRLLFSQAGPQSMSLQARNWLPGPCYRQQRLSKTANDNNNSNFPWTAASKYHLNGRDSLVNPGPAMASHKDDEEKFFPMHGNLIFGKEGTTASNAELDNVMITDEEEIRTTNPVATEQYGTVANNLQSSNTAPTTRTVNDQGALPGMVWQDRDVYLQGPIWAKIPHTDGHFHPSPLMGGFGLKHPPPQIMIKNTPVPANPPTTFSPAKFASFITQYSTGQVSVEIEWELQKENSKRWNPEIQYTSNYNKSVNVDFTVDTNGVYSEPRPIGTRYLTRNL

SEQ ID NO: 824 - protein, 736 aa, Artificial Sequence
  Description of Artificial Sequence: Synthetic polypeptide
MAADGYLPDWLEDNLSEGIREWWALKPGVPQPKANQQHQDDRRGLVLPGYKYLGPGNGLDKGEPVNEADAAALEHDKAYDQQLKAGDNPYLKYNHADAEFQERLQEDTSFGGNLGRAVFQAKKRILEPLGLVEEAAKTAPGKKRPVDQSPQEPDSSSGVGKSGKQPARKRLNFGQTGDSESVPDPQPLGEPPAAPTSLGSNTMASGGGAPMADNNEGADGVGNSSGNWHCDSQWLGNRVITTSTRTWALPTYNNHLYKQISSQSGASNDNHYFGYSTPWGYFDFNRFHCHFSPRDWQRLINNNWGFRPKKLSFKLFNIQVKEVTQNDGTTTIANNLTSTVQVFTDSEYQLPYVLGSAHQGCLPPFPADVFMVPQYGYLTLNNGSQAVGRSSFYCLEYFPSQMLRTGNNFQFSYTFEDVPFHSSYAHSQSLDRLMNPLIDQYLYYLNRTQGTTSGTTNQSRLLFSQAGPQSMSLQARNWLPGPCYRQQRLSKTANDNNNSNFPWTAASKYHLNGRDSLVNPGPAMASHKDDEEKFFPMHGNLIFGKEGTTASNAELDNVMITDEEEIRTTNPVATEQYGTVANNLQSSNTAPTTRTVNDQGALPGMVWQDRDVYLQGPIWAKIPHTDGHFHPSPLMGGFGLKHPPPQIMIKNTPVPANPPTTFSPAKFASFITQYSTGQVSVEIEWELQKENSKRWNPEIQYTSNYNKSVNVDFTVDTNGVYSEPRPIGTRYLTRNL

SEQ ID NO: 825 - protein, 736 aa, Artificial Sequence
  Description of Artificial Sequence: Synthetic polypeptide
MAADGYLPDWLEDNLSEGIREWWALKPGVPQPKANQQHQDDRRGLVLPGYKYLGPGNGLDKGEPVNEADAAALEHDKAYDQQLKAGDNPYLKYNHADAEFQERLQEDTSFGGNLGRAVFQAKKRILEPLGLVEEAAKTAPGKKRPVDQSPQEPDSSSGVGKSGKQPARKRLNFGQTGDSESVPDPQPLGEPPAAPTSLGSNTMASGGGAPMADNNEGADGVGNSSGNWHCDSQWLGDRVITTSTRTWALPTYNNHLYKQISSQSGASNDNHYFGYSTPWGYFDFNRFHCHFSPRDWQRLINNNWGFRPKKLSFKLFNIQVKEVTQNDGTTTIANNLTSTVQVFTDSEYQLPYVLGSAHQGCLPPFPADVFMVPQYGYLTLNNGSQAVGRSSFYCLEYFPSQMLRTGNNFQFSYTFEDVPFHSSYAHSQSLDRLMNPLIDQYLYYLNRTQGTTSGTTNQSRLLFSQAGPQSMSLQARNWLPGPCYRQQRLSKTANDNNNSNFPWTAASKYHLNGRDSLVNPGPAMASHKDDEEKFFPMHGNLIFGKEGTTASNAELDNVMITDEEEIRTTNPVATVQYGTVANNLQSSNTAPTTRTVNDQGALPGMVWQDRDVYLQGPIWAKIPHTDGHFHPSPLMGGFGLKHPPPQIMIKNTPVPANPPTTFSPAKFASFITQYSTGQVSVEIEWELQKENSKRWNPEIQYTSNYNKSVNVDFTVDTNGVYSEPRPIGTRYLTRNL

SEQ ID NO: 826 - protein, 735 aa, Artificial Sequence
  Description of Artificial Sequence: Synthetic polypeptide
MAADGYLPDWLEDNLSEGIREWWALKPGVPQPKANQQHQDNRRGLVLPGYKYLGPGNGLDKGEPVNEADAAALEHDKAYDQQLKAGDNPYLKYNHADAEFQERLQEDTSFGGNLGRAVFQAKKGILEPLGLVEEAAKTAPGKKRPVDQSPQEPDSSSGVGKSGKQPARKRLNFGQTGDSESVPDPQPLGEPPAAPTSLGSNTMASGGGAPMADNNEGADGVGNSSGNWHCDSQWLGDRVITTSTRTWALPTYNNHLYKQISSQSGASNDNHYFGYSTPWGYFDFNRFHCHFSPRDWQRLINNNWGFRPKKLSFKLFNIQVKEVTQNDGTTTIANNLTSTVQVFTDSEYQLPYVFGSAHQGCLPPFPADVFMVPQYGYLTLNNGSQAVGRSSFYCLEYFPSQMLRTGNNFQFSYTFEDVPFHSSYAHSQSSDRLMNPLIDQYLYYLNRTQGTTSGTTNQSRLLFSQAGPQSMSLQARNWLPGPCYRQQRLSKTANDNNNSNFPTAASKYHLNGRDSLVNPGPAMASHKDDEEKFFPMHGNLIFGKEGTTASNAELDNVMITDEEEIRTTNPVATEQYGTVANNLQSSNTAPTTRTVNDQGALPGMVWQDRDVYLQGPIWAKIPHTDGHFHPSPLMGGFGLKHPPPQIMIKNTPVPANPPTTFSPAKFASFITQYSTGQVSVEIEWELQKENSKRWNPEIQYTSNYNKSVNVDFTVDTNGVYSEPRPIGTRYLTRNL

SEQ ID NO: 827 - protein, 736 aa, Artificial Sequence
  Description of Artificial Sequence: Synthetic polypeptide
MAADGYLPDWLEDNLSEGIREWWALKPGVPQPKANQQHQDNRRGLVLPGYKYLGPGNGLDEGEPVNEADAAALEHDKAYDQQLKAGDNPYLKYNHADAEFQERLQEDTSFGGNLGRAVFQAKKRILEPLGLVEGAAKTAPGKKRPVDQSPQEPDSSSGVGKSGKQPARKRLNFGQTGDSESVPDPQPLGEPPAAPTSLGSNTMASGGGAPMADNNEGADGVGNSSGNWHCDSQWLGDRVITTSTRTWALPTYNSHLYKQISSQSGASNDNHYFGYSTPWGYFDFNRFHCHFSPRDWQRLINNNWGFRPKKLSFKLFNIQVKEVTQNDGTTTIANNLTSTVQVFTDSEYQLPYVLGSAHQGCLPPFPADVFMVPQYGYLTLNNGSQAVGRSSFYCLEYFPSQMLRTGNNFQFSYTFEDVPFHSSYAHSQSLDRLMNPLIDQYLYYLNRTQGTTSGTTNQSRLLFSQAGPQSMSLQARNWLPGPCYRQQRLSKTANDNNNSNFPWTAASKYHLNGRDSLVNPGPAMASHKDDEEKFFPMHGNLIFGKEGTTASNAELDNVMITDEEEIRTTNPVATEQYGTVANNLQSSNTAPTTRTVNDQGALPGMVWQDRDVYLQGPIWAKIPHTDGHFHPSPLMGGFGLKHPPPQIMIKNTPVPANPPTTFSPAKFASFITQYSTGQVSVEIEWELQKENSKRWNPEIQYTSNYNKSVNVDFTVDTNGVYSEPRPIGTRYLTRNL

SEQ ID NO: 828 - protein, 668 aa, Artificial Sequence
  Description of Artificial Sequence: Synthetic polypeptide
MAADGYLPDWLEDNLSEGIREWWALKPGVPQPKANQQHQDNRRGLVLPGYKYLGPGNGLDKGEPVNEADAAALEHDKAYDQQLKAGDNPYLKYNHADAEFQERLQEDTSFGGNLGRAVFQAKKRILEPLGLVEGAAKTAPGKKRPVDQSPQEPDSSSGVGKSGKQPARKRLNFGQTGDSESVPDPQPLGEPPAAPTSLGSNTMASGGGAPMADNNEGADGVGNSSGNWHCDSQWLGDRVITTSTRTWALPTYNSHLYKQISSQSGASNDNHYFGYSTPWGILTLTDSTATSHHVTGSDSLTTTGDSGPRNSASSSSTSKLKRSRRTMARRLLPITLPARFKCLRTRSISSRTCSGRRTKAVSRRFQRTPSWSLSMDTSPTTEVKRWDAHPFTAWSTSLRRCGLEITSNSAIPSRMYLFTAATLTARVWIAILLLISICTTTERKEQPLEQPTNHGCFLARLGLSLCLCRPEIGYLGPATGNRDFQRLLTTTTTVTFLGQRPANIISMAATRWIQDQLWPVTRTMKKNFSLCTAIRGPYLAWCGKIVTCTFKDLSGQRFLTRMDTFILLLWEALDNIRLLKSSKILRYRQILRRLSARPSLLHLSLSTPLDRSAWKLSGSYRKKTANVGIQRFSTLPTTTSLLMWTLLTLMVFIVNLALLEPGISHETC

SEQ ID NO: 829 - protein, 734 aa, Artificial Sequence
  Description of Artificial Sequence: Synthetic polypeptide
MTDGYLPDWLEDNLSEGVREWWALQPGAPKPKANQQHQDNARGLVLPGYKYLGPGNGLDKGEPVNAADAAALEHDKAYDQQLKAGDNPYLKYNHADAEFQQRLQGDTSFGGNLGRAVFQAKKRVLEPLGLVEQAGETAPGKKRPLIESPQQPDSSTGIGKKGKQPAKKKLVFEDETGAGDGPPEGSTSGAMSDDSEMRAATGGAAVEGGQGADGVGNASGDWHCDSTWSEGHVTTTSTRTWVLPTYNNHLYKRLGESLQSNTYNGFSTPWGYFDFNRFHCHFSPRDWQRLINNNWGMRPKAMRVKIFNIQVKEVTTSNGETTVANNLTSTVQIFADSSYELPYVMDAGQEGSLPPFPNDVFMVPQYGYCGLVTGNTSQQQTDRNAFYCLEYFPSQMLRTGNNFEITYSFEKVPFHSMYAHSQSLDRLMNPLIDQYLWGLQSTTTGTTLNAGTATTNFTKLRPTNLSNFKKNWLPGPSIKQQGFSKTANQNYKIPATGSDSLIKYETHSTLDGRWSALTPGPPMATAGPADSKFSNSQLIFAGPKQNGNTATVPGTLIFTSEEELAATNATDTDMWGNLPGGDQSNSNLPTVDRLTALGAVPGMVWQNRDIYYQGPIWAKIPHTDGHFHPSPLIGGFGLKHPPPQIFIKNTPVPANPATTFSSTPVNSFITQYSTGQVSVQIDWEIQKERSKRWNPEVQFTSNYGQQNSLLWAPDAAGKYTEPRAIGTRYLTHHL

SEQ ID NO: 830 - protein, 734 aa, Artificial Sequence
  Description of Artificial Sequence: Synthetic polypeptide
MTDGYLPDWLEDNLSEGVREWWALQPGAPKPKANQQHQDNARGLVLPGYKYLGPGNGLDKGEPVNAADAAALEHDKAYDQQLKAGDNPYLKYNHADAEFQQRLQGDTSFGGNLGRAVFQAKKRVLEPLGLVEQAGETAPGKKRPLIESPQQPDSSTGIGKKGKQPAKKKLVFEDETGAGDGPPEGSTSGAMSDDSEMRAAAGGAAVEGGQGADGVGNASGDWHCDSTWSEGHVTTTSTRTWVLPTYNNHLYKRLGESLQSNTYNGFSTPWGYFDFNRFHCHFLPRDWQRLINNNWGVRPKAMRVKIFNIQVKEVTTSNGETTVANNLTSTVQIFADSSYELPYVMDAGQEGSLPPFPNDVFMVPQYGYCGLVTGDTSQQQTDRNAFYCLEYFPSQMLRTGNNFEITYSFEKVPFHSMYAHSQSLDRLMNPLIDQYLWGLQSTTTGTTLNAGTATTNFTKLRPTNFSNFKKNWLPGPSIKQQGFSKTANQNYKIPATGSDSLIKYETHSTLDGRWSALTPGPPMATAGPADSKFSNSQLIFAGPKQNGNTATVPGTLIFTSEEELAATNATDTDMWGNLPGGDQSNSNLPTVDRLTALGAVPGMVWQNRDIYYQGPIWAKIPHTDGHFHPSPLIGGFGLKHPPPQIFIKNTPVPANPATTFSSTPVNSFITQYSTGQVSVQIDWEIQKERSKRWNPEVQFTSNYGQQNSLLWAPDAAGKYTEPRAIGTRYLTHHL

SEQ ID NO: 831 - protein, 734 aa, Artificial Sequence
  Description of Artificial Sequence: Synthetic polypeptide
MTDGYLPDWLEDNLSEGVREWWALQPGAPKPKANQQHQDNARGLVLPGYKYLGPGNGLDEGEPVNAADAAALEHDKAYDQQLKAGDNPYLKYNHADAEFQQRLQGDTSFGGNLGRAVFQAKKRVLEPLGLVEQAGETAPGKKRPLIESPQQPDSSTGIGKKGKQPAKKKLVFEDETGAGDGPPEGSTSGAMSDDSEMRAAAGGAAVEGGQGADGVGNASGDWHCDSTWSEGHVTTTSTRTWVLPTYNNHLYKRLGESLQSNTYNGFSTPWGYFDFNRFHCHFSPRDWQRLINNNWGMRPKAMRVKIFNIQVKEVTTSNGETTVANNLTSTVQIFADSSYELPYVMDAGQEGSLPPFPNDVFMVPQYGYCGLVTGNTSQQQTDRNAFYCLEYFPSQMLRTGNNFEITYSFEKVPFHSMYAHSQSLDRLMNPLIDQYLWGLQSTTTGTTLNAGTATTNFTKLRPTNFSNFKKNWLPGPSIKQQGFSKTANQNYKIPATGSDSLIKYETHSTLDGRWSALTPGPPMATAGPADSKFSNSQLIFAGPKQNGNTATVPGTLIFTSEEELAATNATDTDMWGNLPGGDQSNSNLPTVDRLTALGAVPGMVWQNRDIYYQGPIWAKIPHTDGHFHPSPLIGGFGLKHPPPQIFIKNTPVPANPATTFSSTPVNSFITQYSTGQVSVQIDWEIQKERSKRWNPEVQFTSNYGQQNSLLWAPDAAGKYTEPRAIGTRYLTHHL

SEQ ID NO: 832 - protein, 734 aa, Artificial Sequence
  Description of Artificial Sequence: Synthetic polypeptide
MTDGYLPDWLEDNLSEGVREWWALQPGAPKPKANQQHQDNARGLVLPGYKYLGPGNGLDKGEPVNAADAAALEHDKAYDQQLKAGDNPYLKYNHADAEFQQRLQGDTSFGGNLGRAVFQAKKRVLEPLGLVEQAGETAPGKKRPLIESPQQPDSSTGIGKKGKQPAKKKLVFEDGTGAGDGPPEGSTSGAMSDDSEMRAAAGGAAVEGGQGADGVGNASGDWHCDSTWSEGHVTTTSTRTWVLPTYNNHLYKRLGESLQSNTYNGFPTPWGYFDFNRFHCHFSPRDWQRLINNNWGMRPKAMRVKIFNIQVKEVTTSNGETTAANNLTSTVQIFADSSYELPYVMDAGQEGSLPPFPNDVFMVPQYGYCGLVTGNTSQQQTDRNAFYCLEYFPSQMLRTGNNFEITYSFEKVPFHSMYAHSQSLDRLMNPLIDQYLWGLQSTTTGTTLNAGTATTNFTKLRPTNFSNFKKNWLPGPSIKQQGFSKTANQNYKIPATGSDSLIKYETHSTLDGRWSALTPGPPMATAGPADSKFSNSQLIFAGPKQNGNTATVPGTLIFTSEEELAATNATDTDMWGNLPGGDQSNSNLPTVDRLTALGAVPGMVWQNRDIYYQGPIWAKIPHTDGHFHPSPLIGGFGLKHPPPQIFIKNTPVPANPATTFSSTPVNSFITQYSTGQVSVQIDWEIQKERSKRWNPEVQFTSNYGQQNSLLWAPDAAGKYTEPRAIGTRYLTHHL

SEQ ID NO: 833 - protein, 734 aa, Artificial Sequence
  Description of Artificial Sequence: Synthetic polypeptide
MTDGYLPDWLEDNLSEGVREWWALQPGAPKPKANQQHQDNARGLVLPGYKYLGPGNGLDKGEPVNAADAAALEHDKAYDQQLKAGDNPYLKYNHADAEFQQRLQGDTSFGGNLGRAVFQAKKRVLEPLGLVEQAGETAPGKKRPLIESPQQPDSSTGIGKKGKQPAKKKLVFEDETGAGDGPPEGSTSGAMSDDSEMRAAAGGAAVEGGQGADGVGNASGDWHCDSTWSEGHVTTTSTRTWVLPTYNNHLYKRLGESLQSNTYNGFSTPWGYFDFNRFHCHFSPRDWQRLINNNWGMRPKAMRVKIFNIQVKEVTTSNGETTVANNLTSTVQIFADSSYELPYVMDAGQEGSLPPFPNDVFMVPQYGYRGLVTGNTSQQQTDRNAFYCLEYFPSQMLRTGNNFEITYSFEKVPFHSMYAHSQSLDRLMNPLIDQYLWGLQSTTTGTTLNAGTATTNFTKLRPTNFSNFKKNWLPGPSIKQQGFSKTANQNYKIPATGSDSLIKYETHSTLDGRWSALTPGPPMATAGPADSKFSNSQLIFAGPKQNGNTATVPGTLIFTSEEELAATNATDTDMWGNLPGGDQSNSNLPTVDRLTALGAVPGMVWQNRDIYYQGPIWAKIPHTDGHFHPSPLIGGFGLKHPPPQIFIKNTPVPANPATTFSSTPVNSFITQYSTGQVSVQIDWEIQKERSKRWNPEVQFTSNYGQQNSLLWAPDAAGKYTEPRAIGTRYLTHHL

SEQ ID NO: 834 - protein, 734 aa, Artificial Sequence
  Description of Artificial Sequence: Synthetic polypeptide
MTDGYLPDWLEDNLSEGVREWWALQPGAPKPKANQQHQDNARGLVLQGYKYLGPGNGLDKGEPVNAADAAALEHDKAYDQQLKAGDNPYLKYNHADAEFQQRLQGDTSFGGNLGRAVFQAKKRVLEPLGLVEQAGETAPGKKRPLIESPQQPDSSTGIGKKGKQPAKKKLVFEDETGAGDGPPEGSTSGAMSDDSEMRAAAGGAAVEGGQGADGVGNASGDWHCDSTRSEGHVTTTSTRTWVLPTYNNHLYKRLGESLQSNTYNGFSTPWGYFDFNRFHCHFSPRDWQRLINNNWGMRPKAMRVKIFNIQVKEVTTSNGETTVANNLTSTVQIFADSSYELPYVMDAGQEGSLPPFPNDVFMVPQYGYCGLVTGNTSQQQTDRNAFYCLEYFPSQMLRTGNNFEITYSFEKVPFHSMYAHSQSLDRLMNPLIDQYLWGLQSTTTGTTLNAGTATTNFTKLRPTNFSNFKKNWLPGPSIKQQGFSKTANQNYKIPATGSDSLIKYETHSTLDGRWSARTPGPPMATAGPADSKFSNSQLIFAGPKQNGNTATVPGTLIFTSEEELAATNATDTDMWGNLPGGDQSNSNLPTVDRLTALGAVPGMVWQNRDIYYQGPIWAKIPHTDGHFHPSPLIGGFGLKHPPPQIFIKNTPVPANPATTFSSTPVNSFITQYSTGQVSVQIDWEIQKERSKRWNPEVQFTSNYGQQNSLLWAPDAAGKYTEPRAIGTRYLTHHL

SEQ ID NO: 835 - protein, 724 aa, Artificial Sequence
  Description of Artificial Sequence: Synthetic polypeptide
MSFVDHPPDWLEEVGEGLREFLGLEAGPPKPKPNQQHQDQARGLVLPGYNYLGPGNGLDRGEPVNRADEVAREHDISYNEQLEAGDNPYLKYNHADAEFQERLADDTSFGGNLGKAVFQAKKRVLEPFGLVEEGAKTAPTGKRIDDHFPKRKKARTEEDSKPSTSSDAEAGPSGSQQLQIPAQPASSLGADTMSAGGGGPLGDNNQGADGVGNASGDWHCDSTWMGDRVVTKSTRTWVLPSYNNHQYREIKSGSVDGSNANAYFGYSTPWGYFDFNRFHSHWSPRDWQRLINNYWGFRPRSLRVKIFNIQVKEVTVQDSTTTIANNLTSTVQVFTDDDYQLPYVVGNGTEGCLPAFPPQVFTLPQYGYATLNRDNTENPTERSSFFCLEYFPSKMLRTGNNFEFTYNFEEVPFHSSFAPSQNLFKLANPLVDQYLYRFVSTNNTGGVQFNKNLAGRYANTYKNWFPGPMGRTQGWNLGSGVNRASVSAFATTNRMELEGASYQVPPQPNGMTNNLQGSNTYALENTMIFNSQPANPGTTATYLEGNMLITSESETQPVNRVAYNVGGQMATNNQSSTTAPATGTYNLQEIVPGSVWMERDVYLQGPIWAKIPETEAHFHPSPAMGGFGLKHPPPMMLIKNTPVPGNITSFSDVPVSSFITQYSTGQVTVEMEWELKKENSKRWNPEIQYTNNYNDPQFVDFAPDSTGEYRTTRPIGTRYLTRPL

SEQ ID NO: 836 - protein, 724 aa, Artificial Sequence
  Description of Artificial Sequence: Synthetic polypeptide
MSFVDHPPDWLEEVGEGLREFLGLEAGPPKPKPNQQHQDQARGLVLPGYNYLGPGNGLDRGEPVNRADEVAREHDISYNEQLEAGDNPYLKYNHADAEFQEKLADDTSSGGNLGKAVFQAKKRVLEPFGLVEEGAKTAPTGKRIDDHFPKRKKARTEEDSKPSTSSDAEAGPSGSQQLQIPAQPASSLGADTMSAGGGGPLGDNNQGADGVGNASGDWHCDSTWMGDRVVTKSTRTWVLPSYNNHQYREIKSGSVDGSNANAYFGYSTPWGYFDFNRFHSHWSPRDWQRLINNYWGFRPRSLRVKIFNIQVKEVTVQDSTTTIANNLTSTVQVFTDDDYQLPYVVGNGTEGCLPAFPPQVFTLPQYGYATLNRDNTENPTERSSFFCLEYFPSKMLRTGNNFEFTYNFEEVPFHSSFAPSQNLFKLANPLVDQYLYRFVSTNNTGGVQFNKNLAGRYANTYKNWFPGPMGRTQGWNLGSGVNRASVSAFATTNRMELEGASYQVPPQPNGMTNNLQGSNTYALENTMIFNSQPANPGTTATYLEGNMLITSESETQPVNRVAYNVGGQMATNNQSSTTAPATGTYNLQEIVPGSVWMERDVYLQGPIWAKIPETGAHFHPSPAMGGFGLKHPPPMMLIKNTPVPGNITSFSDVPVSSFITQYSTGQVTVEMEWELKKENSKRWNPEIQYTNNYNDPQFVDFAPDSTGEYRTTRPIGTRYLTRPL

SEQ ID NO: 837 - protein, 724 aa, Artificial Sequence
  Description of Artificial Sequence: Synthetic polypeptide
MSFVDHPPDWLEEVGEGLREFLGLEAGPPKPKPNQQHQDQARGLVLPGYNYLGPGNGLDRGEPVNRADEVAREHDISYNEQLEAGDNPYLKYNHADAEFQEKLADDTSFGGNLGKAVFQAKKRVLEPFGLVEEGAKTAPTGKRIDDHFPKRKKARTEEDSKPSTSSDAEAGPSGSQQLQIPAQPASSLGADTMSAGGGGPLGDNNQGADGVGNASGDWHCDSTWMGDRVVTKSTRTWVLPSYNNHQYREIKSGSVDGSNANAYFGYSTPWGYFDFNRFHSHWSPRDWQRLINNYWGFRPRSLRVKIFNIQVKEVTVQDSTTTIANNLTSTVQVFTDDDYQLPYVVGNGTEGCLPAFPPQVFTLPQYGYATLNRDNTENPTERSSFFCLEYFPSKMLRTGNNFEFTYNFEEVPFHSSFAPSQNLFKLANPLVDQYLYRFVSTNNTGGVQFNKNLAGRYANTYKNWFPGPMGRTQGWNLGSGVNRASVSAFATTNRMELEGASYQVPPQPNGMTNNLQGSNTYALENTMIFNSQPANPGTTATYLEGNMLITSESETQPVNRVAYNVGGQMATNNQSSTTAPATGTYNLQEIVPGSVWMERDVYLQGPIWAKIPETGAHFHPSPAMGGFGLKHPPPMMLIKSTPVPGNITSFSDVPVSSFITQYSTGQVTVEMEWELKKENSKRWNPEIQYTNNYNDPQFVDFAPDSTGEYRTTRPIGTRYLTRPL

SEQ ID NO: 838 - protein, 724 aa, Artificial Sequence
  Description of Artificial Sequence: Synthetic polypeptide
MSFVDHPPDWLEEVGEGLREFLGPEAGPPKPKPNQQHQDQARGLVLPGYNYLGPGNGLDRGEPVNRADEVAREHDISYNEQLEAGDNPYLKYNHADAEFQEKLADDTSFGGNLGKAVFQAKKRVLEPFGLVEEGAKTAPTGKRIDDHFPKRKKVRTEEDSKPSTSSDAEAGPSGSQQLQIPAQPASSLGADTMSAGGGGPLGDNNQGADGVGNASGDWHCDSTWMGDRVVTKSTRTWVPPSYNNHQYREIKSGSVDGSNANAYFGYSTPWGYFDFNRFHSHWSPRDWQRLINNYWGFRPRSLRVKIFNIQVKEVTVQDSTTTIANNLTSTVQVFTDDDYQLPYVVGNGTEGCLPAFPPQVFTLPQYGYATLNRDNTENPTERSSFFCLEYFPSKMLRTGNNFEFTYNFEEVPFHSSFAPSQNLFKLANPLVDQYLYRFVSTNNTGGVQFNKNLAGRYANTYKNWFPGPMGRTQGWNLGSGVNRASVSAFATTNRMELEGASYQVPPQPNGMTNNLQGSNTYALENTMIFNSQPANPGTTATYLEGNMLITSESETQPVNRVACNVGGQMATNNQSSTTAPATGTYNLQEIVPGSVWMERDVYLQGPIWAKIPETGAHFHPSPAMGGFGLKHPPPMMLIKNTPVPGNITSFSDVPVSSFITQYSTGQVTVEMEWELKKENSKRWNPEIQYTNNYNDPQFVDFAPDSTGEYRTTRPIGTRYLTRPL

SEQ ID NO: 839 - protein, 724 aa, Artificial Sequence
  Description of Artificial Sequence: Synthetic polypeptide
MSFVDHPPDWLEEVGEGLREFLGLEAGPPKPKPNQQHQDQARGLVLPGYNYLGPGNGLDRGEPVNRADEVAREHDISYNEQLEAGDNPYLKYNHADAEFQEKLADDTSFGGNLGKAVFQAKKRVLEPFGLVEEGAKTAPTGKRIDDHFPKRKKARTEEDSKPSTSSDAEAGPSGSQQLQIPAQPASSLGADTMSAGGGGPLGDNNQGADGVGNASGDWHCDSTWMGDRVVTKSTRTWVLPSYNNHQYREIKSGSVDGSNANAYFGYSTPWGYFDFNRFHSHWSPRDWQRLINNYWGFRPRSLRVKIFNIQVKEVTVQDSTTTIANNLTSTVQVFTDDDYQLPYVVGNGTEGCLPAFPPQVFTLPQYGYATLNRDNTENPTERSSFFCLEYFPSKMLRTGNNFEFTYNFEEVPFHSSFAPSQNLFKLANPLVDQYLYRFVSTNNTGGVQFNKNLAGRYANTYKNWFPGPMGRTQGWNLGSGVNRASVSAFATTNRMELEGASYQVPPQPNGMTNNLQGSNTYALENTMIFNSQPANPGTTATYLEGNMLITSESETQPVNRVAYNVGGQMATNNQSSTTAPATGAYNLQEIVPGSVWMERDVYLQGPIWAKIPETGAHFHPSPAMGGFGLKHPPPMMLIKNTPVPGNITSFSDVPVSSFITQYSTGQVTVEMEWELKKENSKRWNPEIQYTNNYNDPQFVDFAPDSTGEYRTTRPIGTRYLTRPL

SEQ ID NO: 840 - protein, 724 aa, Artificial Sequence
  Description of Artificial Sequence: Synthetic polypeptide
MSFVDHPPDWLEEVGEGLREFLGLEAGPPKPKPNQQHQDQARGLVLPGYNYLGPGNGLDRGEPVNRADGVAREHDISYNEQLEAGDNPYLKYNHADAEFQEKLADDTSFGGNLGKAVFQAKKRVLEPFGLVEEGAKTAPTGKRIDDHFPKRKKARTEEDSKPSTSSDAEAGPSGSQQLQIPAQPASSLGADTMSAGGGGPLGDNNQGADGVGNASGDWHCDSTWMGDRVVTKSTRTWVLPSYNNHQYREIKSGSVDGSNANAYFGYSTPWGYFDFNRFHSHWSPRDWQRLINNYWGFRPRSLRVKIFNIQVKEVTVQDSTTTIANNLTSTVQAFTDDDYQLPYVVGNGTEGCLPAFPPQVFTLPQYGYATLNRDNTENPTERSSFFCLEYFPSKMLRTGNNFEFTYNFEEVPFHSSFAPSQNLFKLANPLVDQYLYRFVSTNNTGGVQFNKNLAGRYANTYKNWFPGPMGRTQGWNLGSGVNRASVSAFATTNRMELEGASYQVPPQPNGMTNNLQGSNTYALENTMIFNSQPANPGTTATYLEGNMLITSESETQPVNRVAYNVGGQMATNNQSSTTAPATGTYNLQEIVPGSVWMERDVYLQGPIWAKIPETGAHFHPSPAMGGFGLKHPPPMMLIKNTPVPGNITSFSDVPVSSFITQYSTGQVTVEMEWELKKENSKRWNPEIQYTNNYNDPQFVDFAPDSTGEYRTTRPIGTRYLTRPL

SEQ ID NO: 841 - protein, 723 aa, Artificial Sequence
  Description of Artificial Sequence: Synthetic polypeptide
MSFVDHPPDWLEEVGEGLREFLGLEAGPPKPKPNQQHQDQARGLVLPGYNYLGPGNGLDRGEPVNRADEVAREHDISYNEQLEAGDNPYLKYNHADAEFQEKLADDTSFGGNLGKAVFQAKKRVLEPFGLVEEGAKTAPTGKRIDDHFPKRKKARTEEDSKPSTSSDAEAGPSGSQQLQIPAQPASSLGADTMSAGGGGPLGDNNQGADGVGNASGDWHCDSTWMGDRVVTKSTRTWVLPSYNNHQYREIKSGSVDGSNANAYFGYSTPWGYFDFNRFHSHWSPRDWQRLINNYWGFRPRSLRVKIFNIQVKEVTVQDSTTTIANNLTSTVQVFTDDDYQLPYVVGNGTEGCLPAFPPQVFTLPQYGYATLNRDNTENPTERSSFFCLEYFPSKMLRTGNNFEFTYNFEEVPFHSSFAPSQNLFKLANPLVDQYLYRFVSTNNTGGVQFNKNLAGRYANTYKNWFPGPMGRTQGWNLGSGVNRASVSAFATTNRMELEGASYVPPQPNGMTNNLQGSNTYALENTMIFNSQPANPGTTATYLEGNMLITSESETQPVNRVAYNVGGQMATNNQSSTTAPATGTYNLQEIVPGSVWMEGDVYLQGPIWAKIPETGAHFHPSPAMGGFGLKHPPPMMLIKNTPVPGNITSFSDVPVSSFITQYSTGQVTVEMEWELKKENSKRWNPEIQYTNNYNDPQFVDFAPDSTGEYRTTRPIGTRYLTRPL

SEQ ID NO: 842 - protein, 724 aa, Artificial Sequence
  Description of Artificial Sequence: Synthetic polypeptide
MSFVDHPPDWLEEVGEGLREFLGLEAGPPKPKPNQQHQDQARGLVLPGYNYLGPGNGLDRGEPVNRADEVAREHDISYNEQLEAGDNPYLKYNHADAEFQEKLADDTSFGGNLGKAVFQAKKRVLEPFGLVEEGAKTAPTGKRIDDHFPKRKKVRTEEDSKPSTSSDAEAGPSGSQQLQIPAQPASSLGADTMSAGGGGPLGDNNQGADGVGNASGDWHCDSTWMGDRVVTKSTRTWVLPSYNNHQYREIKSGSVDGSNANAYFGYSTPWGYFDFNRFHSHWSPRDWQRLINNYWGFRPRSLRVKIFNIQVKEVTVQDSTTTIANNLTSTVQVFTDDDYQLPYVVGNGTEGCLPAFPPQVFTLPQYGYATLNRDNTENPTERSSFFCLEYFPSKMLRTGNNFEFTYNFEEVPFHSSFAPSQNLFKLANPLVDQYLYRFVSTNNTGGVQFNKNLAGRYANTYKNWFPGPMGRTQGWNLGSGVNRASVSAFATTNRMELEGASYQVPPQPNGMTNNLQGSNTYALENTMIFNSQPANPGTTATYLEGNMLITSESETQPVNRVAYNVGGQMATNNQSSTTAPATGTYNLQEIVPGSVWMERDVYLQGPIWAKIPETGAHFHPSPAMGGFGLKHPPPMMLIKNTPVPGNITSFSDVPVSSFITQYSTGQVTVEMEWELKKENSERWNPEIQYTNNYNDPQFVDFAPDSTGEYRTTRPIGTRYLTRPL

SEQ ID NO: 843 - protein, 724 aa, Artificial Sequence
  Description of Artificial Sequence: Synthetic polypeptide
MSFVDHPPDWLEEVGEGLREFLGLEAGPPKPKPNQQHQDQARGLVLPGYNYLGPGNGLDRGEPVNRADEVAREHDISYSEQLEAGDNPYLKYNHADAEFQEKLADDTSFGGNLGKAVFQAKKRVLEPFGLVEEGAKTAPTGKRIDDHFPKRKKARTEEDSKPSTSSDAEAGPSGSQQLQIPAQPASSLGADTMSAGGGGPLGDNNQGADGVGNASGDWHCDSTWMGDRVVTKSTRTWVLPSYNNHQYREIKSGSVDGSNANAYFGYSTPWGYFDFNRFHSHWSPRDWQRLINNYWGFRPRSLRVKIFNIQVKEVTVQDSTTTIANNLTSTVQVFTDDDYQLPYVVGNGTEGCLPAFPPQVFTLPQYGYATLNRDNTENPTERSSFFCLEYFPSKMLRTGNNFEFTYNFEEVPFHSSFAPSQNLFKLANPLVDQYLYRFVSTNNTGGVQFNKNLAGRYANTYKNWFPGPMGRTQGWNLGSGVNRASVSAFATTNRMELEGASYQVPPQPNGMTNNLQGSNTYALENTMIFNSQPANPGTTATYLEGNMLITSESETQPVNRVAYNVGGQMATNNQSSTTAPATGTYNLQEIVPGSVWMERDVYLQGPIWAKIPETGAHFHPSPAMGGFGLKHPPPMMLIKNTPVPGNITSFSDVPVSSFITQYSTGQVTVEMEWELKKENSKRWNPEIQYTNNYNDPQFVDFAPDSTGEYRTARPIGTRYLTRPL

SEQ ID NO: 844 - protein, 724 aa, Artificial Sequence
  Description of Artificial Sequence: Synthetic polypeptide
MSFVDHPPDWLEEVGEGLREFLGPEAGPPKPKPNQQHQDQARGLVLPGYNYLGPGNGLDRGEPVNRADEVAREHDISYNEQLEAGDNPYLKYNHADAEFQEKLADDTSFGGNLGKAVFQAKKRVLEPFGLVEEGAKTAPTGKRIDDHFPKRKKARTEEDSKPSTSSDAEAGPSGSQQLQIPAQPASSLGADTMSAGGGGPLGDNNQGADGVGNASGDWHCDSTWMGDRVVTKSTRTWVLPSYNNHQYREIKSGSVDGSNANAYFGYSTPWGYFDFNRFHSHWSPRDWQRLINNYWGFRPRSLRVKIFNIQVKEVTVQDSTTTIANNLTSTVQVFTDDDYQLPYVVGNGTEGCLPAFPPQVFTLPQYGYATLNRDNTENPTERSSFFCLEYFPSKMLRTGNNFEFTYNFEEVPFHSSFAPSQNLFKLANPLVDQYLYRFVSTNNTGGVQFNKNLAGRYANTYKNWFPGPMGRTQGWNLGSGVNRASVSAFATTNRMELEGASYQVPPQPNGMTNNLQGSNTYALENTMIFNSQPANPGTTATYLEGNMLITSESETQPVNRVAYNVGGQMTTNNQSSTTAPATGTYNLQEIVPGSVWMERDVYPQGPIWAKIPETGAHFHPSPAMGGFGLKHPPPMMLIKNTPVPGNITSFSDVPVSSFITQYSTGQVTVEMEWELKKENSKRWNPEIQYTNNYNDPQFVDFAPDSTGEYRTTRPIGTRYLTRPL

SEQ ID NO: 845 - protein, 724 aa, Artificial Sequence
  Description of Artificial Sequence: Synthetic polypeptide
MSFVDHPPDWLEEVGEGLREFLGLEAGPPKPKPNQQHQDQARGLVLPGYNYLGPGNGLDRGEPVNRADEVAREHDISYNEQLEAGDNPYLKYNHADAEFQEKLADDTSFGGNLGKAVFQAKKRVLEPFGLVEEGAKTAPTGKRIDDHFPKRKKARTEEDSKPSTSSDAEAGPSGSQQLQIPAQPASSLGADTMSAGGGGPLGDNNQGADGVGNASGDWHCDSTWMGDRVVTKSTRTWVLPSYNNHQYREIKSGSVDGSNANAYFGYSTPWGYFDFNRFHSHWSPRDWQRLINNYWGFRPRSLRVKIFNIQVKEVTVQDSTTTIANNLTSTVQVFTDDDYQLPYVVGNGTEGCLPAFPPQVFTLPQYGYATLNRDNTENPTERSSFLCLEYFPSKMLRTGNNFEFTYNFEEVPFHSSFAPSQNLFKLANPLVDQYLYRFVSTNNTGGVQFNKNLAGRYANTYKNWFPGPMGRTQGWNLGSGVNRASVSAFATTNRMELEGASYQVPPQPNGMTNNLQGSNTYALENTMIFNSQPANPGTTATYLEGNMLITSESETQPVNRVAYNVGGQMATNNQSSTTAPATGTYNLQEIVPGSVWMKRDVYLQGPIWAKIPETGAHFHPSPAMGGFGLKHPPPMMLIKNTPVPGNITSFSDVPVSSFITQYSTGQVTVEMEWELKKENSKRWNPEIQYTNNYNDPQFVDFAPDSTGEYRTTRPIGTRYLTRPL

SEQ ID NO: 846 - protein, 724 aa, Artificial Sequence
  Description of Artificial Sequence: Synthetic polypeptide
MSFVDHPPDWLEEVGEGLREFLGLEAGPPKPKPNQQHQDQARGLVLPGYNYLGPGNGLDRGEPVNRADEVAREHDISYNEQLEAGDNPYLKYNHADAEFQEKLADDTSFGGNLGKAVFQAKKRVLEPFGLVEEGAKTAPTGKRIDDHFPKRKKARTEEDSKPSTPSDAEAGPSGSQQLQIPAQPASSLGADTMSAGGGGPLGDNNQGADGVGNASGDWHCDSTWMGDRVVTKSTRTWVLPSYNNHQYREIKSGSVDGSNANAYFGYSTPWGYFDFNRFHSHWSPRDWQRLINNYWGFRPRSLRVKIFNIQVKEVTVQDSTTTIANNLTSTVQVFTDDDYQLPYVVGNGTEGCLPAFPPQVFTLPQYGYATLNRDNTENPTERSSFFCLEYFPSKMLRTGNNFEFTYNFEEVPFHSSFAPSQNLFKLANPLVDQYLYRFVSTNNTGGVQFNKNLAGRYANTYKNWFPGPMGRTQGWNLGSGVNRASVSAFATTNRMELEGASYQVPPQPNGMTNNLQGSNTYALENTMIFNSQPANPGTTATYLEGNMLITSESETQPVNRVAYNVGGQMATNNQSSTTAPATGTYNLQEIVPGSVWMERDVYLQGPIWAKIPETGAHFHPSPAMGGFGLKHPPPMMLIKNTPVPGNITSFSDVPVSSFITQYSTGQVTVEMEWELKKENSKRWNPEIQYTNNYNDPQFVDFAPDSTGEYRTTRPIGTRYLTRPL

SEQ ID NO: 847 - protein, 724 aa, Artificial Sequence
  Description of Artificial Sequence: Synthetic polypeptide
MSFVDHPPDWLEEVGEGLREFLGLEAGPPKPKPNQQHQDQARGLVLPGYNYLGPGNGLDRGEPVNRADEVAREHDISYNEQLEAGDNPYLKYNHADAEFQEKLADDTSFGGNLGKAVFQAKKRVLEPFGLVEEGAKTAPTGKRIDDHFPKRKKARTEEDSKPSTSSDAEAGPSGSQQLQIPAQPASSLGADTMSAGGGGPLGDNNQGADGVGNASGDWHCDSTWMGDRVVTKSTRTWVLPSYNNHQYREIKSGSVDGSNANAYFGYSTPWGYFDFNRFHSHWSPRDWQRLINNYWGFRPRSLRVKIFNIQVKEVTVQDSTTTIANNLTSTVQVFTDDDYQLPYVVGNGTEGCLPAFPPQVFTLPQYGYATLNRDNTENPTERSSFFCLEYFPSKMLRTGNNFEFTYNFEEVPFHSSFAPSQNLFKLANPLVDQYLYRFVSTNNTGGVQFNKNLAGRYANTHKNWFPGPMGRTQGWNLGSGVNRASVSAFATTNRMELEGASYQVPPQSNGMTNNLRGSNTYALENTMIFNSQPANPGTTATYLEGNMLITSESETQPVNRVAYNVGGQMATNNQSSTTAPATGTYNLQEIVPGSVWMERDVYLQGPIWAKIPETGAHFHPSPAMGGFGLKHPPPMMLIKNTPVPGNITSFSDVPVSSFITQYSTGQVTVEMEWELKKENSKRWNPEIQYTNNYNDPQFVDFAPDSTGEYRTTRPIGTRYLTRPL

SEQ ID NO: 848 - protein, 724 aa, Artificial Sequence
  Description of Artificial Sequence: Synthetic polypeptide
MSFVDHPPDWLEEVGEGLREFLGLEAGPPKPKPNQQHQDQARGLVLPGYNYLGPGNGLDRGEPVNRADEVAREHDISYNEQLEAGDNPYLKYNHADAEFQEKLADDTSFGGNLGKAVFQAKKRVLEPFGLVEEGAKTAPTGKRIDDHFPKRKKARTEEDSKPSTSSDAEAGPSGSQQLQIPAQPASSLGADTMSAGGGGPLGDNNQGADGVGNASGDWHCDSTWMGDRVVTKSTRTWVLPSYNNHQYREIKSGSVDGSNANAYFGYSTPWGYFDFNRFHSHWSPRDWQRLINNYWGFRPRSLRVKIFNIQVKEVTVQDSTTTIANNLTSTVQVFTDDDYQLPYVVGNGTEGCLPAFPPQVFTLPQYGYATLNRDNTENPTERSSFFCLEYFPSKMLRTGNNFEFTYNFEEVPFHSSFAPSQNLFKLANPLVDQYLYRFVSTNNTGGVQFNKNLAGRYANTYKNWFPGPMGRTQGWNLGSGVNRASVSAFATTNRMELEGASYQVPPQPNGMTNNLQGSNTYALENTMIFNSQPANPGTTATYLEGNMLITSESETQPVNRVAYSVGGQMATNNQSSTTAPTTGTYNLQEIVPGSVWMERDVYLQGPIWAKIPETGAHFHPSPAMGGFRLKHPPPMMLIKNTPVPGNITSFSDVPVSSFITQYSTGQVTVEMEWELKKENSKRWNPEIQYTNNYNDPQFVDFAPDSTGEYRTTRPIGTRYLTRPL

SEQ ID NO: 849 - protein, 724 aa, Artificial Sequence
  Description of Artificial Sequence: Synthetic polypeptide
MSFVDHPPDWLEEVGEGLREFLGLEAGPPKPKPNQQHQDQARGLVLPGYNYLGPGNGLDRGEPVNRADEVAREHDISYNEQLEAGDNPYLKYNHADAEFQEKLADDTSFGGNLGKAVFQAKKRVLEPFGLVEEGAKTAPTGKRIDDHFPKRKKARTEEDSKPSTSSDAEAGPSGSQQLQIPAQPASSLGADTMSAGGGGPLGDNNQGADGVGNASGDWHCDSTWMGDRVVTKSTRTWVLPSYNNHQYREIKSGSVDGSNANAYFGYSTPWGYFDFNRFHSHWSPRDWQRLINNYWGFRPRSLRVKIFNIQVKEVTVQDSTTTIANNLTSTVQVFTDDDYQLPYVVGNGTEGCLPAFPPQVFTLPQYGYATLNRDNTENPTERSSFFCLEYFPSKMLRTGNNFEFTYNFEEVPFHSSFAPSQNLFKLANPLVDQYLYRFVSTNNTGGVQFNKNLAGRYANTYKNWFPGPMGRTQGWNLGSGVNRASVSAFAATNRMELEGASYQVPPQPNGMTNNLQGSNTYALENTMIFNSQPANPGTTATYLEGNMLITSESETQPVNRVAYNVGGQMATNNQSSTTAPATGTYNLQEIVPGGVWMERDVYLQGPIWAKIPETGAHFHPSPAMGGFGLKHPPPMMLIKNTPVPGNTTSFSDVPVSSFITQYSTGQVTVEMEWELKKENSKRWNPEIQYTNNYNDPQFVDFAPDSTGEYRTTRPIGTRYLTRPL

SEQ ID NO: 850 - protein, 724 aa, Artificial Sequence
  Description of Artificial Sequence: Synthetic polypeptide
MSFVDHPPDWLEEVGEGLREFLGLEAGPPKPKPNQQHQDQARGLVLPGYNYLGPGNGLDRGEPVNRADEVAREHDISYNEQLEAGDNPYLKYNHADAEFQEKLADDTSFGGNLGKVVFQAKKRVLEPFGLVEEGAKTAPTGKRIDDHFPKRKKARTEEDSKPSTSSDAEAGPSGSQQLQIPAQPASSLGADTMSAGGGGPLGGNNQGADGVGNASGDWHCDSTWMGDRVVTKSTRTWVLPSYNNHQYREIKSGSVDGSNANAYFGYSTPWGYFDFNRFHSHWGPRDWQRLINNYWGFRPRSLRVKIFNIQVKEVTVQDSTTTIANNLTSTVQVFTDDDYQLPYVVGNGTEGCLPAFPPQVFTLPQYGYATLNRDNTENPTERSSFFCLEYFPSKMLRTGNNFEFTYNFEEVPFHSSFAPSQNLFKLANPLVDQYLYRFVSTNNTGGVQFNKNLAGRYANTYKNWFPGPMGRTQGWNLGSGVNRASVSALATTNRMELEGASYQVPPQPNGMTNNLQGSNTYALENTMIFNSQPANPGTTATYLEGNMLITSESETQPVNRVAYNVGGQMATNNQSSTTAPATGTYNLQEIVPGSVWMERDVYLQGPIWAKIPETGAHFHPSPAMGGFGLKHPPPMMLIKNTPVPGNITSFSDVPVSSFITQYSTGQVTVEMEWELKKENSKRWNPEIQYTNNYNDPQFVDFAPDSTGEYRTTRPIGTRYLTRPL

SEQ ID NO: 851 - protein, 723 aa, Artificial Sequence
  Description of Artificial Sequence: Synthetic polypeptide
MSFVDHPPDWLEEVGEGLREFLGLEAGPPKPKPNQQHQDQARGLVLPGYNYLGPGNGLDRGEPVNRADEVAREHDISYNEQLEAGDNPYLKYNHADAEFQEKLADDTSFGGNLGKAVFQAKKRVLEPFGLVEEGAKTAPTGKRIDDHFPKRKKARTEEDSKPSTSSDAEAGPSGSQQLQIPAQPASSLGADTMSAGGGGPLGDNNQGADGVGNASGDWHCDSTWMGDRVVTKSTRTWVLPSYNNHQYREIKSGSVDGSNANAYFGYSTPWGYFDFNRFHSHWSPRDWQRLINNYWGFRPRSLRVKIFNIQVKEVTVQDSTTTIANNLTSTVQVFTDDDYQLPYVVGNGTEGCLPAFPPQVFTLPQYGYATLNRDNTENPTERSSFFCLEYFPSKMLRTGNNFEFTYNFEEVPFHSSFAPSQNLFKLANPLVDQYLYRFVSTNNTGGVQFNKNLAGRYANTYKNWFPGPMGRTQGWNLGSGVNRASVSAFATTNRMELEGASYQVPPQPNGMTNNLQGSNTYALENTMIFNSQPANPGTTATYLEGNMLITSESETQPVNRVAYNVGGQMATNNQSSTTAPATGTYNLQEIVPGSVWMERDVYLQGPIAKIPETGAHFHPSPAMGGFGLKHPPPMMLIKNTPVPGNITSFSDVPVSSFITQYSTGQVTVEMEWELKKENSKRWNPEIQYTNNYNDPQFVDFAPDSTGECRTTRPIGTRYLTRPL

SEQ ID NO: 852 - protein, 724 aa, Artificial Sequence
  Description of Artificial Sequence: Synthetic polypeptide
MSFVDHPPDWLEEVGEGLREFLGLEAGPPKPKPNQQHQDQARGLVLPGYNYLGPGNGLDRGEPVNRADEVAREHDISYNEQLEAGDNPYLKYNHADAEFQEKLADDTSFGGNLGKAVFQAKKRVLEPFGLVEEGAKTAPTGKRIDDHFPKRKKARTEEDSKPSTSSDAEAGPSGSQQLQIPAQPASSLGADTMSAGGGGPLGDNNQGADGVGNASGDWHCDSTWMGDRVVTKSTRTWVLPSYNNHQYREIKSGSVDGSNANAYFGYSTPWGYFDFNRFHSHWSPRDWQRLINNYWGFRPRSLRVKILNIQVKEVTVQDSTTTIANNLTSTVQVFTDDDYQLPYVVGNGTEGCLPAFPPQVFTLPQYGYATLNRDNTENPTERSSFFCLEYFPSKMLRTGNNFEFTYNFEEVPFHSSFAPSQNLFKLANPLVGQYLYRFVSTNNTGGVQFNENLAGRYANTYKNWFPGPMGRTQGWNLGSGVNRASVSAFATTNRMELEGASYQVPPQPNGMTNNLQGSNTYALENTMIFNSQPANPGTTATYLEGNMLITSESETQPVNRVAYNVGGQMATNNQSSTTAPATGTYNLQEIVPGSVWMERDVYLQGPIWAKIPETGAHFHPSPAMGGFGLKHPPPMMLIKNTPVPGNITSFSDVPVSSFITQYSTGQATVEMEWELKKENSKRWNPEIQYTNNYNDPQFVDFAPDSTGEYRTTRPIGTRYLTRPL

SEQ ID NO: 853 - protein, 724 aa, Artificial Sequence
  Description of Artificial Sequence: Synthetic polypeptide
MSFVDHPPDWLEEVGEGLREFLGLEAGPPKPKPNQQHQDQARGLVLPGYNYLGPGNGLDRGEPVNRADEVAREHDISYNEQLEAGDNPYLKYNHADAEFQEKLADDTSFGGNLGKAVFQAKKRVLEPFGLVEEGAKTAPTGKRIDDHFPKRKKARTEEDSKPSTSSDAEAGPSGSQQLQIPAQPASSLGADTMSAGGGGPLGDNNQGADGVGNASGDWHCDSTWMGDRVVTKSTRTWVLPSYNNHQYREIKSGSVDGSNANAYFGYSTPWGYFDFNRFHSHWSPRDWQRLINNYWGFRPRSLRVKIFNIQVKEVTVQDSTTIIANNLTSTVQVFTDDDYQLPYVVGNGTEGCLPAFPPQVFTLPQYGYATLNRDNTENPTERSSFFCLEYFPSKMLRTGNNFEFTYNFEEVPFHSSFAPSQNLFKLANPLVDQYLYRFVSTNNTGGVQFNKNLAGRYANTYKNWFPGPMGRTQGWNLGSGVNRASVSAFATTNRMELEGASYQVPPQPNGMTNNLQGSNTYALENTMIFNSQPANPGTTATYLEGNMLITSESETQPVNRVAYNVGGQMATNNQSSTTAPATGTYNLQEIVPGSVWMERDVYLQGPIWAKIPETGAHFHPSPAMGGFGLKHPPPMMLIKNTPVPGNITSFSDVPVSSFITQYSTGQVTVEMEWELKKENSKRWNPEIQYTNNYNDPQFVDFAPDSTGEYRTTRPIGTRYLTRPL

SEQ ID NO: 854 - protein, 724 aa, Artificial Sequence
  Description of Artificial Sequence: Synthetic polypeptide
MSFVDHPPDWLEEVGEGLREFLGLEAGPPKPKPNQQHQDQARGLVLPGYNYLGPGNGLDRGEPVNRADEVAREHDISYNEQLEAGDNPYLKYNHADAEFQEKLADDTSFGGNLGKAVFQAKKRVLEPFGLVEEGAKTAPTGKRIDDHFPKRKKARTEEDSKPSTSSDAEAGPSGSQQLQIPAQPASSLGADTMSAGGGGPLGDNNQGADGVGNASGDWHCDSTWMGDRVVTKSTRTWVLPSYNNHQYREIKSGSVDGSNANAYFGYSTPWGYFDFNRFHSHWSPRDWQRLINNYWGFRPRSLRVKIFNIQVKEVTVQDSTTTIANNLTSTVQVFTDDDYQLPYVVGNGTEGCLPAFPPQVFTLPQYGYATLNRDNTENPTERSSFFCLEYFPSKMLRTGNNFEFTYNFEEVPFHSSFAPSQNLFKLANPLVDQYLYRFVSTNNTGGVQFNKNLAGRYANTYKNWFPGPMGRTQGWNLGSGVNRASVSAFATTNRMELEGASYQVPPQPNGMTNNLQGSNTYALENTMIFNSQPANPGTTATYLEGNMLITSESETQPVNRVAYNVGGQMATNNQSSTTAPATGTYNLQEIVPGSVWMERDVYLQGPIWAKIPETGAHFHPSPAMGGFGLKHPPPMMLIKNTPVPGNITSLSDVPVSSFITQYSTGQVTVEMEWELKKENSKRWNPEIQYTNNYNDPQFVDFAPDSTGEYRTTRPIGTRYLTRPL

SEQ ID NO: 855 - protein, 724 aa, Artificial Sequence
  Description of Artificial Sequence: Synthetic polypeptide
MSFVDHPPDWLEEVGEGLREFLGLEAGPPKPKPNQQHQDQARGLVLPGYNYLGPGNGLDRGEPANRADEVAREHDISYNEQLEAGDNPYLKYNHAGAEFQEKLADDTSFGGNLGKAVFQAKKRVLEPFGLVEEGAKTAPTGKRIDDHFPKRKKARTEEDSKPSTSSDAEAGPSGSQQLQIPAQPASSLGADTMSAGGGGPLGDNNQGADGVGNASGDWHCDSTWMGDRVVTKSTRTWVLPGYNNHQYREIKSGSVDGSNANAYFGYSTPWGYFDFNRFHSHWSPRDWQRLINNYWGFRPRSLRVKIFNIQVKEVTVQDSTTTIANNLTSTVQVFTDDDYQLPYVVGNGTEGCLPAFPPQVFTLPQYGYATLNRDNTENPTERSSFFCLEYFPSKMLRTGNNFEFTYNFEEVPFHSSFAPSQNLFKLANPLVDQYLYRFVSTNNTGGVQFNKNLAGRYANTYKNWFPGPMGRTQGWNLGSGVNRASVSAFATTNRMELEGASYQVPPQPNGMTNNLQGSNTYALENTMIFNSQPANPGTTATYLEGNMLITSESETQPVNRVAYNVGGQMATNNQSSTTAPATGTYNLQEIVPGSVWMERDVYLQGPIWAKIPETGAHFHPSPAMGGFGLKHPPPMMLIKNTPVPGNITSFSDVPVSSFITQYSTGQVTVEMEWELKKENSKRWNPEIQYTNNYNDPQFVDFAPDSTGEYRTTRPIGTRYLTRPL

SEQ ID NO: 856 - protein, 724 aa, Artificial Sequence
  Description of Artificial Sequence: Synthetic polypeptide
MSFVDHPPDWLEEVGEGLREFLGLEAGPPKPKPNQQHQDQARGLVLPGYNYLGPGNGLDRGEPVNRADEVAREHDISYNEQLEAGDNPYLKYNHADAEFQEKLADDTSFGGNLGKAVFQAKKRVLEPFGLVEEGAKTAPTGKRIDDHFPKRKKARTEEDSKPPTSSDAEAGPSGSQQLQIPAQPASSLGADTMSAGGGGPLGDNNQGADGVGNASGDWHCDSTWMGDRVVTKSTRTWVLPSYNNHQYREIKSGSVDGSNANAYFGYSTPWGYFDFNRFHSHWSPRDWQRLINNYWGFRPRSLRVKIFNIQVKEVTVQDSATTIANNLTSTVQVFTDDDYQLPYVVGNGTEGCLPAFPPQVFTLPQYGYATLNRDNTENPTERSSFFCLEYFPSKMLRTGNNFEFTYNFEEVPFHSSFAPSQNLFKLANPLVDQYLYRFVSTNNTGGVQFNKNLAGRYANTYKNWFPGPMGRTQGWNLGSGVNRASVSAFATTNRMELEGASYQVPPQPNGMTNNLQGSNTYALENTMIFNSQPANPGTTATYLEGNMLITSESETQPVNRVAYNVGGQMATNNQSSTTAPATGTYNLQEIVPGSVWMERDVYLQGPIWAKIPETGAHFHPSPAMGGFGLKHPPPMMLIKNTPVPGNITSFSDVPVSSFITQYSTGQVTVEMEWELKKENSKRWNPEIQYTNNYNDPQFVDFAPDSTGEYRTTRPIGTRYLTRPL

SEQ ID NO: 857 - protein, 724 aa, Artificial Sequence
  Description of Artificial Sequence: Synthetic polypeptide
MSFVDHPPDWLEEVGEGLREFLGLEAGPPKPKPNQQHQDQARGLVLPGYNYLGPGNGLDRGEPVNRADEVAREHDISYNEQLEAGDNPYLKYNHADAEFQEKLADDTSFGGNLGKAVFQAKKRVLEPFGLVEEGAKTAPTGKRIDDHFPKRKKARTEEDSKPSTSSDAEAGPSGSQQPQIPAQPASSLGADTMSAGGGGPLGDNNQGADGVGNASGDWHCDSTWMGDRVVTKSTRTWVLPSYNNHQYREIKSGSVDGSNANAYFGYSTPWGYFDFNRFHSHWSPRDWQRLINNYWGFRPRSLRVKIFNIQVKEVTVQDSTTTIANNLTSTVQVFTDDDYQLPYVVGNGTEGCLPAFPPQVFTLPQYGYATLNRDNTENPTERSSFFCLEYFPSKMLRTGNNFEFTYNFEEVPFHSSFAPSQNLFKLANPLVDQYLYRFVSTNNTGGVQFNKNLAGRYANTYKNWFPGPMGRTQGWNLGSGVNRASVSAFATTNRMELEGASYQVPPQPNGMTNNLQGSNTYALENTMIFNSQPANPGTTATYLEGNMLITSESETQPVNRVAYNVGGQMATNNQSSTTAPATGTYNLQEIVPGSVWMERDVYLQGPIWAKIPETGAHFHPSPAMGGFGLKHPPPMMLIKNTPAPGNITSFSDVPVSSFITQYSTGQVTVEMEWELKKENSKRWNPEIQYTNNYNDPQFVDFAPDSTGEYRTTRPIGTRYLTRPL

SEQ ID NO: 858 - protein, 724 aa, Artificial Sequence
  Description of Artificial Sequence: Synthetic polypeptide
MSFVDHPPDWLEEVGEGLREFLGLEAGPPKPKPNQQHQDQARGLVLPGYNYLGPGNGLDRGEPVNRADEVAREHDISYNEQLEAGDNPYLKYNHADAEFQEKLADDTSFGGNLGKAVFQAKKRVLEPFGLVEEGAKTAPTGKRIDDHFPKRKKARTEEDSKPPTSSDAEAGPSGSQQLQIPAQPASSLGADTMSAGGGGPLGDNNQGADGVGNASGDWHCDSTWMGDRVVTKSTRTWVLPSYNNHQYREIKSGSVDGSNANAYFGYSTPWGYFDFNRFHSHWSPRDWQRLINNYWGFRPRSLRVKIFNIQVKEVTVQDSTTTIANNLTSTVQVFTDDDYQLPYVVGNGTEGCLPAFPPQVFTLPQYGYATLNRDNTENPTERSSFFCLEYFPSKMLRTGNNFEFTYNFEEVPFHSSFAPSQNLFKLANPLVDQYLYRFVSTNNTGGVQFNKNLAGRYANTYKNWFPGPMGRTQGWNLGSGVNRASVSAFATTNRMELEGASYQVPPQPNGMTNNLQGSNTYALENTMIFNSQPANPGTTATYLEGNMLITSESETQPVNRVAYNVGGQMATNNQSSTTAPATGTYNLQEIVPGSVWMERDVYLQGPIWAKIPETGAHFHPSPAMGGFGLKHPPPMMLIKNTPVPGNITSFSDVPVSSFITQYSTGQVTVEMEWELKKENSKRWNPEIQYTNNYNDPQFVDFAPDSTGEYRTTRPIGTRYLTRPL

SEQ ID NO: 859 - protein, 724 aa, Artificial Sequence
  Description of Artificial Sequence: Synthetic polypeptide
MSFVDHPPDWLEEVGEGLREFLGLEAGPPKPKPNQQHQDQARGLVLPGYNYLGPGNGLDRGEPVNRADEVAREHDISYNEQLEAGDNPYLKYNHADAEFQEKLADDTSFGGNLGKAVFQAKKRVLEPFGLVEEGAKTAPTGKRIDDHFPKRKKARTEEDSKPPTSSDAEAGPSGSQQLQIPAQPASSLGADTMSAGGGGPLGDNNQGADGVGNASGDWHCDSTWMGDRVVTKSTRTWVPPSYNNHQYREIKSGSVDGSNANAYFGYSTPWGYFDFNRFHSHWSPRDWQRLINNYWGFRPRSLRVKIFNIQVKEVTVQDSTTTIANNLTSTVQVFTDDDYQLPYVVGNGTEGCLPAFPPQVFTLPQYGYATLNRDNTENPTERSSFFCLEYFPSKMLRTGNNFEFTYNFEEVPFHSSFAPSQNLFKLANPLVDQYLYRFVSTNNTGGVQFNKNLAGRYANTYKNWFPGPMGRTQGWNLGSGVNRASVSAFATTNRMELEGASYQVPPQPNGMTNNLQGSNTYALENTMIFNSQPANPGTTATYLEGNMLITSESETQPVNRVAYNVGGQMATNNQSSTTAPATGTYNLQEIVPGSVWMERDVYLQGPIWAKIPETGAHFHPSPAMGGFGLKHPPPMMLIKNTPVPGNITSFSDVPVSSFITQYSTGQVAVEMEWELKKENSKRWNPEIQYTNNYNDPQFVDFAPDSTGEYRTTRPIGTRYLTRPL

SEQ ID NO: 860 - protein, 724 aa, Artificial Sequence
  Description of Artificial Sequence: Synthetic polypeptide
MSFVDHPPDWLEEVGEGLREFLGLEAGPPKPKPNQQHQDQARGLVLPGYNYLGPGNGLDRGEPVNRADEVAREHDISYNEQLEAGDNPYLKYNHADAEFQEKLADDTSFGGNLGKAVFQAKKRVLEPFGLVEEGAKTAPTGKRIDDHFPKRKKARTEEDSKPSTSSDAEAGPSGSQQLQIPAQPASSLGADTMSAGGGGPLGDNNQGADGVGNASGDWHCDSTWMGDRVVTKSTRTWVLPSYNNHQYREIKSGSVDGSNANAYFGYSTPWGYFDFNRFHSHWSPRDWQRLINNYWGFRPRSLRVKIFNIQVKEVTVQDSTTTIANNLTSTVQVFTDDDYQLPYVVGNGTEGCLPAFPPQVFTLPQYGYATLNRDNTENPTERSSFFCLEYFPSKMLRTGNNFEFTYNFEEVPFHSSFAPSQNLFKLANPLVDQYLYRFVSTNNTGGVQFNKNLAGRYANTYKNWFPGPMGRTQGWNLGSGVNRASVSAFATTNRMELEGASYQVPPQPNGMTNNLQGSNTYALENTMIFNSQPANPGTTATYLEGNMLITSESETQPVNRVAYNVGGQMATNNQSSTTAPATGTYNLQEIVPGSVWMERDVYLQGPIWAKIPETGAHFHPSPAMGGFGLKHPPPMMLIKNTPAPGNITSFSDVPVSSFITQYSTGQVTVEMEWELKKENSKRWNPEIQYTNNYNDPQFVDFAPDSTGEYRTTRPIGTRYLTRPL

SEQ ID NO: 861 - protein, 724 aa, Artificial Sequence
  Description of Artificial Sequence: Synthetic polypeptide
MSFVDHPPDWLEEVGEGLREFLGLEAGPPKPKPNQQHQDQARGLVLPGYNYLGPGNGLDRGEPVNRADEVAREHDISYNEQLEAGDNPYLKYNHADAEFQEKLADDTSFGGNLGKAVFQAKKRVLEPFGLAEEGAKTAPTGKRIDDHFPKRKKARTEEDSKPSTSSDAEAGPSGSQQLQIPAQPASSLGADTMSAGGGGPLGDNNQGADGVGNASGDWHCDSTWMGDRVVTKSTRTWVLPSYNNHQYREIKSGSVDGSNANAYFGYSTPWGYFDFNRFHSHWSPRDWQRLINNYWGFRPRSLRAKIFNIQVKEVTVQDSTTTIANNLTSTVQVFTDDDYQLPYVVGNGTEGCLPAFPPQVFTLPQYGYATLNRDNTENPTERSSFFCLEYFPSKMLRTGNNLEFTYNFEEVPFHSSFAPSQNLFKLANPLVDQYLYRFVSTNNTGGVQFNKNLAGRYANTYKNWFPGPMGRTQGWNLGSGVNRASVSAFATTNRMELEGASYQVPPQPNGMTNNLQGSNTYALENTMIFNSQPANPGTTATYLEGNMLITSESETQPVNRVVHNVGGQMATNNQSSTTAPATGTYNLQEIVPGSVWMERDVYLQGPIWAKIPETGAHFHPSPAMGGFGLKHPPPMMLIKNTPVPGNITSFSDVPVSSFITQYSTGQVTVEMEWELKKENSKRWNPEIQYTNNYNDPQFVDFAPDSTGEYRTTRPIGTRYLTRPL

SEQ ID NO: 862 - protein, 724 aa, Artificial Sequence
  Description of Artificial Sequence: Synthetic polypeptide
MSFVDHPPDWLEEVGEGLREFLGLEAGPPKPKPNQQHQDQARGLVLPGYNYLGPGNGLDRGEPVNRADEVAREHDISYNEQLEAGDNPYLKYNHADAEFQEKLADDTSFGGNLGKAVFQAKKRVLEPFGLVEEGAKTAPTGKRIDDHFPKRKKARTEEDSKPSTSSDAEAGPSGSQQLQIPAQPASSLGADTMSAGGGGPLGDNNQGADGVGNASGDWHCDSTWMGDRVVTKSTRTWVLPSYNNHQYREIKSGSVDGGNANAYFGYSTPWGYFDFNRFHSHWSPRDWQRLINNYWGFRPRSLRVKIFNIQVKEVTVQDSTTTIANNLTSTVQVFTDDDYQLPYVVGNGTEGCLPAFPPQVFTLPQYGYATLNRDNTENPTERSSFFCLEYFPSKMLRTGNNFEFTYNFEEVPFHSSFAPSQNLFKLANPLVDQYLYRFVSTNNTGGVQFNKNLAGRYANTYKNWFPGPMGRTQGWNLGSGVNRASVSAFATTNRMELEGASYQVPPQPNGMTNNLQGSNTYALENTMIFNSQPANPGTTATYLEGNMLITSESETQPVNRVAYNVGGQMATNNQSSTTAPATGTYNLQEIVPGSVWMERDVYLQGPIWAKIPETGAHFHPSPAMGGFGLKHPPPMMLIKNTPAPGNITSFSDVPVSSFITQYSTGQVTVEMEWELKKGNSKRWNPEIQYTNNYNDPQFVDFAPDSTGEYRTTRPIGTRYLTRPL

SEQ ID NO: 863 - protein, 724 aa, Artificial Sequence
  Description of Artificial Sequence: Synthetic polypeptide
MSFVDHPPDWLEEVGEGLREFLGLEAGPPKPKPNQQHQDQARGLVLPGYNYLGPGNGLDRGEPVNRADEVAREHDISYNEQLEAGDNPYLKYNHADAEFQEKLADDTSFGGNLGKAVFQAKKRVLEPFGLVEEGAKTAPTGKRIDDHFPKRKKARTEEDSKPSTSSDAEAGPSGSQQLQIPAQPASSLGADTMSAGGGGPLGDNNQGADGVGNASGDWHCDSTWMGDRVVTKSTRTWVLPSYNNHQYREIKSGSVDGSNANAYFGYSTPWGYFDFNRFHSHWSPRDWQRLINNYWGFRPRSLRVKIFNIQVKEVTVQDSTTTIANNLTSTVQVFTDDDYQLPYVVGNGTEGCLPAFPPQVFTLPQYGYATLNRDNTENPTERSSFFCLEYFPSKMLRTGNNFEFTYNFEEVPFHSSFAPSQNLFKLANPLVDQYLYRFVSTNNTGGVQFNKNLAGRYANTYKNWFPGPMGRTQGWNLGSGVNRASVSAFATTNRMELEGASYQVPPQPNGMTNNLQGSNTYALENTMIFNSQPANPGTTATYLEGNMLITSESETQPVNRVAYNVGGQMATNNQSSTTAPATGTYNLQEIVPGSVWMERDVYLQGPIWAKIPETGVHFHPSPAMGGFGLKHPPPMMLIKNTPVPGNITSFSDVPVSSFITQYSTGQVTVEMEWELKKENSKRWNPEIQYTNNYNDPQFVDFAPDSTGEYRTTRPIGTRYLTRPL

SEQ ID NO: 864 - protein, 724 aa, Artificial Sequence
  Description of Artificial Sequence: Synthetic polypeptide
  MOD_RES (551)..(551): Any amino acid
MSFVDHPPDWLEEVGEGLREFLGLEAGPPKPKPNQQHQDQARGLVLPGYNYLGPGNGLDRGEPVNRADEVAREHDISYNEQLEAGDNPYLKYNHADAEFQEKLADDTSFGGNLGKAVFQAKKRVLEPFGLVEEGAKTAPTGKRIDDHFPKRKKARTEEDSKPSTSSDAEAGPSGSQQLQIPAQPASSLGADTMSAGGGGPLGDNNQGADGVGNASGDWHCDSTWMGDRVVTKSTRTWVLPSYNNHQYREIKSGSVDGSNANAYFGYSTPWGYFDFNRFHSHWSPRDWQRLINNYWGFRPRSLRVKIFNIQVKEVTVQDSTTTIANNLTSTVQVFTDDDYQLPYVVGNGTEGCLPAFPPQVFTLPQYGYATLNRDNTENPTERSSFFCLEYFPSKMLRTGNNFEFTYNFEEVPFHSSFAPSQNLFKLANPLVDQYLYRFVSTNNTGGVQFNKNLAGRYANTYKNWFPGPMGRTQGWNLGSGVNRASVSAFATTNRMELEGASYQVPPQPNGMTNNLQGSNTYALENTMIFNSQPANPGTTATYLEGSMLITXESETQPVNRVAYNVGGQMATNNQSSTTAPATGTYNLQEIVPGSVWMERDVYLQGPIWAKIPETGAHFHPSPAMGGFGLKHPPPMMLIKNTPVPGNITSFSDVPVSSFITQYSTGQVTVEMEWELKKENSKRWNPEIQYTNNYNDPQFVDFAPDSTGEYRTTRPIGTRYLTRPL

SEQ ID NO: 865 - protein, 736 aa, Artificial Sequence; identical to SEQ ID NO: 39
  Description of Artificial Sequence: Synthetic polypeptide

SEQ ID NO: 866 - protein, 734 aa, Artificial Sequence; identical to SEQ ID NO: 57
  Description of Artificial Sequence: Synthetic polypeptide

SEQ ID NO: 867 - protein, 723 aa, Artificial Sequence
  Description of Artificial Sequence: Synthetic polypeptide
MSFVDHPPDWLEEVGEGLREFLGLEAGPPKPKPNQQHQDQARGLVLPGYNYLGPGNGLDRGEPVNRADEVAREHDISYNEQLEAGDNPYLKYNHADAEFQEKLADDTSFGGNLGKAVFQAKKRVLEPFGLVEEGAKTAPTGKRIDDHFPKRKKARTEEDSKPSTSSDAEAGPSGSQQLQIPAQPASSLGADTMSAGGGPLGDNNQGADGVGNASGDWHCDSTWMGDRVVTKSTRTWVLPSYNNHQYREIKSGSVDGSNANAYFGYSTPWGYFDFNRFHSHWSPRDWQRLINNYWGFRPRSLRVKIFNIQVKEVTVQDSTTTIANNLTSTVQVFTDDDYQLPYVVGNGTEGCLPAFPPQVFTLPQYGYATLNRDNTENPTERSSFFCLEYFPSKMLRTGNNFEFTYNFEEVPFHSSFAPSQNLFKLANPLVDQYLYRFVSTNNTGGVQFNKNLAGRYANTYKNWFPGPMGRTQGWNLGSGVNRASVSAFATTNRMELEGASYQVPPQPNGMTNNLQGSNTYALENTMIFNSQPANPGTTATYLEGNMLITSESETQPVNRVAYNVGGQMATNNQSSTTAPATGTYNLQEIVPGSVWMERDVYLQGPIWAKIPETGAHFHPSPAMGGFGLKHPPPMMLIKNTPVPGNITSFSDVPVSSFITQYSTGQVTVEMEWELKKENSKRWNPEIQYTNNYNDPQFVDFAPDSTGEYRTTRPIGTRYLTRPL

SEQ ID NO: 868 - protein, 743 aa, Artificial Sequence
  Description of Artificial Sequence: Synthetic polypeptide
MAADGYLPDWLEDNLSEGIREWWALKPGAPQPKANQQHQDNARGLVLPGYKYLGPGNGLDKGEPVNAADAAALEHDKAYDQQLKAGDNPYLKYNHADAEFQERLKEDTSFGGNLGRAVFQAKKRLLEPLGLVEEAAKTAPGKKRPVEQSPQEPDSSAGIGKSGAQPAKKRLNFGQTGDTESVPDPQPIGEPPAAPSGVGSLTMASGGGAPVADNNEGADGVGSSSGNWHCDSQWLGDRVITTSTRTWALPTYNNHLYKQISNSTSGGSSNDNAYFGYSTPWGYFDFNRFHCHFSPRDWQRLINNNWGFRPKRLNFKLFNIQVKEVTDNNGVKTIANNLTSTVQVFTDSDYQLPYVLGSAHEGCLPPFPADVFMIPQYGYLTLNDGSQAVGRSSFYCLEYFPSQMLRTGNNFQFSYEFENVPFHSSYAHSQSLDRLMNPLIDQYLYYLSRTINGSGQNQQTLKFSVAGPSNMAVQGRNYIPGPSYRQQRVSTTVTQNNNSEFAWPGASSWALNGRNSLMNPGPAMASHKEGEDRFFPLSGSLIFGKQGTGRDNVDADKVMITNEEEIKTTNPVATESYGQVATNHQSAQTLAVPFKAQAQTGWVQNQGILPGMVWQDRDVYLQGPIWAKIPHTDGNFHPSPLMGGFGMKHPPPQILIKNTPVPADPPTAFNKDKLNSFITQYSTGQVSVEIEWELQKENSKRWNPEIQYTSNYYKSNNVEFAVNTEGVYSEPRPIGTRYLTRNL

SEQ ID NO: 869 - DNA, 2232 bp, Artificial Sequence
  Description of Artificial Sequence: Synthetic polynucleotide
atggctgccgatggttatcttccagattggctcgaggacaaccttagtgaaggaattcgcgagtggtgggctttgaaacctggagcccctcaacccaaggcaaatcaacaacatcaagacaacgctcgaggtcttgtgcttccgggttacaaataccttggacccggcaacggactcgacaagggggagccggtcaacgcagcagacgcggcggccctcgagcacgacaaggcctacgaccagcagctcaaggccggagacaacccgtacctcaagtacaaccacgccgacgccgagttccaggagcggctcaaagaagatacgtcttttgggggcaacctcgggcgagcagtcttccaggccaaaaagaggcttcttgaacctcttggtctggttgaggaagcggctaagacggctcctggaaagaagaggcctgtagagcagtctcctcaggaaccggactcctccgcgggtattggcaaatcgggtgcacagcccgctaaaaagagactcaatttcggtcagactggcgacacagagtcagtcccagaccctcaaccaatcggagaacctcccgcagccccctcaggtgtgggatctcttacaatggcttcaggtggtggcgcaccagtggcagacaataacgaaggtgccgatggagtgggtagttcctcgggaaattggcattgcgattcccaatggctgggggacagagtcatcaccaccagcacccgaacctgggccctgcccacctacaacaatcacctctacaagcaaatctccaacagcacatctggaggatcttcaaatgacaacgcctacttcggctacagcaccccctgggggtattttgacttcaacagattccactgccacttctcaccacgtgactggcagcgactcatcaacaacaactggggattccggcctaagcgactcaacttcaagctcttcaacattcaggtcaaagaggttacggacaacaatggagtcaagaccatcgccaataaccttaccagcacggtccaggtcttcacggactcagactatcagctcccgtacgtgctcgggtcggctcacgagggctgcctcccgccgttcccagcggacgttttcatgattcctcagtacgggtatctgacgcttaatgatggaagccaggccgtgggtcgttcgtccttttactgcctggaatatttcccgtcgcaaatgctaagaacgggtaacaacttccagttcagctacgagtttgagaacgtacctttccatagcagctacgctcacagccaaagcctggaccgactaatgaatccactcatcgaccaatacttgtactatctctctagaactattaacggttctggacagaatcaacaaacgctaaaattcagtgtggccggacccagcaacatggctgtccagggaagaaactacatacctggacccagctaccgacaacaacgtgtctcaaccactgtgactcaaaacaacaacagcgaatttgcttggcctggagcttcttcttgggctctcaatggacgtaatagcttgatgaatcctggacctgctatggccagccacaaagaaggagaggaccgtttctttcctttgtctggatctttaatttttggcaaacaaggtaccggcagagacaacgtggatgcggacaaagtcatgataaccaacgaagaagaaattaaaactactaacccggtagcaacggagtcctatggacaagtggccacaaaccaccagagtgcccaaactttggcggtgccttttaaggcacaggcgcagaccggttgggttcaaaaccaaggaatacttccgggtatggtttggcaggacagagatgtgtacctgcaaggacccatttgggccaaaattcctcacacggacggcaactttcacccttctccgctgatgggagggtttggaatgaagcacccgcctcctcagatcctcatcaaaaacacacctgtacctgcggatcctccaacggccttcaacaaggacaagctgaactctttcatcacccagtattctactggccaagtcagcgtggagatcgagtgggagctgcagaaggaaaacagcaagcgctggaacccggagatccagtacacttccaactattacaagtctaataatgttgaatttgctgttaatactgaaggtgtatatagtgaaccccgccccattggcaccagatacctgactcgtaatctgtaa

SEQ ID NO: 870 - protein, 736 aa, Artificial Sequence
  Description of Artificial Sequence: Synthetic polypeptide
MAADGYLPDWLEDNLSEGIREWWALKPGAPQPKANQQHQDNARGLVLPGYKYLGPGNGLDKGEPVNAADAAALEHDKAYDQQLKAGDNPYLKYNHADAEFQERLKEDTSFGGNLGRAVFQAKKRLLEPLGLVEEAAKTAPGKKRPVEQSPQEPDSSAGIGKSGAQPAKKRLNFGQTGDTESVPDPQPIGEPPAAPSGVGSLTMASGGGAPVADNNEGADGVGSSSGNWHCDSQWLGDRVITTSTRTWALPTYNNHLYKQISNSTSGGSSNDNAYFGYSTPWGYFDFNRFHCHFSPRDWQRLINNNWGFRPKRLNFKLFNIQVKEVTDNNGVKTIANNLTSTVQVFTDSDYQLPYVLGSAHEGCLPPFPADVFMIPQYGYLTLNDGSQAVGRSSFYCLEYFPSQMLRTGNNFQFSYEFENVPFHSSYAHSQSLDRLMNPLIDQYLYYLSRTIQSSQTPRQTLKFSVAGPSNMAVQGRNYIPGPSYRQQRVSTTVTQNNNSEFAWPGASSWALNGRNSLMNPGPAMASHKEGEDRFFPLSGSLIFGKQGTGRDNVDADKVMITNEEEIKTTNPVATESYGQVATNHQSAQAQAQTGWVQNQGILPGMVWQDRDVYLQGPIWAKIPHTDGNFHPSPLMGGFGMKHPPPQILIKNTPVPADPPTAFNKDKLNSFITQYSTGQVSVEIEWELQKENSKRWNPEIQYTSNYYKSNNVEFAVNTEGVYSEPRPIGTRYLTRNL

SEQ ID NO: 871 - protein, 743 aa, Artificial Sequence
  Description of Artificial Sequence: Synthetic polypeptide
MAADGYLPDWLEDNLSEGIREWWALKPGAPQPKANQQHQDNARGLVLPGYKYLGPGNGLDKGEPVNAADAAALEHDKAYDQQLKAGDNPYLKYNHADAEFQERLKEDTSFGGNLGRAVFQAKKRLLEPLGLVEEAAKTAPGKKRPVEQSPQEPDSSAGIGKSGAQPAKKRLNFGQTGDTESVPDPQPIGEPPAAPSGVGSLTMASGGGAPVADNNEGADGVGSSSGNWHCDSQWLGDRVITTSTRTWALPTYNNHLYKQISNSTSGGSSNDNAYFGYSTPWGYFDFNRFHCHFSPRDWQRLINNNWGFRPKRLNFKLFNIQVKEVTDNNGVKTIANNLTSTVQVFTDSDYQLPYVLGSAHEGCLPPFPADVFMIPQYGYLTLNDGSQAVGRSSFYCLEYFPSQMLRTGNNFQFSYEFENVPFHSSYAHSQSLDRLMNPLIDQYLYYLSRTIILGTGTSQTLKFSVAGPSNMAVQGRNYIPGPSYRQQRVSTTVTQNNNSEFAWPGASSWALNGRNSLMNPGPAMASHKEGEDRFFPLSGSLIFGKQGTGRDNVDADKVMITNEEEIKTTNPVATESYGQVATNHQSAQTRTNPEAAQAQTGWVQNQGILPGMVWQDRDVYLQGPIWAKIPHTDGNFHPSPLMGGFGMKHPPPQILIKNTPVPADPPTAFNKDKLNSFITQYSTGQVSVEIEWELQKENSKRWNPEIQYTSNYYKSNNVEFAVNTEGVYSEPRPIGTRYLTRNL

SEQ ID NO: 872 - protein, 743 aa, Artificial Sequence
  Description of Artificial Sequence: Synthetic polypeptide
MAADGYLPDWLEDNLSEGIREWWALKPGAPQPKANQQHQDNARGLVLPGYKYLGPGNGLDKGEPVNAADAAALEHDKAYDQQLKAGDNPYLKYNHADAEFQERLKEDTSFGGNLGRAVFQAKKRLLEPLGLVEEAAKTAPGKKRPVEQSPQEPDSSAGIGKSGAQPAKKRLNFGQTGDTESVPDPQPIGEPPAAPSGVGSLTMASGGGAPVADNNEGADGVGSSSGNWHCDSQWLGDRVITTSTRTWALPTYNNHLYKQISNSTSGGSSNDNAYFGYSTPWGYFDFNRFHCHFSPRDWQRLINNNWGFRPKRLNFKLFNIQVKEVTDNNGVKTIANNLTSTVQVFTDSDYQLPYVLGSAHEGCLPPFPADVFMIPQYGYLTLNDGSQAVGRSSFYCLEYFPSQMLRTGNNFQFSYEFENVPFHSSYAHSQSLDRLMNPLIDQYLYYLSRTIILGTGTSQTLKFSVAGPSNMAVQGRNYIPGPSYRQQRVSTTVTQNNNSEFAWPGASSWALNGRNSLMNPGPAMASHKEGEDRFFPLSGSLIFGKQGTGRDNVDADKVMITNEEEIKTTNPVATESYGQVATNHQSAQNGGTSSSAQAQTGWVQNQGILPGMVWQDRDVYLQGPIWAKIPHTDGNFHPSPLMGGFGMKHPPPQILIKNTPVPADPPTAFNKDKLNSFITQYSTGQVSVEIEWELQKENSKRWNPEIQYTSNYYKSNNVEFAVNTEGVYSEPRPIGTRYLTRNL

SEQ ID NO: 873 - protein, 7 aa, Artificial Sequence
  Description of Artificial Sequence: Synthetic peptide
TLAVPFK

SEQ ID NO: 874 - protein, 7 aa, Artificial Sequence
  Description of Artificial Sequence: Synthetic peptide
KFPVALT

SEQ ID NO: 875 - protein, 6 aa, Artificial Sequence
  Description of Artificial Sequence: Synthetic peptide
LAVPFK

SEQ ID NO: 876 - protein, 5 aa, Artificial Sequence
  Description of Artificial Sequence: Synthetic peptide
AVPFK

SEQ ID NO: 877 - protein, 4 aa, Artificial Sequence
  Description of Artificial Sequence: Synthetic peptide
VPFK

SEQ ID NO: 878 - protein, 6 aa, Artificial Sequence
  Description of Artificial Sequence: Synthetic peptide
TLAVPF

SEQ ID NO: 879 - protein, 5 aa, Artificial Sequence
  Description of Artificial Sequence: Synthetic peptide
TLAVP

SEQ ID NO: 880 - protein, 4 aa, Artificial Sequence
  Description of Artificial Sequence: Synthetic peptide
TLAV

SEQ ID NO: 881 - protein, 7 aa, Artificial Sequence
  Description of Artificial Sequence: Synthetic peptide
SVSKPFL

SEQ ID NO: 882 - protein, 7 aa, Artificial Sequence
  Description of Artificial Sequence: Synthetic peptide
FTLTTPK

SEQ ID NO: 883 - protein, 7 aa, Artificial Sequence
  Description of Artificial Sequence: Synthetic peptide
MNATKNV

SEQ ID NO: 884 - protein, 7 aa, Artificial Sequence
  Description of Artificial Sequence: Synthetic peptide
QSSQTPR

SEQ ID NO: 885 - protein, 7 aa, Artificial Sequence
  Description of Artificial Sequence: Synthetic peptide
ILGTGTS

SEQ ID NO: 886 - protein, 7 aa, Artificial Sequence
  Description of Artificial Sequence: Synthetic peptide
TRTNPEA

SEQ ID NO: 887 - protein, 7 aa, Artificial Sequence
  Description of Artificial Sequence: Synthetic peptide
NGGTSSS

SEQ ID NO: 888 - protein, 7 aa, Artificial Sequence
  Description of Artificial Sequence: Synthetic peptide
YTLSQGW

SEQ ID NO: 889 - DNA, 21 bp, Artificial Sequence
  Description of Artificial Sequence: Synthetic oligonucleotide
aagtttcctgtggcgttgact

SEQ ID NO: 890 - DNA, 21 bp, Artificial Sequence
  Description of Artificial Sequence: Synthetic oligonucleotide
actttggcggtgccttttaag

SEQ ID NO: 891 - DNA, 21 bp, Artificial Sequence
  Description of Artificial Sequence: Synthetic oligonucleotide
agtgtgagtaagccttttttg

SEQ ID NO: 892 - DNA, 21 bp, Artificial Sequence
  Description of Artificial Sequence: Synthetic oligonucleotide
tttacgttgacgacgcctaag

SEQ ID NO: 893 - DNA, 21 bp, Artificial Sequence
  Description of Artificial Sequence: Synthetic oligonucleotide
atgaatgctacgaagaatgtg

SEQ ID NO: 894 - DNA, 21 bp, Artificial Sequence
  Description of Artificial Sequence: Synthetic oligonucleotide
cagtcgtcgcagacgcctagg

SEQ ID NO: 895 - DNA, 21 bp, Artificial Sequence
  Description of Artificial Sequence: Synthetic oligonucleotide
attctggggactggtacttcg

SEQ ID NO: 896 - DNA, 21 bp, Artificial Sequence
  Description of Artificial Sequence: Synthetic oligonucleotide
acgcggactaatcctgaggct

SEQ ID NO: 897 - DNA, 21 bp, Artificial Sequence
  Description of Artificial Sequence: Synthetic oligonucleotide
aatggggggactagtagttct

SEQ ID NO: 898 - DNA, 21 bp, Artificial Sequence
  Description of Artificial Sequence: Synthetic oligonucleotide
tatactttgtcgcagggttgg

SEQ ID NO: 899 - DNA, 609 bp, Unknown
  Description of Unknown: Internal ribosome entry site
aattccgcccctctcccccccccccctctccctcccccccccctaacgttactggccgaagccgcttggaataaggccggtgtgcgtttgtctatatgttattttccaccatattgccgtcttttggcaatgtgagggcccggaaacctggccctgtcttcttgacgagcattcctaggggtctttcccctctcgccaaaggaatgcaaggtctgttgaatgtcgtgaaggaagcagttcctctggaagcttcttgaagacaaacaacgtctgtagcgaccctttgcaggcagcggaaccccccacctggcgacaggtgcctctgcggccaaaagccacgtgtataagatacacctgcaaaggcggcacaaccccagtgccacgttgtgagttggatagttgtggaaagagtcaaatggctctcctcaagcgtattcaacaaggggctgaaggatgcccagaaggtaccccattgtatgggatctgatctggggcctcggtgcacatgctttacatgtgtttagtcgaggttaaaaaaacgtctaggccccccgaaccacggggacgtggttttcctttgaaaaacacgatgataatatggccacaacc

SEQ ID NO: 900 - DNA, 75 bp, Foot and mouth disease virus
  2A sequence
ggaagcggagtgaaacagactttgaattttgaccttctcaagttggcgggagacgtggagtccaaccctggacct

SEQ ID NO: 901 - DNA, 66 bp, Porcine teschovirus 1
  2A sequence
ggaagcggagctactaacttcagcctgctgaagcaggctggagacgtggaggagaaccctggacct

SEQ ID NO: 902 - DNA, 12 bp, Unknown
  Description of Unknown: Furin cleavage site
cgggccaagcgg

SEQ ID NO: 903 - DNA, 75 bp, Artificial Sequence
  Description of Artificial Sequence: Synthetic oligonucleotide
ggcggaggtggctccggaggcggaggcagcggcggaggtgggtctggcggaggcgggtgcggcggaggtggctcc

SEQ ID NO: 904 - protein, 8 aa, Unknown
  Description of Unknown: Linker sequence
LWSLDTTP

SEQ ID NO: 905 - protein, 4 aa, Unknown
  Description of Unknown: Linker sequence
MDGA

SEQ ID NO: 906 - protein, 4 aa, Unknown
  Description of Unknown: Linker sequence
QGNY

SEQ ID NO: 907 - protein, 4 aa, Unknown
  Description of Unknown: Linker sequence
RDGK

SEQ ID NO: 908 - protein, 5 aa, Unknown
  Description of Unknown: Linker sequence
DLNVG

SEQ ID NO: 909 - protein, 5 aa, Unknown
  Description of Unknown: Linker sequence
MATDE

SEQ ID NO: 910 - protein, 6 aa, Unknown
  Description of Unknown: Linker sequence
LTGSGA

SEQ ID NO: 911 - protein, 7 aa, Unknown
  Description of Unknown: Linker sequence
FAASGEL

SEQ ID NO: 912 - protein, 7 aa, Unknown
  Description of Unknown: Linker sequence
FNNREEQ

SEQ ID NO: 913 - protein, 7 aa, Unknown
  Description of Unknown: Linker sequence
GYMARNE

SEQ ID NO: 914 - protein, 7 aa, Unknown
  Description of Unknown: Linker sequence
VGTEHAK

SEQ ID NO: 915 - protein, 5 aa, Unknown
  Description of Unknown: Linker sequence
LNLDY

SEQ ID NO: 916 - protein, 14 aa, Unknown
  Description of Unknown: Linker sequence
KDGVIKGYYAYINP

SEQ ID NO: 917 - protein, 4 aa, Unknown
  Description of Unknown: Linker sequence
SKAQ

SEQ ID NO: 918 - protein, 6 aa, Unknown
  Description of Unknown: Linker sequence
LFNASA

SEQ ID NO: 919 - protein, 6 aa, Unknown
  Description of Unknown: Linker sequence
YQDGSV

SEQ ID NO: 920 - protein, 7 aa, Unknown
  Description of Unknown: Linker sequence
IHPQSVI

SEQ ID NO: 921 - protein, 5 aa, Unknown
  Description of Unknown: Linker sequence
KNPMD

SEQ ID NO: 922 - protein, 7 aa, Unknown
  Description of Unknown: Linker sequence
LGSEVPL

SEQ ID NO: 923 - protein, 14 aa, Unknown
  Description of Unknown: Linker sequence
LNVNNKVPNGATSM

SEQ ID NO: 924 - protein, 5 aa, Unknown
  Description of Unknown: Linker sequence
TTDDL

SEQ ID NO: 925 - protein, 6 aa, Unknown
  Description of Unknown: Linker sequence
AAGIRA

SEQ ID NO: 926 - protein, 6 aa, Unknown
  Description of Unknown: Linker sequence
QAGVDC

SEQ ID NO: 927 - protein, 6 aa, Unknown
  Description of Unknown: Linker sequence
YNPTDI

SEQ ID NO: 928 - protein, 8 aa, Unknown
  Description of Unknown: Linker sequence
EFLPRDTG

SEQ ID NO: 929 - protein, 9 aa, Unknown
  Description of Unknown: Linker sequence
GSGLPEQTD

SEQ ID NO: 930 - protein, 5 aa, Unknown
  Description of Unknown: Linker sequence
YSSNV

SEQ ID NO: 931 - protein, 6 aa, Unknown
  Description of Unknown: Linker sequence
KAGLNP

SEQ ID NO: 932 - protein, 6 aa, Unknown
  Description of Unknown: Linker sequence
KEEGKF

SEQ ID NO: 933 - protein, 6 aa, Unknown
  Description of Unknown: Linker sequence
VRGGIW

SEQ ID NO: 934 - protein, 9 aa, Unknown
  Description of Unknown: Linker sequence
QRYLKPENK

SEQ ID NO: 935 - protein, 6 aa, Unknown
  Description of Unknown: Linker sequence
EGVGEI

SEQ ID NO: 936 - protein, 8 aa, Unknown
  Description of Unknown: Linker sequence
PVDPPEKW

SEQ ID NO: 937 - protein, 9 aa, Unknown
  Description of Unknown: Linker sequence
AHPGVSIPT

SEQ ID NO: 938 - protein, 15 aa, Unknown
  Description of Unknown: Linker sequence
FKDPELPRNTPKRSI

SEQ ID NO: 939 - protein, 14 aa, Unknown
  Description of Unknown: Linker sequence
YLEGVERNPVGAGL

SEQ ID NO: 940 - protein, 5 aa, Unknown
  Description of Unknown: Linker sequence
CPRCP

SEQ ID NO: 941 - protein, 7 aa, Unknown
  Description of Unknown: Linker sequence
APPVAGP

SEQ ID NO: 942 - protein, 8 aa, Unknown
  Description of Unknown: Linker sequence
APELLGGP

SEQ ID NO: 943 - protein, 9 aa, Unknown
  Description of Unknown: Linker sequence
CCVECPPCP

SEQ ID NO: 944 - protein, 12 aa, Unknown
  Description of Unknown: Linker sequence
ELKTPLGDTTHT

SEQ ID NO: 945 - protein, 6 aa, Unknown
  Description of Unknown: Linker sequence
HNVDDV

SEQ ID NO: 946 - protein, 6 aa, Unknown
  Description of Unknown: Linker sequence
AGQKDE

SEQ ID NO: 947 - protein, 9 aa, Unknown
  Description of Unknown: Linker sequence
KLNLPILPT

SEQ ID NO: 948 - protein, 9 aa, Unknown
  Description of Unknown: Linker sequence
SSPRVTNEG

SEQ ID NO: 949 - protein, 17 aa, Unknown
  Description of Unknown: Linker sequence
KAAAALKGSDHRRATNV

SEQ ID NO: 950 - protein, 4 aa, Unknown
  Description of Unknown: Linker sequence
KKRV

SEQ ID NO: 951 - protein, 5 aa, Unknown
  Description of Unknown: Linker sequence
QLEVK

SEQ ID NO: 952 - protein, 5 aa, Unknown
  Description of Unknown: Linker sequence
TNGRL

SEQ ID NO: 953 - protein, 10 aa, Unknown
  Description of Unknown: Linker sequence
LYTPEIAENQ

SEQ ID NO: 954 - protein, 4 aa, Unknown
  Description of Unknown: Linker sequence
NSEY

SEQ ID NO: 955 - protein, 5 aa, Unknown
  Description of Unknown: Linker sequence
SMKDF

SEQ ID NO: 956 - protein, 12 aa, Unknown
  Description of Unknown: Linker sequence
KDRWQERHILRP

SEQ ID NO: 957 - protein, 14 aa, Unknown
  Description of Unknown: Linker sequence
DDPEGPVMPGSHSV

SEQ ID NO: 958 - protein, 23 aa, Unknown
  Description of Unknown: Linker sequence
LCPSNPTCIYKYGDESSNSLPGH

SEQ ID NO: 959 - protein, 35 aa, Unknown
  Description of Unknown: Linker sequence
LCEALQHNLPPFTPPPHTEDSVYPMPRVIFRMFDY

SEQ ID NO: 960 - protein, 5 aa, Unknown
  Description of Unknown: Linker sequence
NMVTC

SEQ ID NO: 961 - protein, 10 aa, Unknown
  Description of Unknown: Linker sequence
NLEEHLGKLN

SEQ ID NO: 962 - protein, 4 aa, Unknown
  Description of Unknown: Linker sequence
QGAH

SEQ ID NO: 963 - protein, 6 aa, Unknown
  Description of Unknown: Linker sequence
QRIPLY

SEQ ID NO: 964 - protein, 8 aa, Unknown
  Description of Unknown: Linker sequence
QRKPLFYI

SEQ ID NO: 965 - protein, 4 aa, Unknown
  Description of Unknown: Linker sequence
AGGR

SEQ ID NO: 966 - protein, 6 aa, Unknown
  Description of Unknown: Linker sequence
YPYKGE

SEQ ID NO: 967 - protein, 7 aa, Unknown
  Description of Unknown: Linker sequence
NHETGEL

SEQ ID NO: 968 - protein, 8 aa, Unknown
  Description of Unknown: Linker sequence
TFELKTDV

SEQ ID NO: 969 - protein, 25 aa, Unknown
  Description of Unknown: Linker sequence
ALGLPHSDVFRQAKDVAESDRGFSL

SEQ ID NO: 970 - protein, 4 aa, Unknown
  Description of Unknown: Linker sequence
LKDW

SEQ ID NO: 971 - protein, 4 aa, Unknown
  Description of Unknown: Linker sequence
WTGM

SEQ ID NO: 972 - protein, 4 aa, Unknown
  Description of Unknown: Linker sequence
YNGL

SEQ ID NO: 973 - protein, 5 aa, Unknown
  Description of Unknown: Linker sequence
DRPGE

SEQ ID NO: 974 - protein, 5 aa, Unknown
  Description of Unknown: Linker sequence
LGVSI

SEQ ID NO: 975 - protein, 5 aa, Unknown
  Description of Unknown: Linker sequence
RSTGR

SEQ ID NO: 976 - protein, 5 aa, Unknown
  Description of Unknown: Linker sequence
YRMLP

SEQ ID NO: 977 - protein, 5 aa, Unknown
  Description of Unknown: Linker sequence
YVNDF

SEQ ID NO: 978 - protein, 6 aa, Unknown
  Description of Unknown: Linker sequence
EYGSPR

SEQ ID NO: 979 - protein, 6 aa, Unknown
  Description of Unknown: Linker sequence
IDRGRV

SEQ ID NO: 980 - protein, 7 aa, Unknown
  Description of Unknown: Linker sequence
RAADGQM

SEQ ID NO: 981 - protein, 7 aa, Unknown
  Description of Unknown: Linker sequence
TKEKNNV

SEQ ID NO: 982 - protein, 8 aa, Unknown
  Description of Unknown: Linker sequence
DQAGLGHE

SEQ ID NO: 983 - protein, 8 aa, Unknown
  Description of Unknown: Linker sequence
FSQIKDAM

SEQ ID NO: 984 - protein, 8 aa, Unknown
  Description of Unknown: Linker sequence
QAAPGKST

SEQ ID NO: 985 - protein, 8 aa, Unknown
  Description of Unknown: Linker sequence
QLPAGATQ

SEQ ID NO: 986 - protein, 9 aa, Unknown
  Description of Unknown: Linker sequence
AAKHPDMLT

SEQ ID NO: 987 - protein, 9 aa, Unknown
  Description of Unknown: Linker sequence
LASKLPTGV

SEQ ID NO: 988 - protein, 9 aa, Unknown
  Description of Unknown: Linker sequence
PNGLEDTPQ

SEQ ID NO: 989 - protein, 9 aa, Unknown
  Description of Unknown: Linker sequence
QERLSGNQA

SEQ ID NO: 990 - protein, 12 aa, Unknown
  Description of Unknown: Linker sequence
NGFGFAGRGQNT

SEQ ID NO: 991 - protein, 14 aa, Unknown
  Description of Unknown: Linker sequence
RLPSSFLPDEDQGV

SEQ ID NO: 992 - protein, 15 aa, Unknown
  Description of Unknown: Linker sequence
FNLPAIVELGTATGF

SEQ ID NO: 993 - protein, 17 aa, Unknown
  Description of Unknown: Linker sequence
MLKPIAKGDHGEGKKGF

SEQ ID NO: 994 - protein, 7 aa, Unknown
  Description of Unknown: Linker sequence
LAHLLPP

SEQ ID NO: 995 - protein, 9 aa, Unknown
  Description of Unknown: Linker sequence
QAPEAGFEH

SEQ ID NO: 996 - protein, 10 aa, Unknown
  Description of Unknown: Linker sequence
KDKFICDRPL

SEQ ID NO: 997 - protein, 16 aa, Unknown
  Description of Unknown: Linker sequence
PVEFHNPLKGHVAEPH

SEQ ID NO: 998 - protein, 16 aa, Unknown
  Description of Unknown: Linker sequence
QKTMPSAPAPDGLPSE

SEQ ID NO: 999 - protein, 4 aa, Unknown
  Description of Unknown: Linker sequence
AGRV

SEQ ID NO: 1000 - protein, 6 aa, Unknown
  Description of Unknown: Linker sequence
AGHGFA

SEQ ID NO: 1001 - protein, 10 aa, Unknown
  Description of Unknown: Linker sequence
LPPGPGPFPG

SEQ ID NO: 1002 - protein, 11 aa, Unknown
  Description of Unknown: Linker sequence
IFGIGGGLLEY

SEQ ID NO: 1003 - protein, 15 aa, Unknown
  Description of Unknown: Linker sequence
AYYNFEDLPNNMDNI

SEQ ID NO: 1004 - protein, 10 aa, Unknown
  Description of Unknown: Linker sequence
MICTRSKPKC

SEQ ID NO: 1005 - protein, 6 aa, Unknown
  Description of Unknown: Linker sequence
QSSLDL

SEQ ID NO: 1006 - protein, 6 aa, Unknown
  Description of Unknown: Linker sequence
IPDGDE

SEQ ID NO: 1007 - protein, 15 aa, Unknown
  Description of Unknown: Linker sequence
PTNPVTGEIPTLSAL

SEQ ID NO: 1008 - protein, 9 aa, Unknown
  Description of Unknown: Linker sequence
GGPCRADIK

SEQ ID NO: 1009 - protein, 11 aa, Unknown
  Description of Unknown: Linker sequence
SGACSTDKPCG

SEQ ID NO: 1010 - protein, 11 aa, Unknown
  Description of Unknown: Linker sequence
EGSKTVPIADK

SEQ ID NO: 1011 - protein, 7 aa, Unknown
  Description of Unknown: Linker sequence
INGKKPE

SEQ ID NO: 1012 - protein, 8 aa, Unknown
  Description of Unknown: Linker sequence
ELPAYMSG

SEQ ID NO: 1013 - protein, 8 aa, Unknown
  Description of Unknown: Linker sequence
VTGTLDYG

SEQ ID NO: 1014 - protein, 15 aa, Unknown
  Description of Unknown: Linker sequence
AAEDAIEIHPGTPNV

SEQ ID NO: 1015 - protein, 21 aa, Unknown
  Description of Unknown: Linker sequence
LEFKMPADGRIWGSKYPRPTA

SEQ ID NO: 1016 - protein, 5 aa, Unknown
  Description of Unknown: Linker sequence
SDYDV

SEQ ID NO: 1017 - protein, 5 aa, Unknown
  Description of Unknown: Linker sequence
VGSGP

SEQ ID NO: 1018 - protein, 6 aa, Unknown
  Description of Unknown: Linker sequence
IDSQSA

SEQ ID NO: 1019 - protein, 6 aa, Unknown
  Description of Unknown: Linker sequence
NKRDAY

SEQ ID NO: 1020 - protein, 6 aa, Unknown
  Description of Unknown: Linker sequence
RKGIRT

SEQ ID NO: 1021 - protein, 7 aa, Unknown
  Description of Unknown: Linker sequence
MGERFGG

SEQ ID NO: 1022 - protein, 8 aa, Unknown
  Description of Unknown: Linker sequence
VDTGAEKR

SEQ ID NO: 1023 - protein, 10 aa, Unknown
  Description of Unknown: Linker sequence
TGGHPSKEAQ

SEQ ID NO: 1024 - protein, 10 aa, Unknown
  Description of Unknown: Linker sequence
VPAATEGGLH

SEQ ID NO: 1025 - protein, 18 aa, Unknown
  Description of Unknown: Linker sequence
VLDTVDIENYISVPKTEG

SEQ ID NO: 1026 - protein, 5 aa, Unknown
  Description of Unknown: Linker sequence
DLAYV

SEQ ID NO: 1027 - protein, 13 aa, Unknown
  Description of Unknown: Linker sequence
VVPPELKTKDHII

SEQ ID NO: 1028 - protein, 5 aa, Unknown
  Description of Unknown: Linker sequence
WKQHK

SEQ ID NO: 1029 - protein, 7 aa, Unknown
  Description of Unknown: Linker sequence
KIQGCSA

SEQ ID NO: 1030 - protein, 8 aa, Unknown
  Description of Unknown: Linker sequence
DVASGDGL

SEQ ID NO: 1031 - protein, 20 aa, Unknown
  Description of Unknown: Linker sequence
VSPWHRMSYFFNPVSNFISF

SEQ ID NO: 1032 - protein, 5 aa, Unknown
  Description of Unknown: Linker sequence
YDNDE

SEQ ID NO: 1033 - protein, 10 aa, Unknown
  Description of Unknown: Linker sequence
RNGDSRRPGL

SEQ ID NO: 1034 - protein, 4 aa, Unknown
  Description of Unknown: Linker sequence
VEET

SEQ ID NO: 1035 - protein, 6 aa, Unknown
  Description of Unknown: Linker sequence
AIQDIS

SEQ ID NO: 1036 - protein, 6 aa, Unknown
  Description of Unknown: Linker sequence
KLPITL

SEQ ID NO: 1037 - protein, 11 aa, Unknown
  Description of Unknown: Linker sequence
ADSAYITYAND

SEQ ID NO: 1038 - protein, 4 aa, Unknown
  Description of Unknown: Linker sequence
FGGV

SEQ ID NO: 1039 - protein, 4 aa, Unknown
  Description of Unknown: Linker sequence
YGIK

SEQ ID NO: 1040 - protein, 5 aa, Unknown
  Description of Unknown: Linker sequence
INFNS

SEQ ID NO: 1041 - protein, 5 aa, Unknown
  Description of Unknown: Linker sequence
YGRDH

SEQ ID NO: 1042 - protein, 6 aa, Unknown
  Description of Unknown: Linker sequence
GMSRTN

SEQ ID NO: 1043 - protein, 7 aa, Unknown
  Description of Unknown: Linker sequence
ASLGING

SEQ ID NO: 1044 - protein, 7 aa, Unknown
  Description of Unknown: Linker sequence
SAPRLQH

SEQ ID NO: 1045 - protein, 7 aa, Unknown
  Description of Unknown: Linker sequence
YIPDFGG

SEQ ID NO: 1046 - protein, 8 aa, Unknown
  Description of Unknown: Linker sequence
SLPNYLAP

SEQ ID NO: 1047 - protein, 9 aa, Unknown
  Description of Unknown: Linker sequence
LDGKFADNV

SEQ ID NO: 1048 - protein, 9 aa, Unknown
  Description of Unknown: Linker sequence
VINNVNADP

SEQ ID NO: 1049 - protein, 10 aa, Unknown
  Description of Unknown: Linker sequence
QTQHALEKLS

SEQ ID NO: 1050 - protein, 11 aa, Unknown
  Description of Unknown: Linker sequence
EGKVFKTRHTG

SEQ ID NO: 1051 - protein, 11 aa, Unknown
  Description of Unknown: Linker sequence
VKADSEGQPGP

SEQ ID NO: 1052 - protein, 12 aa, Unknown
  Description of Unknown: Linker sequence
RAFVYHPDIEDR

SEQ ID NO: 1053 - protein, 13 aa, Unknown
  Description of Unknown: Linker sequence
AFGDVDTADPLDP

SEQ ID NO: 1054 - protein, 13 aa, Unknown
  Description of Unknown: Linker sequence
LKTETHARGEGST

SEQ ID NO: 1055 - protein, 16 aa, Unknown
  Description of Unknown: Linker sequence
KNGPIDFQPREPFSAL

SEQ ID NO: 1056 - protein, 16 aa, Unknown
  Description of Unknown: Linker sequence
VINPGTDRNWTGHPFV

SEQ ID NO: 1057 - protein, 17 aa, Unknown
  Description of Unknown: Linker sequence
QITQEYFGFATHLAYQG

SEQ ID NO: 1058 - protein, 22 aa, Unknown
  Description of Unknown: Linker sequence
NHWDNLNRVVERGYAGLSLWDW

SEQ ID NO: 1059 - protein, 15 aa, Unknown
  Description of Unknown: Linker sequence
VGSLVSGPSFTSGEV

SEQ ID NO: 1060 - protein, 13 aa, Unknown
  Description of Unknown: Linker sequence
ITSQETDGWYTLA

SEQ ID NO: 1061 - protein, 21 aa, Unknown
  Description of Unknown: Linker sequence
RNKEGQDVNEQGQPIRGRTQD

SEQ ID NO: 1062 - protein, 5 aa, Unknown
  Description of Unknown: Linker sequence
HFQPF

SEQ ID NO: 1063 - protein, 5 aa, Unknown
  Description of Unknown: Linker sequence
TGTPV

SEQ ID NO: 1064 - protein, 7 aa, Unknown
  Description of Unknown: Linker sequence
PLSHFDA

SEQ ID NO: 1065 - protein, 4 aa, Unknown
  Description of Unknown: Linker sequence
FNPI

SEQ ID NO: 1066 - protein, 4 aa, Unknown
  Description of Unknown: Linker sequence
KNGS

SEQ ID NO: 1067 - protein, 5 aa, Unknown
  Description of Unknown: Linker sequence
DRFQG

SEQ ID NO: 1068 - protein, 5 aa, Unknown
  Description of Unknown: Linker sequence
EVPDI

SEQ ID NO: 1069 - protein, 6 aa, Unknown
  Description of Unknown: Linker sequence
ACELHT

SEQ ID NO: 1070 - protein, 6 aa, Unknown
  Description of Unknown: Linker sequence
LPATLT

SEQ ID NO: 1071 - protein, 6 aa, Unknown
  Description of Unknown: Linker sequence
LPDPYG

SEQ ID NO: 1072 - protein, 6 aa, Unknown
  Description of Unknown: Linker sequence
LPHAQP

SEQ ID NO: 1073 - protein, 6 aa, Unknown
  Description of Unknown: Linker sequence
RQQASF

SEQ ID NO: 1074 - protein, 6 aa, Unknown
  Description of Unknown: Linker sequence
YIGGNL

SEQ ID NO: 1075 - protein, 7 aa, Unknown
  Description of Unknown: Linker sequence
FGRTCKE

SEQ ID NO: 1076 - protein, 7 aa, Unknown
  Description of Unknown: Linker sequence
VDKGDNV

SEQ ID NO: 1077 - protein, 7 aa, Unknown
  Description of Unknown: Linker sequence
WGPECNH

SEQ ID NO: 1078 - protein, 8 aa, Unknown
  Description of Unknown: Linker sequence
VRRCEAQK

SEQ ID NO: 1079 - protein, 9 aa, Unknown
  Description of Unknown: Linker sequence
KVLIKEEDA

SEQ ID NO: 1080 - protein, 9 aa, Unknown
  Description of Unknown: Linker sequence
SCATGWKGL

SEQ ID NO: 1081 - protein, 10 aa, Unknown
  Description of Unknown: Linker sequence
IVDLPDHIEV

SEQ ID NO: 1082 - protein, 10 aa, Unknown
  Description of Unknown: Linker sequence
LCTACMNNGV

SEQ ID NO: 1083 - protein, 13 aa, Unknown
  Description of Unknown: Linker sequence
RCSGQEGCKSYVF

SEQ ID NO: 1084 - protein, 22 aa, Unknown
  Description of Unknown: Linker sequence
LCSPGWQGLQCEREGIPRMTPK

SEQ ID NO: 1085 - protein, 25 aa, Unknown
  Description of Unknown: Linker sequence
CNEACHPGFYGPDCKLRCSCNNGEM

SEQ ID NO: 1086 - protein, 4 aa, Unknown
  Description of Unknown: Linker sequence
LKTP

SEQ ID NO: 1087 - protein, 14 aa, Unknown
  Description of Unknown: Linker sequence
AKGRRAEDGSVIDY

SEQ ID NO: 1088 - protein, 12 aa, Unknown
  Description of Unknown: Linker sequence
AARPLRVHRRPL

SEQ ID NO: 1089 - protein, 4 aa, Unknown
  Description of Unknown: Linker sequence
LIPL

SEQ ID NO: 1090 - protein, 5 aa, Unknown
  Description of Unknown: Linker sequence
FGEGA

SEQ ID NO: 1091 - protein, 6 aa, Unknown
  Description of Unknown: Linker sequence
AFDDAK

SEQ ID NO: 1092 - protein, 6 aa, Unknown
  Description of Unknown: Linker sequence
KVNGKR

SEQ ID NO: 1093 - protein, 7 aa, Unknown
  Description of Unknown: Linker sequence
LSKTGMP

SEQ ID NO: 1094 - protein, 8 aa, Unknown
  Description of Unknown: Linker sequence
VLPYPRMR

SEQ ID NO: 1095 - protein, 8 aa, Unknown
  Description of Unknown: Linker sequence
VRADDGLL

SEQ ID NO: 1096 - protein, 16 aa, Unknown
  Description of Unknown: Linker sequence
EAEDDFKIEKPTKEDA

SEQ ID NO: 1097 - protein, 5 aa, Unknown
  Description of Unknown: Linker sequence
IRFGR

SEQ ID NO: 1098 - protein, 6 aa, Unknown
  Description of Unknown: Linker sequence
QTETHV

SEQ ID NO: 1099 - protein, 13 aa, Unknown
  Description of Unknown: Linker sequence
PLKGRYTPSVGDV

SEQ ID NO: 1100 - protein, 7 aa, Unknown
  Description of Unknown: Linker sequence
KNPALSD

SEQ ID NO: 1101 - protein, 12 aa, Unknown
  Description of Unknown: Linker sequence
RFGSSEIGKGKK

SEQ ID NO: 1102 - protein, 14 aa, Unknown
  Description of Unknown: Linker sequence
GKFSGRKGTWVGFT

SEQ ID NO: 1103 - protein, 9 aa, Unknown
  Description of Unknown: Linker sequence
QFFMSDKPL

SEQ ID NO: 1104 - protein, 11 aa, Unknown
  Description of Unknown: Linker sequence
HAPRDMGPQPR

SEQ ID NO: 1105 - protein, 12 aa, Unknown
  Description of Unknown: Linker sequence
HFKPAPWNGLPA

SEQ ID NO: 1106 - protein, 6 aa, Unknown
  Description of Unknown: Linker sequence
ATKASK

SEQ ID NO: 1107 - protein, 7 aa, Unknown
  Description of Unknown: Linker sequence
ATKGATK

SEQ ID NO: 1108 - protein, 7 aa, Unknown
  Description of Unknown: Linker sequence
IAKAFKN

SEQ ID NO: 1109 - protein, 14 aa, Unknown
  Description of Unknown: Linker sequence
VRGSPAINVAVHVF

SEQ ID NO: 1110 - protein, 18 aa, Unknown
  Description of Unknown: Linker sequence
GSTSGSGKPGSGEGSTKG

SEQ ID NO: 1111 - protein, 18 aa, Unknown
  Description of Unknown: Linker sequence
KESGSVSSEQLAQFRSLD

SEQ ID NO: 1112 - protein, 6 aa, Unknown
  Description of Unknown: Linker sequence
LDPPKQ

SEQ ID NO: 1113 - protein, 6 aa, Unknown
  Description of Unknown: Linker sequence
TATADD

SEQ ID NO: 1114 - protein, 7 aa, Unknown
  Description of Unknown: Linker sequence
AEAQTCR

SEQ ID NO: 1115 - protein, 7 aa, Unknown
  Description of Unknown: Linker sequence
EEKPQGQ

SEQ ID NO: 1116 - protein, 7 aa, Unknown
  Description of Unknown: Linker sequence
LGLNDPL

SEQ ID NO: 1117 - protein, 7 aa, Unknown
  Description of Unknown: Linker sequence
RFPTLPF

SEQ ID NO: 1118 - protein, 9 aa, Unknown
  Description of Unknown: Linker sequence
ISSFDRPNI

SEQ ID NO: 1119 - protein, 13 aa, Unknown
  Description of Unknown: Linker sequence
YFGEGRQEPCGNC

SEQ ID NO: 1120 - protein, 7 aa, Unknown
  Description of Unknown: Linker sequence
LGLNRKW

SEQ ID NO: 1121 - protein, 12 aa, Unknown
  Description of Unknown: Linker sequence
YFGSYGTRGVGY

SEQ ID NO: 1122 - protein, 4 aa, Unknown
  Description of Unknown: Linker sequence
NIKG

SEQ ID NO: 1123 - protein, 5 aa, Unknown
  Description of Unknown: Linker sequence
NPVPQ

SEQ ID NO: 1124 - protein, 6 aa, Unknown
  Description of Unknown: Linker sequence
AKFPAD

SEQ ID NO: 1125 - protein, 6 aa, Unknown
  Description of Unknown: Linker sequence
IQNVDF

SEQ ID NO: 1126 - protein, 6 aa, Unknown
  Description of Unknown: Linker sequence
LTGQMV

SEQ ID NO: 1127 - protein, 8 aa, Unknown
  Description of Unknown: Linker sequence
AAEDARQY

SEQ ID NO: 1128 - protein, 16 aa, Unknown
  Description of Unknown: Linker sequence
KLDGSQTSKWLSSEPL

SEQ ID NO: 1129 - protein, 4 aa, Unknown
  Description of Unknown: Linker sequence
DIFK

SEQ ID NO: 1130 - protein, 4 aa, Unknown
  Description of Unknown: Linker sequence
LPGM

SEQ ID NO: 1131 - protein, 6 aa, Unknown
  Description of Unknown: Linker sequence
IPGNGG

SEQ ID NO: 1132 - protein, 6 aa, Unknown
  Description of Unknown: Linker sequence
VEDWVE

SEQ ID NO: 1133 - protein, 15 aa, Unknown
  Description of Unknown: Linker sequence
RLKADETYTSPEDYF

SEQ ID NO: 1134 - protein, 5 aa, Unknown
  Description of Unknown: Linker sequence
RKPTE

SEQ ID NO: 1135 - protein, 6 aa, Unknown
  Description of Unknown: Linker sequence
YARTIV

SEQ ID NO: 1136 - protein, 4 aa, Unknown
  Description of Unknown: Linker sequence
REDG

SEQ ID NO: 1137 - protein, 4 aa, Unknown
  Description of Unknown: Linker sequence
YKTL

SEQ ID NO: 1138 - protein, 6 aa, Unknown
  Description of Unknown: Linker sequence
DRAKRI

SEQ ID NO: 1139 - protein, 11 aa, Unknown
  Description of Unknown: Linker sequence
KAPQTEPPASI

SEQ ID NO: 1140 - protein, 21 aa, Unknown
  Description of Unknown: Linker sequence
AAQSDRPAHAQGVPLTRIERT

SEQ ID NO: 1141 - protein, 8 aa, Unknown
  Description of Unknown: Linker sequence
DWDKDADP

SEQ ID NO: 1142 - protein, 14 aa, Unknown
  Description of Unknown: Linker sequence
LFDRHVSSSVRLND

SEQ ID NO: 1143 - protein, 26 aa, Unknown
  Description of Unknown: Linker sequence
LVEESSRQLPTAAPEPAKVDQDAGRL

SEQ ID NO: 1144 - protein, 6 aa, Unknown
  Description of Unknown: Linker sequence
LLGVTP

SEQ ID NO: 1145 - protein, 4 aa, Unknown
  Description of Unknown: Linker sequence
DTLP

SEQ ID NO: 1146 - protein, 4 aa, Unknown
  Description of Unknown: Linker sequence
ENGL

SEQ ID NO: 1147 - protein, 4 aa, Unknown
  Description of Unknown: Linker sequence
FREV

SEQ ID NO: 1148 - protein, 4 aa, Unknown
  Description of Unknown: Linker sequence
KVSP

SEQ ID NO: 1149 - protein, 4 aa, Unknown
  Description of Unknown: Linker sequence
LDGK

SEQ ID NO: 1150 - protein, 4 aa, Unknown
  Description of Unknown: Linker sequence
LNGK

SEQ ID NO: 1151 - protein, 4 aa, Unknown
  Description of Unknown: Linker sequence
PLLI

SEQ ID NO: 1152 - protein, 4 aa, Unknown
  Description of Unknown: Linker sequence
SGQT

SEQ ID NO: 1153 - protein, 5 aa, Unknown
  Description of Unknown: Linker sequence
KNPRG

SEQ ID NO: 1154 - protein, 5 aa, Unknown
  Description of Unknown: Linker sequence
KPTTQ

SEQ ID NO: 1155 - protein, 5 aa, Unknown
  Description of Unknown: Linker sequence
SLKWK

SEQ ID NO: 1156 - protein, 5 aa, Unknown
  Description of Unknown: Linker sequence
TSEMD

SEQ ID NO: 1157 - protein, 6 aa, Unknown
  Description of Unknown: Linker sequence
LSGQEA

SEQ ID NO: 1158 - protein, 9 aa, Unknown
  Description of Unknown: Linker sequence
PLDVAPQGK

SEQ ID NO: 1159 - protein, 11 aa, Unknown
  Description of Unknown: Linker sequence
AKNTYDDSAWT

SEQ ID NO: 1160 - protein, 12 aa, Unknown
  Description of Unknown: Linker sequence
ELPELPQPESAG

SEQ ID NO: 1161 - protein, 12 aa, Unknown
  Description of Unknown: Linker sequence
QPNATAWSEAGH

SEQ ID NO: 1162 - protein, 12 aa, Unknown
  Description of Unknown: Linker sequence
SEYLFRHSDNEL

SEQ ID NO: 1163 - protein, 13 aa, Unknown
  Description of Unknown: Linker sequence
VAYTAPKVQLPSL

SEQ ID NO: 1164 - protein, 15 aa, Unknown
  Description of Unknown: Linker sequence
NLSVTLPAASHAIPH

SEQ ID NO: 1165 - protein, 16 aa, Unknown
  Description of Unknown: Linker sequence
IDNMGLDEDWTIGSED

SEQ ID NO: 1166 - protein, 23 aa, Unknown
  Description of Unknown: Linker sequence
TGNLGGENYRDTVRGPLNEGGLY

SEQ ID NO: 1167 - protein, 10 aa, Unknown
  Description of Unknown: Linker sequence
SNADLQTLPA

SEQ ID NO: 1168 - protein, 11 aa, Unknown
  Description of Unknown: Linker sequence
LRGKIVPTPMQ

SEQ ID NO: 1169 - protein, 12 aa, Unknown
  Description of Unknown: Linker sequence
KGGVAYRLPVPG

SEQ ID NO: 1170 - protein, 11 aa, Unknown
  Description of Unknown: Linker sequence
QAWATAPYAPT

SEQ ID NO: 1171 - protein, 7 aa, Unknown
  Description of Unknown: Linker sequence
YSKGVSQ

SEQ ID NO: 1172 - protein, 6 aa, Unknown
  Description of Unknown: Linker sequence
QKGRVL

SEQ ID NO: 1173 - protein, 6 aa, Unknown
  Description of Unknown: Linker sequence
VLGKEL

SEQ ID NO: 1174 - protein, 4 aa, Unknown
  Description of Unknown: Linker sequence
ANTP

SEQ ID NO: 1175 - protein, 4 aa, Unknown
  Description of Unknown: Linker sequence
DAPT

SEQ ID NO: 1176 - protein, 5 aa, Unknown
  Description of Unknown: Linker sequence
LDPIK

SEQ ID NO: 1177 - protein, 5 aa, Unknown
  Description of Unknown: Linker sequence
TTDFQ

SEQ ID NO: 1178 - protein, 6 aa, Unknown
  Description of Unknown: Linker sequence
PWNKEV

SEQ ID NO: 1179 - protein, 6 aa, Unknown
  Description of Unknown: Linker sequence
QQLLPP

SEQ ID NO: 1180 - protein, 8 aa, Unknown
  Description of Unknown: Linker sequence
TDPQTGKT

SEQ ID NO: 1181 - protein, 9 aa, Unknown
  Description of Unknown: Linker sequence
GRHGIVPTR

SEQ ID NO: 1182 - protein, 9 aa, Unknown
  Description of Unknown: Linker sequence
TADGSWFFK

SEQ ID NO: 1183 - protein, 12 aa, Unknown
  Description of Unknown: Linker sequence
LFSMGVTRGKWG

SEQ ID NO: 1184 - protein, 18 aa, Unknown
  Description of Unknown: Linker sequence
LAPGMGEDGELEETGVPA

SEQ ID NO: 1185 - protein, 21 aa, Unknown
  Description of Unknown: Linker sequence
CWVMHPGESWHGFKDIPDNWS

SEQ ID NO: 1186 - protein, 7 aa, Unknown
  Description of Unknown: Linker sequence
EVHVRGH

SEQ ID NO: 1187 - protein, 17 aa, Unknown
  Description of Unknown: Linker sequence
VGDPGPICRPWECCDKA

SEQ ID NO: 1188 - protein, 7 aa, Unknown
  Description of Unknown: Linker sequence
KYEIPEG

SEQ ID NO: 1189 - protein, 7 aa, Unknown
  Description of Unknown: Linker sequence
RKVCEQE

SEQ ID NO: 1190 - protein, 12 aa, Unknown
  Description of Unknown: Linker sequence
EQLLPKLFDGCY

SEQ ID NO: 1191 - protein, 5 aa, Unknown
  Description of Unknown: Linker sequence
SLHFS

SEQ ID NO: 1192 - protein, 6 aa, Unknown
  Description of Unknown: Linker sequence
VYPLQW

SEQ ID NO: 1193 - protein, 7 aa, Unknown
  Description of Unknown: Linker sequence
KTVSGLY

SEQ ID NO: 1194 - protein, 12 aa, Unknown
  Description of Unknown: Linker sequence
SDPAFQPPCSEV

SEQ ID NO: 1195 - protein, 13 aa, Unknown
  Description of Unknown: Linker sequence
SVVKPIGLAPLVY

SEQ ID NO: 1196 - protein, 30 aa, Unknown
  Description of Unknown: Linker sequence
ARWHSRLGFFRDPRPFPLPLSSLFSDGGNV

SEQ ID NO: 1197 - protein, 15 aa, Unknown
  Description of Unknown: Linker sequence
ELRSLTRHPKYKTEL

SEQ ID NO: 1198 - protein, 7 aa, Unknown
  Description of Unknown: Linker sequence
VYNTFCI

SEQ ID NO: 1199 - protein, 4 aa, Unknown
  Description of Unknown: Linker sequence
AATM

SEQ ID NO: 1200 - protein, 4 aa, Unknown
  Description of Unknown: Linker sequence
FAGT

SEQ ID NO: 1201 - protein, 4 aa, Unknown
  Description of Unknown: Linker sequence
RGDF

SEQ ID NO: 1202 - protein, 4 aa, Unknown
  Description of Unknown: Linker sequence
SNPW

SEQ ID NO: 1203 - protein, 4 aa, Unknown
  Description of Unknown: Linker sequence
SPDK

SEQ ID NO: 1204 - protein, 7 aa, Unknown
  Description of Unknown: Linker sequence
KTADQQD

SEQ ID NO: 1205 - protein, 8 aa, Unknown
  Description of Unknown: Linker sequence
QGAGAVDA

SEQ ID NO: 1206 - protein, 9 aa, Unknown
  Description of Unknown: Linker sequence
AKQDDDSHY

SEQ ID NO: 1207 - protein, 9 aa, Unknown
  Description of Unknown: Linker sequence
DKDNTSSKV

SEQ ID NO: 1208 - protein, 9 aa, Unknown
  Description of Unknown: Linker sequence
NLSALEKPI

SEQ ID NO: 1209 - protein, 11 aa, Unknown
  Description of Unknown: Linker sequence
IHRHANGKPYA

SEQ ID NO: 1210 - protein, 16 aa, Unknown
  Description of Unknown: Linker sequence
EGVENIEDIESSEITE

SEQ ID NO: 1211 - protein, 36 aa, Unknown
  Description of Unknown: Linker sequence
DSKDGSSYYHEANSDAKDQLDGDGLQFYALKNNFTA

SEQ ID NO: 1212 - protein, 9 aa, Unknown
  Description of Unknown: Linker sequence
GSIQGQDLS

SEQ ID NO: 1213 - protein, 4 aa, Unknown
  Description of Unknown: Linker sequence
RFDT

SEQ ID NO: 1214 - protein, 15 aa, Unknown
  Description of Unknown: Linker sequence
TLTTPASNQLLALPR

SEQ ID NO: 1215 - protein, 4 aa, Unknown
  Description of Unknown: Linker sequence
ELPF

SEQ ID NO: 1216 - protein, 7 aa, Unknown
  Description of Unknown: Linker sequence
AGDNPDA

SEQ ID NO: 1217 - protein, 7 aa, Unknown
  Description of Unknown: Linker sequence
VTTAEAY

SEQ ID NO: 1218 - protein, 11 aa, Unknown
  Description of Unknown: Linker sequence
AFPGLNGMDLA

SEQ ID NO: 1219 - protein, 18 aa, Unknown
  Description of Unknown: Linker sequence
WTQGSWTLTGGLPQAKKE

SEQ ID NO: 1220 - protein, 16 aa, Unknown
  Description of Unknown: Linker sequence
RGIKLTKIKLDLPINF

SEQ ID NO: 1221 - protein, 4 aa, Unknown
  Description of Unknown: Linker sequence
FLDV

SEQ ID NO: 1222 - protein, 5 aa, Unknown
  Description of Unknown: Linker sequence
QTSLS

SEQ ID NO: 1223 - protein, 26 aa, Unknown
  Description of Unknown: Linker sequence
YTGKWGLNDVNPEAWPRDLKGMAAVR

SEQ ID NO: 1224 - protein, 17 aa, Unknown
  Description of Unknown: Linker sequence
VKEGAGQPDFCDGHSPA

SEQ ID NO: 1225 - protein, 9 aa, Unknown
  Description of Unknown: Linker sequence
VDGSRGDGS

SEQ ID NO: 1226 - protein, 41 aa, Unknown
  Description of Unknown: Linker sequence
LKARVGSADDAKKDAAKKDDAKKDDAKKDGSQTNKAKNLVQ

SEQ ID NO: 1227 - protein, 7 aa, Unknown
  Description of Unknown: Linker sequence
VAKEGET

SEQ ID NO: 1228 - protein, 14 aa, Unknown
  Description of Unknown: Linker sequence
TMKNTGRNVNDRPV

SEQ ID NO: 1229 - protein, 4 aa, Unknown
  Description of Unknown: Linker sequence
EVND

SEQ ID NO: 1230 - protein, 4 aa, Unknown
  Description of Unknown: Linker sequence
NSDG

SEQ ID NO: 1231 - protein, 4 aa, Unknown
  Description of Unknown: Linker sequence
TPYG

SEQ ID NO: 1232 - protein, 5 aa, Unknown
  Description of Unknown: Linker sequence
GRGNP

SEQ ID NO: 1233 - protein, 5 aa, Unknown
  Description of Unknown: Linker sequence
SENPV

SEQ ID NO: 1234 - protein, 6 aa, Unknown
  Description of Unknown: Linker sequence
RAQMDL

SEQ ID NO: 1235 - protein, 6 aa, Unknown
  Description of Unknown: Linker sequence
RTSRNP

SEQ ID NO: 1236 - protein, 6 aa, Unknown
  Description of Unknown: Linker sequence
YVLNDI

SEQ ID NO: 1237 - protein, 7 aa, Unknown
  Description of Unknown: Linker sequence
AKKDGTH

SEQ ID NO: 1238 - protein, 8 aa, Unknown
  Description of Unknown: Linker sequence
DATHIGKL

SEQ ID NO: 1239 - protein, 8 aa, Unknown
  Description of Unknown: Linker sequence
KQIGGDGM

SEQ ID NO: 1240 - protein, 8 aa, Unknown
  Description of Unknown: Linker sequence
VLTIPEII

SEQ ID NO: 1241 - protein, 8 aa, Unknown
  Description of Unknown: Linker sequence
YKFQEGQE

SEQ ID NO: 1242 - protein, 9 aa, Unknown
  Description of Unknown: Linker sequence
NAKDDEGVL

SEQ ID NO: 1243 - protein, 9 aa, Unknown
  Description of Unknown: Linker sequence
SYGQFEDGI

SEQ ID NO: 1244 - protein, 10 aa, Unknown
  Description of Unknown: Linker sequence
HGHVCFQFDA

SEQ ID NO: 1245 - protein, 16 aa, Unknown
  Description of Unknown: Linker sequence
LFNPWCEDDAVYLDNE

SEQ ID NO: 1246 - protein, 20 aa, Unknown
  Description of Unknown: Linker sequence
GSWDNIYAYGVPPSAWTGSV

SEQ ID NO: 1247 - protein, 20 aa, Unknown
  Description of Unknown: Linker sequence
MYGAKKPLNTEGVMKSRSNV

SEQ ID NO: 1248 - protein, 5 aa, Unknown
  Description of Unknown: Linker sequence
CPPCP

SEQ ID NO: 1249 - protein, 6 aa, Unknown
  Description of Unknown: Linker sequence
QPKAAP

SEQ ID NO: 1250 - protein, 25 aa, Unknown
  Description of Unknown: Linker sequence
PPPPPASSTTFSTTRRSSTTSSSPS

SEQ ID NO: 1251 - protein, 27 aa, Unknown
  Description of Unknown: Linker sequence
GGNPPGGNPPGTTTPRPATSTGSSPGP

SEQ ID NO: 1252 - protein, 33 aa, Unknown
  Description of Unknown: Linker sequence
GTSTGGSTTTTASGTTSTKASTTSTSSTSTGTG

SEQ ID NO: 1253 - protein, 33 aa, Unknown
  Description of Unknown: Linker sequence
TVSSSSVSSSHSSTSTSSSHSSSSTPPTQPTGV

SEQ ID NO: 1254 - protein, 34 aa, Unknown
  Description of Unknown: Linker sequence
GSSGTPPSNPSSSASPTSSTAKPSSTSTASNPSG

SEQ ID NO: 1255 - protein, 41 aa, Unknown
  Description of Unknown: Linker sequence
ASSSSSTRAASTTSRVSPTTSRSSSATPPPGSTTTRVPPVG

SEQ ID NO: 1256 - protein, 48 aa, Unknown
  Description of Unknown: Linker sequence
PSSGGTSSSSSAAPQSTSTKASTTTSAVRTTSTATTKTTSSAPAQGTN

SEQ ID NO: 1257 - protein, 6 aa, Unknown
  Description of Unknown: Linker sequence
ASTKGP

SEQ ID NO: 1258 - protein, 12 aa, Unknown
  Description of Unknown: Linker sequence
TVAAPSVFIFPP

SEQ ID NO: 1259 - protein, 13 aa, Unknown
  Description of Unknown: Linker sequence
ASTKGPSVFPLAP

SEQ ID NO: 1260 - protein, 13 aa, Unknown
  Description of Unknown: Linker sequence
QPKAAPSVTLFPP

SEQ ID NO: 1261 - protein, 5 aa, Unknown
  Description of Unknown: Linker sequence
RSANS

SEQ ID NO: 1262 - protein, 9 aa, Unknown
  Description of Unknown: Linker sequence
RPAKLALPP

SEQ ID NO: 1263 - protein, 17 aa, Unknown
  Description of Unknown: Linker sequence
SLHGFDLASEQHTVRDT

SEQ ID NO: 1264 - protein, 4 aa, Unknown
  Description of Unknown: Linker sequence
RARI

SEQ ID NO: 1265 - protein, 11 aa, Unknown
  Description of Unknown: Linker sequence
TKPQLGIREGM

SEQ ID NO: 1266 - protein, 21 aa, Unknown
  Description of Unknown: Linker sequence
HKPMAAPTTLKAGPLLSSEKL

SEQ ID NO: 1267 - protein, 12 aa, Unknown
  Description of Unknown: Linker sequence
SLPADRKPGEPV

SEQ ID NO: 1268 - protein, 6 aa, Unknown
  Description of Unknown: Linker sequence
RRHGEY

SEQ ID NO: 1269 - protein, 7 aa, Unknown
  Description of Unknown: Linker sequence
ANQNSAE

SEQ ID NO: 1270 - protein, 14 aa, Unknown
  Description of Unknown: Linker sequence
LTTNLTAFFREAHH

SEQ ID NO: 1271 - protein, 4 aa, Unknown
  Description of Unknown: Linker sequence
PNQR

SEQ ID NO: 1272 - protein, 5 aa, Unknown
  Description of Unknown: Linker sequence
ARNDP

SEQ ID NO: 1273 - protein, 5 aa, Unknown
  Description of Unknown: Linker sequence
LNWTR

SEQ ID NO: 1274 - protein, 6 aa, Unknown
  Description of Unknown: Linker sequence
DAATDR

SEQ ID NO: 1275 - protein, 6 aa, Unknown
  Description of Unknown: Linker sequence
DKASGA

SEQ ID NO: 1276 - protein, 6 aa, Unknown
  Description of Unknown: Linker sequence
GPNGNI

SEQ ID NO: 1277 - protein, 9 aa, Unknown
  Description of Unknown: Linker sequence
AWDNSDSSV

SEQ ID NO: 1278 - protein, 9 aa, Unknown
  Description of Unknown: Linker sequence
LAHVGRSLI

SEQ ID NO: 1279 - protein, 9 aa, Unknown
  Description of Unknown: Linker sequence
TKNPQRGTF

SEQ ID NO: 1280 - protein, 11 aa, Unknown
  Description of Unknown: Linker sequence
APMPAGLETWV

SEQ ID NO: 1281 - protein, 16 aa, Unknown
  Description of Unknown: Linker sequence
DTGTLPNLNSEVGAGW

SEQ ID NO: 1282 - protein, 18 aa, Unknown
  Description of Unknown: Linker sequence
ANHMWNPTGAHQSSIPAL

SEQ ID NO: 1283 - protein, 4 aa, Unknown
  Description of Unknown: Linker sequence
DATE

SEQ ID NO: 1284 - protein, 7 aa, Unknown
  Description of Unknown: Linker sequence
RNYLINS

SEQ ID NO: 1285 - protein, 14 aa, Unknown
  Description of Unknown: Linker sequence
SSPKNLDDKVKLSE

SEQ ID NO: 1286 - protein, 5 aa, Unknown
  Description of Unknown: Linker sequence
QYQIV

SEQ ID NO: 1287 - protein, 8 aa, Unknown
  Description of Unknown: Linker sequence
RWLKNASP

SEQ ID NO: 1288 - protein, 4 aa, Unknown
  Description of Unknown: Linker sequence
GFLG

SEQ ID NO: 1289 - protein, 6 aa, Unknown
  Description of Unknown: Linker sequence
PLGLWA

SEQ ID NO: 1290 - protein, 6 aa, Unknown
  Description of Unknown: Linker sequence
RVLAEA

SEQ ID NO: 1291 - protein, 8 aa, Unknown
  Description of Unknown: Linker sequence
GGIEGRGS

SEQ ID NO: 1292 - protein, 9 aa, Unknown
  Description of Unknown: Linker sequence
RRRRRRRRR

SEQ ID NO: 1293 - protein, 10 aa, Unknown
  Description of Unknown: Linker sequence
EDVVCCSMSY

SEQ ID NO: 1294 - protein, 10 aa, Unknown
  Description of Unknown: Linker sequence
TRHRQPRGWE

SEQ ID NO: 1295 - protein, 10 aa, Unknown
  Description of Unknown: Linker sequence
AGNRVRRSVG

SEQ ID NO: 1296 - protein, 12 aa, Unknown
  Description of Unknown: Linker sequence
CRRRRRREAEAC

SEQ ID NO: 1297 - protein, 17 aa, Unknown
  Description of Unknown: Linker sequence
VSQTSKLTRAETVFPDV

SEQ ID NO: 1298 - protein, 20 aa, Unknown
  Description of Unknown: Linker sequence
LEAGCKNFFPRSFTSCGSLE

SEQ ID NO: 1299 - protein, 14 aa, Unknown
  Description of Unknown: Linker sequence
NILNDRNPVVTEDV

SEQ ID NO: 1300 - protein, 5 aa, Unknown
  Description of Unknown: Linker sequence
YTPGE

SEQ ID NO: 1301 - protein, 4 aa, Unknown
  Description of Unknown: Linker sequence
FGTQ

SEQ ID NO: 1302 - protein, 6 aa, Unknown
  Description of Unknown: Linker sequence
SLQSGY

SEQ ID NO: 1303 - protein, 6 aa, Unknown
  Description of Unknown: Linker sequence
TIPANR

SEQ ID NO: 1304 - protein, 9 aa, Unknown
  Description of Unknown: Linker sequence
KSEKGRNKF

SEQ ID NO: 1305 - protein, 7 aa, Unknown
  Description of Unknown: Linker sequence
YFNKYSS

SEQ ID NO: 1306 - protein, 8 aa, Unknown
  Description of Unknown: Linker sequence
YRNPSRNI

SEQ ID NO: 1307 - protein, 4 aa, Unknown
  Description of Unknown: Linker sequence
YGLN

SEQ ID NO: 1308 - protein, 5 aa, Unknown
  Description of Unknown: Linker sequence
IMGSV

SEQ ID NO: 1309 - protein, 5 aa, Unknown
  Description of Unknown: Linker sequence
SGRDA

SEQ ID NO: 1310 - protein, 6 aa, Unknown
  Description of Unknown: Linker sequence
LIEKGG

SEQ ID NO: 1311 - protein, 7 aa, Unknown
  Description of Unknown: Linker sequence
DINNISP

SEQ ID NO: 1312 - protein, 7 aa, Unknown
  Description of Unknown: Linker sequence
GRHVRGI

SEQ ID NO: 1313 - protein, 8 aa, Unknown
  Description of Unknown: Linker sequence
VRGREPGD

SEQ ID NO: 1314 - protein, 6 aa, Unknown
  Description of Unknown: Linker sequence
EMEIPE

SEQ ID NO: 1315 - protein, 6 aa, Unknown
  Description of Unknown: Linker sequence
RMIKSA

SEQ ID NO: 1316 - protein, 4 aa, Unknown
  Description of Unknown: Linker sequence
GFTP

SEQ ID NO: 1317 - protein, 5 aa, Unknown
  Description of Unknown: Linker sequence
FKIDV

SEQ ID NO: 1318 - protein, 5 aa, Unknown
  Description of Unknown: Linker sequence
NLDDP

SEQ ID NO: 1319 - protein, 11 aa, Unknown
  Description of Unknown: Linker sequence
LQNQQDNRGNI

SEQ ID NO: 1320 - protein, 19 aa, Unknown
  Description of Unknown: Linker sequence
NPQGQVWIEGREQQPQKNI

SEQ ID NO: 1321 - protein, 35 aa, Unknown
  Description of Unknown: Linker sequence
RVQGPFSVIRPPLRSQRPQEEVNGLEETICSARCT

SEQ ID NO: 1322 - protein, 53 aa, Unknown
  Description of Unknown: Linker sequence
DSSVFQPGGGSPFGEGQGQGQQGQGQGHQGQGQGQQGQQGQQGQQSQGQGFRD

SEQ ID NO: 1323 - protein, 5 aa, Unknown
  Description of Unknown: Linker sequence
CEGSD

SEQ ID NO: 1324 - protein, 7 aa, Unknown
  Description of Unknown: Linker sequence
VQQQETI

SEQ ID NO: 1325 - protein, 8 aa, Unknown
  Description of Unknown: Linker sequence
KGINSKKT

SEQ ID NO: 1326 - protein, 12 aa, Unknown
  Description of Unknown: Linker sequence
RLKLEDRQVDLT

SEQ ID NO: 1327 - protein, 8 aa, Unknown
  Description of Unknown: Linker sequence
TDSTQIKM

SEQ ID NO: 1328 - protein, 11 aa, Unknown
  Description of Unknown: Linker sequence
ILLQYNTEDAY

SEQ ID NO: 1329 - protein, 14 aa, Unknown
  Description of Unknown: Linker sequence
ELVTNCFKNRYTLQ

SEQ ID NO: 1330 - protein, 23 aa, Unknown
  Description of Unknown: Linker sequence
IKLYLGYKNKKLRVNINVPMKTE

SEQ ID NO: 1331 - protein, 24 aa, Unknown
  Description of Unknown: Linker sequence
KSKLLVLEDENANVDEVELKPDTL

SEQ ID NO: 1332 - protein, 11 aa, Unknown
  Description of Unknown: Linker sequence
VLTFDLAAPTV

SEQ ID NO: 1333 - protein, 27 aa, Unknown
  Description of Unknown: Linker sequence
CPAGNFIGKTATPYTSGTPCGDCPSDC

SEQ ID NO: 1334 - protein, 8 aa, Unknown
  Description of Unknown: Linker sequence
HLPGREAH

SEQ ID NO: 1335 - protein, 8 aa, Unknown
  Description of Unknown: Linker sequence
YLPDAFGP

SEQ ID NO: 1336 - protein, 21 aa, Unknown
  Description of Unknown: Linker sequence
LEIKTLLMDEQDHGYALTGDA

SEQ ID NO: 1337 - protein, 7 aa, Unknown
  Description of Unknown: Linker sequence
VLAMAKV

SEQ ID NO: 1338 - protein, 4 aa, Unknown
  Description of Unknown: Linker sequence
FAFG

SEQ ID NO: 1339 - protein, 4 aa, Unknown
  Description of Unknown: Linker sequence
GPNQ

SEQ ID NO: 1340 - protein, 8 aa, Unknown
  Description of Unknown: Linker sequence
DEINNPSL

SEQ ID NO: 1341 - protein, 24 aa, Unknown
  Description of Unknown: Linker sequence
VIPAGKLERVDPTTVRQEGPWADP

SEQ ID NO: 1342 - protein, 15 aa, Unknown
  Description of Unknown: Linker sequence
LGVSSSEVSRVEADS

SEQ ID NO: 1343 - protein, 6 aa, Unknown
  Description of Unknown: Linker sequence
AIPDFG

SEQ ID NO: 1344 - protein, 6 aa, Unknown
  Description of Unknown: Linker sequence
VDPAYR

SEQ ID NO: 1345 - protein, 6 aa, Unknown
  Description of Unknown: Linker sequence
YAPSSP

SEQ ID NO: 1346 - protein, 23 aa, Unknown
  Description of Unknown: Linker sequence
ATPQMEEDKGPINHPQYPGDVGL

SEQ ID NO: 1347 - protein, 4 aa, Unknown
  Description of Unknown: Linker sequence
IWEP

SEQ ID NO: 1348 - protein, 6 aa, Unknown
  Description of Unknown: Linker sequence
RTDIQT

SEQ ID NO: 1349 - protein, 13 aa, Unknown
  Description of Unknown: Linker sequence
KIPFTANKFEKNY

SEQ ID NO: 1350 - protein, 10 aa, Unknown
  Description of Unknown: Linker sequence
LEGDKNALNQ

SEQ ID NO: 1351 - protein, 4 aa, Unknown
  Description of Unknown: Linker sequence
AGGD

SEQ ID NO: 1352 - protein, 4 aa, Unknown
  Description of Unknown: Linker sequence
KADV

SEQ ID NO: 1353 - protein, 4 aa, Unknown
  Description of Unknown: Linker sequence
KGGR

SEQ ID NO: 1354 - protein, 4 aa, Unknown
  Description of Unknown: Linker sequence
LGTF

SEQ ID NO: 1355 - protein, 4 aa, Unknown
  Description of Unknown: Linker sequence
LPFL

SEQ ID NO: 1356 - protein, 4 aa, Unknown
  Description of Unknown: Linker sequence
QKGK

SEQ ID NO: 1357 - protein, 5 aa, Unknown
  Description of Unknown: Linker sequence
EEKCE

SEQ ID NO: 1358 - protein, 5 aa, Unknown
  Description of Unknown: Linker sequence
LGAGD

SEQ ID NO: 1359 - protein, 5 aa, Unknown
  Description of Unknown: Linker sequence
LKSIE

SEQ ID NO: 1360 - protein, 5 aa, Unknown
  Description of Unknown: Linker sequence
PKTDD

SEQ ID NO: 1361 - protein, 5 aa, Unknown
  Description of Unknown: Linker sequence
SAFGS

SEQ ID NO: 1362 - protein, 5 aa, Unknown
  Description of Unknown: Linker sequence
VLRDP

SEQ ID NO: 1363 - protein, 6 aa, Unknown
  Description of Unknown: Linker sequence
EEGYKA

SEQ ID NO: 1364 - protein, 6 aa, Unknown
  Description of Unknown: Linker sequence
KDLGVK

SEQ ID NO: 1365 - protein, 6 aa, Unknown
  Description of Unknown: Linker sequence
LVDISV

SEQ ID NO: 1366 - protein, 6 aa, Unknown
  Description of Unknown: Linker sequence
NIRAVP

SEQ ID NO: 1367 - protein, 6 aa, Unknown
  Description of Unknown: Linker sequence
RCGARR

SEQ ID NO: 1368 - protein, 6 aa, Unknown
  Description of Unknown: Linker sequence
VFRKGF

SEQ ID NO: 1369 - protein, 6 aa, Unknown
  Description of Unknown: Linker sequence
VIGKAL

SEQ ID NO: 1370 - protein, 7 aa, Unknown
  Description of Unknown: Linker sequence
IGIGLPE

SEQ ID NO: 1371 - protein, 7 aa, Unknown
  Description of Unknown: Linker sequence
QDETGKW

SEQ ID NO: 1372 - protein, 7 aa, Unknown
  Description of Unknown: Linker sequence
VGMANTT

SEQ ID NO: 1373 - protein, 8 aa, Unknown
  Description of Unknown: Linker sequence
ELSNIEQV

SEQ ID NO: 1374 - protein, 10 aa, Unknown
  Description of Unknown: Linker sequence
FQGLTQDQGF

SEQ ID NO: 1375 - protein, 12 aa, Unknown
  Description of Unknown: Linker sequence
CGKSLSENEITL

SEQ ID NO: 1376 - protein, 14 aa, Unknown
  Description of Unknown: Linker sequence
LQGWDGQSPGTESH

SEQ ID NO: 1377 - protein, 17 aa, Unknown
  Description of Unknown: Linker sequence
PVPRIAELMGKKLPNFG

SEQ ID NO: 1378 - protein, 18 aa, Unknown
  Description of Unknown: Linker sequence
QYGASVSAKPELPLFYTP

SEQ ID NO: 1379 - protein, 18 aa, Unknown
  Description of Unknown: Linker sequence
SKAGMCACHSPLPSIRGA

SEQ ID NO: 1380 - protein, 23 aa, Unknown
  Description of Unknown: Linker sequence
EQNAAFPPLERKPFIPKKPIPAI

SEQ ID NO: 1381 - protein, 28 aa, Unknown
  Description of Unknown: Linker sequence
EALSPIKFNRWDLPEVDPETMQTSEPWV

SEQ ID NO: 1382 - protein, 7 aa, Unknown
  Description of Unknown: Linker sequence
NTGSGKR

SEQ ID NO: 1383 - protein, 7 aa, Unknown
  Description of Unknown: Linker sequence
TQPVQSS

SEQ ID NO: 1384 - protein, 7 aa, Unknown
  Description of Unknown: Linker sequence
YTGDNCA

SEQ ID NO: 1385 - protein, 18 aa, Unknown
  Description of Unknown: Linker sequence
LPRDGLKDPQGKPLHYDR

SEQ ID NO: 1386 - protein, 7 aa, Unknown
  Description of Unknown: Linker sequence
DDDRIKD

SEQ ID NO: 1387 - protein, 7 aa, Unknown
  Description of Unknown: Linker sequence
EAEKNQQ

SEQ ID NO: 1388 - protein, 11 aa, Unknown
  Description of Unknown: Linker sequence
NHLGIDLGETP

SEQ ID NO: 1389 - protein, 13 aa, Unknown
  Description of Unknown: Linker sequence
RLFESSGCAGKLA

SEQ ID NO: 1390 - protein, 13 aa, Unknown
  Description of Unknown: Linker sequence
VRHDGRHAHDYDY

SEQ ID NO: 1391 - protein, 15 aa, Unknown
  Description of Unknown: Linker sequence
RDIEADTPARYNADP

SEQ ID NO: 1392 - protein, 4 aa, Unknown
  Description of Unknown: Linker sequence
LSSR

SEQ ID NO: 1393 - protein, 4 aa, Unknown
  Description of Unknown: Linker sequence
SILM

SEQ ID NO: 1394 - protein, 5 aa, Unknown
  Description of Unknown: Linker sequence
DTSGG

SEQ ID NO: 1395 - protein, 5 aa, Unknown
  Description of Unknown: Linker sequence
LGDGA

SEQ ID NO: 1396 - protein, 6 aa, Unknown
  Description of Unknown: Linker sequence
ANNSTL

SEQ ID NO: 1397 - protein, 6 aa, Unknown
  Description of Unknown: Linker sequence
IDEIQK

SEQ ID NO: 1398 - protein, 6 aa, Unknown
  Description of Unknown: Linker sequence
KLPSFE

SEQ ID NO: 1399 - protein, 6 aa, Unknown
  Description of Unknown: Linker sequence
QEVSQC

SEQ ID NO: 1400 - protein, 6 aa, Unknown
  Description of Unknown: Linker sequence
RSLSTT

SEQ ID NO: 1401 - protein, 6 aa, Unknown
  Description of Unknown: Linker sequence
SSNHKL

SEQ ID NO: 1402 - protein, 6 aa, Unknown
  Description of Unknown: Linker sequence
TFESSH

SEQ ID NO: 1403 - protein, 7 aa, Unknown
  Description of Unknown: Linker sequence
TALRPSA

SEQ ID NO: 1404 - protein, 8 aa, Unknown
  Description of Unknown: Linker sequence
PLYESPRK

SEQ ID NO: 1405 - protein, 9 aa, Unknown
  Description of Unknown: Linker sequence
LNSDGYPDS

SEQ ID NO: 1406 - protein, 9 aa, Unknown
  Description of Unknown: Linker sequence
LWTDISARI

SEQ ID NO: 1407 - protein, 11 aa, Unknown
  Description of Unknown: Linker sequence
HKEMLGGEIIP

SEQ ID NO: 1408 - protein, 12 aa, Unknown
  Description of Unknown: Linker sequence
TLGTQPTVLRTF

SEQ ID NO: 1409 - protein, 12 aa, Unknown
  Description of Unknown: Linker sequence
VFSNVNLKEVNY

SEQ ID NO: 1410 - protein, 13 aa, Unknown
  Description of Unknown: Linker sequence
NVFACSDRPTVIY

SEQ ID NO: 1411 - protein, 14 aa, Unknown
  Description of Unknown: Linker sequence
DITPLGDSNGLSPL

SEQ ID NO: 1412 - protein, 14 aa, Unknown
  Description of Unknown: Linker sequence
FGLNIETGLLSDRK

SEQ ID NO: 1413 - protein, 29 aa, Unknown
  Description of Unknown: Linker sequence
TQALSSSVSSSKLFSSSTAPHETSFGEEV

SEQ ID NO: 1414 - protein, 4 aa, Unknown
  Description of Unknown: Linker sequence
EHGV

SEQ ID NO: 1415 - protein, 4 aa, Unknown
  Description of Unknown: Linker sequence
REGK

SEQ ID NO: 1416 - protein, 5 aa, Unknown
  Description of Unknown: Linker sequence
TVLHA

SEQ ID NO: 1417 - protein, 6 aa, Unknown
  Description of Unknown: Linker sequence
ETEKTG

SEQ ID NO: 1418 - protein, 6 aa, Unknown
  Description of Unknown: Linker sequence
FHYEGG

SEQ ID NO: 1419 - protein, 6 aa, Unknown
  Description of Unknown: Linker sequence
LDSGVS

SEQ ID NO: 1420 - protein, 6 aa, Unknown
  Description of Unknown: Linker sequence
PQAPLA

SEQ ID NO: 1421 - protein, 7 aa, Unknown
  Description of Unknown: Linker sequence
DKRDGKE

SEQ ID NO: 1422 - protein, 8 aa, Unknown
  Description of Unknown: Linker sequence
IHPEEGVS

SEQ ID NO: 1423 - protein, 14 aa, Unknown
  Description of Unknown: Linker sequence
PSLETFTNVTEFEY

SEQ ID NO: 1424 - protein, 19 aa, Unknown
  Description of Unknown: Linker sequence
GGKFDDNSYKVSGGLHGVG

SEQ ID NO: 1425 - protein, 5 aa, Unknown
  Description of Unknown: Linker sequence
MKPEN

SEQ ID NO: 1426 - protein, 6 aa, Unknown
  Description of Unknown: Linker sequence
TNISRA

SEQ ID NO: 1427 - protein, 7 aa, Unknown
  Description of Unknown: Linker sequence
LLESGRL

SEQ ID NO: 1428 - protein, 15 aa, Unknown
  Description of Unknown: Linker sequence
VWGTKGLANEGKVIG

SEQ ID NO: 1429 - protein, 28 aa, Unknown
  Description of Unknown: Linker sequence
TLSQWGFFSPYGIGDNDACTINPYDGWA

SEQ ID NO: 1430 - protein, 4 aa, Unknown
  Description of Unknown: Linker sequence
MERE

SEQ ID NO: 1431 - protein, 7 aa, Unknown
  Description of Unknown: Linker sequence
FIDKPGI

SEQ ID NO: 1432 - protein, 8 aa, Unknown
  Description of Unknown: Linker sequence
TLNYTCPT

SEQ ID NO: 1433 - protein, 10 aa, Unknown
  Description of Unknown: Linker sequence
LLQERQDNLL

SEQ ID NO: 1434 - protein, 12 aa, Unknown
  Description of Unknown: Linker sequence
QRTTLPHIRSIT

SEQ ID NO: 1435 - protein, 4 aa, Unknown
  Description of Unknown: Linker sequence
VGGF

SEQ ID NO: 1436 - protein, 5 aa, Unknown
  Description of Unknown: Linker sequence
AKIQI

SEQ ID NO: 1437 - protein, 5 aa, Unknown
  Description of Unknown: Linker sequence
KEQNK

SEQ ID NO: 1438 - protein, 7 aa, Unknown
  Description of Unknown: Linker sequence
PGPKCPF

SEQ ID NO: 1439 - protein, 9 aa, Unknown
  Description of Unknown: Linker sequence
QLNYISIAS

SEQ ID NO: 1440 - protein, 9 aa, Unknown
  Description of Unknown: Linker sequence
SANNIAKYD

SEQ ID NO: 1441 - protein, 16 aa, Unknown
  Description of Unknown: Linker sequence
AIKGNIDAPQVVEGEK

SEQ ID NO: 1442 - protein, 18 aa, Unknown
  Description of Unknown: Linker sequence
VIPQGRSHPVQPYPGAFV

SEQ ID NO: 1443 - protein, 4 aa, Unknown
  Description of Unknown: Linker sequence
ETSR

SEQ ID NO: 1444 - protein, 5 aa, Unknown
  Description of Unknown: Linker sequence
GVGRR

SEQ ID NO: 1445 - protein, 6 aa, Unknown
  Description of Unknown: Linker sequence
FFLGQI

SEQ ID NO: 1446 - protein, 6 aa, Unknown
  Description of Unknown: Linker sequence
LEGSSL

SEQ ID NO: 1447 - protein, 8 aa, Unknown
  Description of Unknown: Linker sequence
DLSQVNEL

SEQ ID NO: 1448 - protein, 8 aa, Unknown
  Description of Unknown: Linker sequence
KNANGDYF

SEQ ID NO: 1449 - protein, 11 aa, Unknown
  Description of Unknown: Linker sequence
ILPLPYPNSPV

SEQ ID NO: 1450 - protein, 12 aa, Unknown
  Description of Unknown: Linker sequence
FADPTIQSQSEI

SEQ ID NO: 1451 - protein, 13 aa, Unknown
  Description of Unknown: Linker sequence
CGPYFANDNFSLE

SEQ ID NO: 1452 - protein, 15 aa, Unknown
  Description of Unknown: Linker sequence
PDSPTYDKFLNPESL

SEQ ID NO: 1453 - protein, 4 aa, Unknown
  Description of Unknown: Linker sequence
TGDL

SEQ ID NO: 1454 - protein, 6 aa, Unknown
  Description of Unknown: Linker sequence
FDNEYE

SEQ ID NO: 1455 - protein, 7 aa, Unknown
  Description of Unknown: Linker sequence
SLKFEGD

SEQ ID NO: 1456 - protein, 13 aa, Unknown
  Description of Unknown: Linker sequence
VFNPEGRDLITDW

SEQ ID NO: 1457 - protein, 15 aa, Unknown
  Description of Unknown: Linker sequence
GGNYDINSHLPLIPE

SEQ ID NO: 1458 - protein, 5 aa, Unknown
  Description of Unknown: Linker sequence
RNEQD

SEQ ID NO: 1459 - protein, 4 aa, Unknown
  Description of Unknown: Linker sequence
KEGK

SEQ ID NO: 1460 - protein, 5 aa, Unknown
  Description of Unknown: Linker sequence
MEQAM

SEQ ID NO: 1461 - protein, 6 aa, Unknown
  Description of Unknown: Linker sequence
ILRVNV

SEQ ID NO: 1462 - protein, 7 aa, Unknown
  Description of Unknown: Linker sequence
LPDGEDP

SEQ ID NO: 1463 - protein, 7 aa, Unknown
  Description of Unknown: Linker sequence
LSIGIRR

SEQ ID NO: 1464 - protein, 8 aa, Unknown
  Description of Unknown: Linker sequence
DNAEPNRL

SEQ ID NO: 1465 - protein, 17 aa, Unknown
  Description of Unknown: Linker sequence
GFVRKAILASFPEGVGI

SEQ ID NO: 1466 - protein, 4 aa, Unknown
  Description of Unknown: Linker sequence
VDGV

SEQ ID NO: 1467 - protein, 5 aa, Unknown
  Description of Unknown: Linker sequence
LWNGG

SEQ ID NO: 1468 - protein, 5 aa, Unknown
  Description of Unknown: Linker sequence
RGISK

SEQ ID NO: 1469 - protein, 7 aa, Unknown
  Description of Unknown: Linker sequence
CYVCEKW

SEQ ID NO: 1470 - protein, 7 aa, Unknown
  Description of Unknown: Linker sequence
RDQNGNI

SEQ ID NO: 1471 - protein, 8 aa, Unknown
  Description of Unknown: Linker sequence
RDKDKNFK

SEQ ID NO: 1472 - protein, 8 aa, Unknown
  Description of Unknown: Linker sequence
TAGNEDTK

SEQ ID NO: 1473 - protein, 9 aa, Unknown
  Description of Unknown: Linker sequence
ESNGRYSAL

SEQ ID NO: 1474 - protein, 11 aa, Unknown
  Description of Unknown: Linker sequence
GSHKSDALFGK

SEQ ID NO: 1475 - protein, 18 aa, Unknown
  Description of Unknown: Linker sequence
SKRKPSGGKPGTYNVWNF

SEQ ID NO: 1476 - protein, 4 aa, Unknown
  Description of Unknown: Linker sequence
FYNM

SEQ ID NO: 1477 - protein, 4 aa, Unknown
  Description of Unknown: Linker sequence
KFTW

SEQ ID NO: 1478 - protein, 6 aa, Unknown
  Description of Unknown: Linker sequence
FITPII

SEQ ID NO: 1479 - protein, 6 aa, Unknown
  Description of Unknown: Linker sequence
FSKKKA

SEQ ID NO: 1480 - protein, 7 aa, Unknown
  Description of Unknown: Linker sequence
SNLDRHL

SEQ ID NO: 1481 - protein, 8 aa, Unknown
  Description of Unknown: Linker sequence
FHSLQGND

SEQ ID NO: 1482 - protein, 8 aa, Unknown
  Description of Unknown: Linker sequence
ITKPTKNT

SEQ ID NO: 1483 - protein, 10 aa, Unknown
  Description of Unknown: Linker sequence
YYKGLGTSLA

SEQ ID NO: 1484 - protein, 14 aa, Unknown
  Description of Unknown: Linker sequence
QYEPGTVLDPTLKE

SEQ ID NO: 1485 - protein, 6 aa, Unknown
  Description of Unknown: Linker sequence
LNPSSR

SEQ ID NO: 1486 - protein, 8 aa, Unknown
  Description of Unknown: Linker sequence
QRAPPKTF

SEQ ID NO: 1487 - protein, 12 aa, Unknown
  Description of Unknown: Linker sequence
ADAKVMKDAKTK

SEQ ID NO: 1488 - protein, 4 aa, Unknown
  Description of Unknown: Linker sequence
LNGN

SEQ ID NO: 1489 - protein, 5 aa, Unknown
  Description of Unknown: Linker sequence
AGEME

SEQ ID NO: 1490 - protein, 6 aa, Unknown
  Description of Unknown: Linker sequence
MDNMGR

SEQ ID NO: 1491 - protein, 6 aa, Unknown
  Description of Unknown: Linker sequence
SREYKK

SEQ ID NO: 1492 - protein, 6 aa, Unknown
  Description of Unknown: Linker sequence
STKDVK

SEQ ID NO: 1493 - protein, 7 aa, Unknown
  Description of Unknown: Linker sequence
KLPVKGF

SEQ ID NO: 1494 - protein, 7 aa, Unknown
  Description of Unknown: Linker sequence
PFNGEDY

SEQ ID NO: 1495 - protein, 8 aa, Unknown
  Description of Unknown: Linker sequence
FKMQSLDK

SEQ ID NO: 1496 - protein, 4 aa, Unknown
  Description of Unknown: Linker sequence
TPEG

SEQ ID NO: 1497 - protein, 5 aa, Unknown
  Description of Unknown: Linker sequence
VGPLK

SEQ ID NO: 1498 - protein, 6 aa, Unknown
  Description of Unknown: Linker sequence
ETDADF

SEQ ID NO: 1499 - protein, 8 aa, Unknown
  Description of Unknown: Linker sequence
IPEEDGSS

SEQ ID NO: 1500 - protein, 9 aa, Unknown
  Description of Unknown: Linker sequence
DCTKLGTGA

SEQ ID NO: 1501 - protein, 10 aa, Unknown
  Description of Unknown: Linker sequence
NIPNDVTKLN

SEQ ID NO: 1502 - protein, 15 aa, Unknown
  Description of Unknown: Linker sequence
GAARPGLRLPGCVDA

SEQ ID NO: 1503 - protein, 12 aa, Unknown
  Description of Unknown: Linker sequence
RLRRNDDEPAEM

SEQ ID NO: 1504 - protein, 4 aa, Unknown
  Description of Unknown: Linker sequence
LDQR

SEQ ID NO: 1505 - protein, 5 aa, Unknown
  Description of Unknown: Linker sequence
VDGNR

SEQ ID NO: 1506 - protein, 6 aa, Unknown
  Description of Unknown: Linker sequence
PLRRFY

SEQ ID NO: 1507 - protein, 6 aa, Unknown
  Description of Unknown: Linker sequence
YAEEDG

SEQ ID NO: 1508 - protein, 6 aa, Unknown
  Description of Unknown: Linker sequence
YEDGRL

SEQ ID NO: 1509 - protein, 7 aa, Unknown
  Description of Unknown: Linker sequence
RSNQGTA

SEQ ID NO: 1510 - protein, 10 aa, Unknown
  Description of Unknown: Linker sequence
DGPASENGFL

SEQ ID NO: 1511 - protein, 14 aa, Unknown
  Description of Unknown: Linker sequence
PRVVVGQRVRKGDL

SEQ ID NO: 1512 - protein, 16 aa, Unknown
  Description of Unknown: Linker sequence
ELITNIGETAGVVQDI

SEQ ID NO: 1513 - protein, 20 aa, Unknown
  Description of Unknown: Linker sequence
SDPTLPRSDRECPKCHSREN

SEQ ID NO: 1514 - protein, 5 aa, Unknown
  Description of Unknown: Linker sequence
VEGEV

SEQ ID NO: 1515 - protein, 8 aa, Unknown
  Description of Unknown: Linker sequence
YVPVVQEV

SEQ ID NO: 1516 - protein, 4 aa, Unknown
  Description of Unknown: Linker sequence
YQNN

SEQ ID NO: 1517 - protein, 5 aa, Unknown
  Description of Unknown: Linker sequence
LVVNI

SEQ ID NO: 1518 - protein, 6 aa, Unknown
  Description of Unknown: Linker sequence
EKNFQT

SEQ ID NO: 1519 - protein, 11 aa, Unknown
  Description of Unknown: Linker sequence
MKLVPSIPPAT

SEQ ID NO: 1520 - protein, 14 aa, Unknown
  Description of Unknown: Linker sequence
TQPDVPFKNPDNVV

SEQ ID NO: 1521 - protein, 32 aa, Unknown
  Description of Unknown: Linker sequence
YPEDHNEPQSVRAASSDPGEVVPSACAADEPV

SEQ ID NO: 1522 - protein, 4 aa, Unknown
  Description of Unknown: Linker sequence
ALCL

SEQ ID NO: 1523 - protein, 4 aa, Unknown
  Description of Unknown: Linker sequence
LLSL

SEQ ID NO: 1524 - protein, 7 aa, Unknown
  Description of Unknown: Linker sequence
LNNVRFS

SEQ ID NO: 1525 - protein, 7 aa, Unknown
  Description of Unknown: Linker sequence
SLCKAHL

SEQ ID NO: 1526 - protein, 8 aa, Unknown
  Description of Unknown: Linker sequence
EHNNLVNV

SEQ ID NO: 1527 - protein, 8 aa, Unknown
  Description of Unknown: Linker sequence
YDTGRTGR

SEQ ID NO: 1528 - protein, 11 aa, Unknown
  Description of Unknown: Linker sequence
QHNLKQNDQPQ

SEQ ID NO: 1529 - protein, 11 aa, Unknown
  Description of Unknown: Linker sequence
LYPNAQTGHGH

SEQ ID NO: 1530 - protein, 13 aa, Unknown
  Description of Unknown: Linker sequence
AEVTYKHHEPTGC

SEQ ID NO: 1531 - protein, 4 aa, Unknown
  Description of Unknown: Linker sequence
MITP

SEQ ID NO: 1532 - protein, 8 aa, Unknown
  Description of Unknown: Linker sequence
LQHPKIIK

SEQ ID NO: 1533 - protein, 12 aa, Unknown
  Description of Unknown: Linker sequence
REDEEMGLTTTS

SEQ ID NO: 1534 - protein, 5 aa, Unknown
  Description of Unknown: Linker sequence
GSREE

SEQ ID NO: 1535 - protein, 4 aa, Unknown
  Description of Unknown: Linker sequence
ENTC

SEQ ID NO: 1536 - protein, 11 aa, Unknown
  Description of Unknown: Linker sequence
PVSGAKTFKNE

SEQ ID NO: 1537 - protein, 5 aa, Unknown
  Description of Unknown: Linker sequence
LSQDD

SEQ ID NO: 1538 - protein, 8 aa, Unknown
  Description of Unknown: Linker sequence
LLGADDDL

SEQ ID NO: 1539 - protein, 4 aa, Unknown
  Description of Unknown: Linker sequence
GHGE

SEQ ID NO: 1540 - protein, 4 aa, Unknown
  Description of Unknown: Linker sequence
PKGR

SEQ ID NO: 1541 - protein, 5 aa, Unknown
  Description of Unknown: Linker sequence
ALPSP

SEQ ID NO: 1542 - protein, 6 aa, Unknown
  Description of Unknown: Linker sequence
DYGVEV

SEQ ID NO: 1543 - protein, 6 aa, Unknown
  Description of Unknown: Linker sequence
EDPSLK

SEQ ID NO: 1544 - protein, 7 aa, Unknown
  Description of Unknown: Linker sequence
FGDGPPL

SEQ ID NO: 1545 - protein, 8 aa, Unknown
  Description of Unknown: Linker sequence
RQEETGEL

SEQ ID NO: 1546 - protein, 8 aa, Unknown
  Description of Unknown: Linker sequence
SVPKVPYR

SEQ ID NO: 1547 - protein, 8 aa, Unknown
  Description of Unknown: Linker sequence
WQGEKPES

SEQ ID NO: 1548 - protein, 12 aa, Unknown
  Description of Unknown: Linker sequence
EVPFARLPDPNV

SEQ ID NO: 1549 - protein, 4 aa, Unknown
  Description of Unknown: Linker sequence
DIYV

SEQ ID NO: 1550 - protein, 6 aa, Unknown
  Description of Unknown: Linker sequence
IGENIN

SEQ ID NO: 1551 - protein, 7 aa, Unknown
  Description of Unknown: Linker sequence
AGKITDV

SEQ ID NO: 1552 - protein, 8 aa, Unknown
  Description of Unknown: Linker sequence
KAGNVAAD

SEQ ID NO: 1553 - protein, 14 aa, Unknown
  Description of Unknown: Linker sequence
YIPVPTRDLEKPFL

SEQ ID NO: 1554 - protein, 4 aa, Unknown
  Description of Unknown: Linker sequence
GEHI

SEQ ID NO: 1555 - protein, 4 aa, Unknown
  Description of Unknown: Linker sequence
EGPE

SEQ ID NO: 1556 - protein, 4 aa, Unknown
  Description of Unknown: Linker sequence
FEWT

SEQ ID NO: 1557 - protein, 4 aa, Unknown
  Description of Unknown: Linker sequence
KATY

SEQ ID NO: 1558 - protein, 4 aa, Unknown
  Description of Unknown: Linker sequence
KDGV

SEQ ID NO: 1559 - protein, 4 aa, Unknown
  Description of Unknown: Linker sequence
LLGS

SEQ ID NO: 1560 - protein, 4 aa, Unknown
  Description of Unknown: Linker sequence
VSKS

SEQ ID NO: 1561 - protein, 7 aa, Unknown
  Description of Unknown: Linker sequence
KAPDGRI

SEQ ID NO: 1562 - protein, 8 aa, Unknown
  Description of Unknown: Linker sequence
RKASNKAY

SEQ ID NO: 1563 - protein, 10 aa, Unknown
  Description of Unknown: Linker sequence
YAPILYENDH

SEQ ID NO: 1564 - protein, 4 aa, Unknown
  Description of Unknown: Linker sequence
YSLG

SEQ ID NO: 1565 - protein, 6 aa, Unknown
  Description of Unknown: Linker sequence
LDPQWS

SEQ ID NO: 1566 - protein, 7 aa, Unknown
  Description of Unknown: Linker sequence
REGNGPT

SEQ ID NO: 1567 - protein, 7 aa, Unknown
  Description of Unknown: Linker sequence
RGEQVAF

SEQ ID NO: 1568 - protein, 8 aa, Unknown
  Description of Unknown: Linker sequence
QQPHGPYY

SEQ ID NO: 1569 - protein, 11 aa, Unknown
  Description of Unknown: Linker sequence
LDTWPPETQNW

SEQ ID NO: 1570 - protein, 13 aa, Unknown
  Description of Unknown: Linker sequence
CFHPASGFAWQFS

SEQ ID NO: 1571 - protein, 16 aa, Unknown
  Description of Unknown: Linker sequence
GIQSPRPNGPMQTAAN

SEQ ID NO: 1572 - protein, 17 aa, Unknown
  Description of Unknown: Linker sequence
IDAEEDSTRRMGFETIL

SEQ ID NO: 1573 - protein, 22 aa, Unknown
  Description of Unknown: Linker sequence
EMPDAPLQPGWDRPETPYSPPL

SEQ ID NO: 1574 - protein, 6 aa, Unknown
  Description of Unknown: Linker sequence
LLDAPV

SEQ ID NO: 1575 - protein, 5 aa, Unknown
  Description of Unknown: Linker sequence
EHIDL

SEQ ID NO: 1576 - protein, 5 aa, Unknown
  Description of Unknown: Linker sequence
FGCDK

SEQ ID NO: 1577 - protein, 7 aa, Unknown
  Description of Unknown: Linker sequence
CDCKHTT

SEQ ID NO: 1578 - protein, 9 aa, Unknown
  Description of Unknown: Linker sequence
LNGNDNTIK

SEQ ID NO: 1579 - protein, 10 aa, Unknown
  Description of Unknown: Linker sequence
ISENKNDAKV

SEQ ID NO: 1580 - protein, 8 aa, Unknown
  Description of Unknown: Linker sequence
TAACTNTS

SEQ ID NO: 1581 - protein, 4 aa, Unknown
  Description of Unknown: Linker sequence
LTLL

SEQ ID NO: 1582 - protein, 12 aa, Unknown
  Description of Unknown: Linker sequence
DWENWQNVGQWR

SEQ ID NO: 1583 - protein, 8 aa, Unknown
  Description of Unknown: Linker sequence
STKNPVHA

SEQ ID NO: 1584 - protein, 5 aa, Unknown
  Description of Unknown: Linker sequence
THRNK

SEQ ID NO: 1585 - protein, 12 aa, Unknown
  Description of Unknown: Linker sequence
IDHVLGVPYTTV

SEQ ID NO: 1586 - protein, 4 aa, Unknown
  Description of Unknown: Linker sequence
IDGR

SEQ ID NO: 1587 - protein, 4 aa, Unknown
  Description of Unknown: Linker sequence
KGTQ

SEQ ID NO: 1588 - protein, 5 aa, Unknown
  Description of Unknown: Linker sequence
ETIKG

SEQ ID NO: 1589 - protein, 6 aa, Unknown
  Description of Unknown: Linker sequence
ECSSES

SEQ ID NO: 1590 - protein, 7 aa, Unknown
  Description of Unknown: Linker sequence
LDPTKTI

SEQ ID NO: 1591 - protein, 8 aa, Unknown
  Description of Unknown: Linker sequence
SKPEAEET

SEQ ID NO: 1592 - protein, 10 aa, Unknown
  Description of Unknown: Linker sequence
ETAVTQTYGG

SEQ ID NO: 1593 - protein, 11 aa, Unknown
  Description of Unknown: Linker sequence
FCTDHTVLVQT

SEQ ID NO: 1594 - protein, 4 aa, Unknown
  Description of Unknown: Linker sequence
SGGT

SEQ ID NO: 1595 - protein, 6 aa, Unknown
  Description of Unknown: Linker sequence
FNENGI

SEQ ID NO: 1596 - protein, 6 aa, Unknown
  Description of Unknown: Linker sequence
SFLNSM

SEQ ID NO: 1597 - protein, 7 aa, Unknown
  Description of Unknown: Linker sequence
QNTGANN

SEQ ID NO: 1598 - protein, 9 aa, Unknown
  Description of Unknown: Linker sequence
QNGYKPGDL

SEQ ID NO: 1599 - protein, 12 aa, Unknown
  Description of Unknown: Linker sequence
TTGTINGATAAT

SEQ ID NO: 1600 - protein, 15 aa, Unknown
  Description of Unknown: Linker sequence
DSSDPAATAPTTAST

SEQ ID NO: 1601 - protein, 11 aa, Unknown
  Description of Unknown: Linker sequence
AEQPGGWKGWR

SEQ ID NO: 1602 - protein, 4 aa, Unknown
  Description of Unknown: Linker sequence
GGGS

SEQ ID NO: 1603 - protein, 4 aa, Unknown
  Description of Unknown: Linker sequence
GGGG

SEQ ID NO: 1604 - protein, 5 aa, Unknown
  Description of Unknown: Linker sequence
GGGGS

SEQ ID NO: 1605 - protein, 6 aa, Unknown
  Description of Unknown: Linker sequence
GGGGGG

SEQ ID NO: 1606 - protein, 8 aa, Unknown
  Description of Unknown: Linker sequence
GGGGGGGG

SEQ ID NO: 1607 - protein, 10 aa, Unknown
  Description of Unknown: Linker sequence
GGGGSGGGGS

SEQ ID NO: 1608 - protein, 12 aa, Unknown
  Description of Unknown: Linker sequence
GSAGSAAGSGEF

SEQ ID NO: 1609 - protein, 14 aa, Unknown
  Description of Unknown: Linker sequence
EGKSSGSGSESKST

SEQ ID NO: 1610 - protein, 15 aa, Unknown
  Description of Unknown: Linker sequence
GGGGSGGGGSGGGGS

SEQ ID NO: 1611 - protein, 18 aa, Unknown
  Description of Unknown: Linker sequence
KESGSVSSEQLAQFRSLD

SEQ ID NO: 1612 - protein, 20 aa, Unknown
  Description of Unknown: Linker sequence
NSGAGSGGSSGSDGASGSRD

SEQ ID NO: 1613 - protein, 20 aa, Unknown
  Description of Unknown: Linker sequence
GGGGSGGGGSGGGGSGGGGS

SEQ ID NO: 1614 - protein, 36 aa, Unknown
  Description of Unknown: Linker sequence
GGSGGGSEGGGSEGGGSEGGGSEGGGSEGGGSGGGS

SEQ ID NO: 1615 - protein, 36 aa, Unknown
  Description of Unknown: Linker sequence
GGSAGGSGSGSSGGSSGASGTGTAGGTGSGSGTGSG

SEQ ID NO: 1616 - protein, 7 aa, Unknown
  Description of Unknown: Linker sequence
VYRFDKE

SEQ ID NO: 1617 - protein, 4 aa, Unknown
  Description of Unknown: Linker sequence
DAHG

SEQ ID NO: 1618 - protein, 4 aa, Unknown
  Description of Unknown: Linker sequence
KGAL

SEQ ID NO: 1619 - protein, 5 aa, Unknown
  Description of Unknown: Linker sequence
RGVEW

SEQ ID NO: 1620 - protein, 6 aa, Unknown
  Description of Unknown: Linker sequence
VTDHDW

SEQ ID NO: 1621 - protein, 7 aa, Unknown
  Description of Unknown: Linker sequence
SGLEVSE

SEQ ID NO: 1622 - protein, 8 aa, Unknown
  Description of Unknown: Linker sequence
LPLPLVPQ

SEQ ID NO: 1623 - protein, 8 aa, Unknown
  Description of Unknown: Linker sequence
VGEPEMPS

SEQ ID NO: 1624 - protein, 9 aa, Unknown
  Description of Unknown: Linker sequence
SAILPGRFQ

SEQ ID NO: 1625 - protein, 18 aa, Unknown
  Description of Unknown: Linker sequence
QGKCKKTCRDVFCPGSST

SEQ ID NO: 1626 - protein, 4 aa, Unknown
  Description of Unknown: Linker sequence
EEGL

SEQ ID NO: 1627 - protein, 4 aa, Unknown
  Description of Unknown: Linker sequence
FAGY

SEQ ID NO: 1628 - protein, 6 aa, Unknown
  Description of Unknown: Linker sequence
NKETRK

SEQ ID NO: 1629 - protein, 7 aa, Unknown
  Description of Unknown: Linker sequence
EKELYFK

SEQ ID NO: 1630 - protein, 7 aa, Unknown
  Description of Unknown: Linker sequence
FQGKIKG

SEQ ID NO: 1631 - protein, 7 aa, Unknown
  Description of Unknown: Linker sequence
MWPDADL

SEQ ID NO: 1632 - protein, 7 aa, Unknown
  Description of Unknown: Linker sequence
VGEGFAF

SEQ ID NO: 1633 - protein, 10 aa, Unknown
  Description of Unknown: Linker sequence
GTARASIPTY

SEQ ID NO: 1634 - protein, 13 aa, Unknown
  Description of Unknown: Linker sequence
FTPVSKDPQSANW

SEQ ID NO: 1635 - protein, 13 aa, Unknown
  Description of Unknown: Linker sequence
YLPKGEDGKDYSW

SEQ ID NO: 1636 - protein, 22 aa, Unknown
  Description of Unknown: Linker sequence
WGFERDENGNPKRDETLKHPRC

SEQ ID NO: 1637 - protein, 55 aa, Unknown
  Description of Unknown: Linker sequence
AYLYGPGREDGPLPEYYEPMECPVIEHPFSKTLHNPTALHFATEEKAVCDPRYPF

SEQ ID NO: 1638 - protein, 44 aa, Unknown
  Description of Unknown: Linker sequence
GRLFAINKMAEGPFPEHYEPIETPLGTNPLHPNVVSNPVVRLYE

SEQ ID NO: 1639 - protein, 4 aa, Unknown
  Description of Unknown: Linker sequence
AAQK

SEQ ID NO: 1640 - protein, 4 aa, Unknown
  Description of Unknown: Linker sequence
EDGL

SEQ ID NO: 1641 - protein, 4 aa, Unknown
  Description of Unknown: Linker sequence
FSGY

SEQ ID NO: 1642 - protein, 5 aa, Unknown
  Description of Unknown: Linker sequence
TNASL

SEQ ID NO: 1643 - protein, 6 aa, Unknown
  Description of Unknown: Linker sequence
DAEKRQ

SEQ ID NO: 1644 - protein, 7 aa, Unknown
  Description of Unknown: Linker sequence
DEGKVTG

SEQ ID NO: 1645 - protein, 7 aa, Unknown
  Description of Unknown: Linker sequence
ENNKINA

SEQ ID NO: 1646 - protein, 7 aa, Unknown
  Description of Unknown: Linker sequence
VRDDFAF

SEQ ID NO: 1647 - protein, 10 aa, Unknown
  Description of Unknown: Linker sequence
TLPSEKQVDL

SEQ ID NO: 1648 - protein, 11 aa, Unknown
  Description of Unknown: Linker sequence
WLPKWDQTYDV

SEQ ID NO: 1649 - protein, 12 aa, Unknown
  Description of Unknown: Linker sequence
ALRMGKKEQFPY

SEQ ID NO: 1650 - protein, 13 aa, Unknown
  Description of Unknown: Linker sequence
NTPKATLADQVNY

SEQ ID NO: 1651 - protein, 27 aa, Unknown
  Description of Unknown: Linker sequence
YDKSSWNYQLDENGYAKRDETLTHPRC

SEQ ID NO: 1652 - protein, 9 aa, Unknown
  Description of Unknown: Linker sequence
HLPATIGDY

SEQ ID NO: 1653 - protein, 4 aa, Unknown
  Description of Unknown: Linker sequence
SNRG

SEQ ID NO: 1654 - protein, 6 aa, Unknown
  Description of Unknown: Linker sequence
DAVKGK

SEQ ID NO: 1655 - protein, 7 aa, Unknown
  Description of Unknown: Linker sequence
LLPDGRV

SEQ ID NO: 1656 - protein, 7 aa, Unknown
  Description of Unknown: Linker sequence
MDGNGQI

SEQ ID NO: 1657 - protein, 7 aa, Unknown
  Description of Unknown: Linker sequence
QAGPSTA

SEQ ID NO: 1658 - protein, 7 aa, Unknown
  Description of Unknown: Linker sequence
SDNHAWL

SEQ ID NO: 1659 - protein, 7 aa, Unknown
  Description of Unknown: Linker sequence
VLPDGST

SEQ ID NO: 1660 - protein, 7 aa, Unknown
  Description of Unknown: Linker sequence
YNSNGNL

SEQ ID NO: 1661 - protein, 7 aa, Unknown
  Description of Unknown: Linker sequence
YTSGSGD

SEQ ID NO: 1662 - protein, 8 aa, Unknown
  Description of Unknown: Linker sequence
DLPIVPAA

SEQ ID NO: 1663 - protein, 8 aa, Unknown
  Description of Unknown: Linker sequence
IEPTSGRV

SEQ ID NO: 1664 - protein, 8 aa, Unknown
  Description of Unknown: Linker sequence
WDPSTGIV

SEQ ID NO: 1665 - protein, 9 aa, Unknown
  Description of Unknown: Linker sequence
EANGQPWTS

SEQ ID NO: 1666 - protein, 9 aa, Unknown
  Description of Unknown: Linker sequence
MLTADKQGL

SEQ ID NO: 1667 - protein, 9 aa, Unknown
  Description of Unknown: Linker sequence
VAPDAMCGN

SEQ ID NO: 1668 - protein, 10 aa, Unknown
  Description of Unknown: Linker sequence
TLGEPGTSPN

SEQ ID NO: 1669 - protein, 12 aa, Unknown
  Description of Unknown: Linker sequence
VTVTKHDMFCPG

SEQ ID NO: 1670 - protein, 13 aa, Unknown
  Description of Unknown: Linker sequence
KQNPNSIVRVYHS

SEQ ID NO: 1671 - protein, 14 aa, Unknown
  Description of Unknown: Linker sequence
FASNGLYFARTFHT

SEQ ID NO: 1672 - protein, 14 aa, Unknown
  Description of Unknown: Linker sequence
GGGLCGDCTTNHFD

SEQ ID NO: 1673 - protein, 14 aa, Unknown
  Description of Unknown: Linker sequence
QASSYTAPQPGLGR

SEQ ID NO: 1674 - protein, 16 aa, Unknown
  Description of Unknown: Linker sequence
FGGSPDYQDSDATTNA

SEQ ID NO: 1675 - protein, 17 aa, Unknown
  Description of Unknown: Linker sequence
WSSYRNDAFGGSPGGIT

SEQ ID NO: 1676 - protein, 20 aa, Unknown
  Description of Unknown: Linker sequence
TGGQRRGIPFEDSTPVFTPE

SEQ ID NO: 1677 - protein, 10 aa, Unknown
  Description of Unknown: Linker sequence
LIPQHTGTFR

SEQ ID NO: 1678 - protein, 11 aa, Unknown
  Description of Unknown: Linker sequence
EPRSQPHTKPS

SEQ ID NO: 1679 - protein, 4 aa, Unknown
  Description of Unknown: Linker sequence
KPAP

SEQ ID NO: 1680 - protein, 6 aa, Unknown
  Description of Unknown: Linker sequence
IEGANG

SEQ ID NO: 1681 - protein, 8 aa, Unknown
  Description of Unknown: Linker sequence
PIKNMPID

SEQ ID NO: 1682 - protein, 12 aa, Unknown
  Description of Unknown: Linker sequence
DQPTAHPTVRDE

SEQ ID NO: 1683 - protein, 8 aa, Unknown
  Description of Unknown: Linker sequence
LVRTLVPT

SEQ ID NO: 1684 - protein, 9 aa, Unknown
  Description of Unknown: Linker sequence
AGAPVETPQ

SEQ ID NO: 1685 - protein, 11 aa, Unknown
  Description of Unknown: Linker sequence
SLDAPATSLTG

SEQ ID NO: 1686 - protein, 12 aa, Unknown
  Description of Unknown: Linker sequence
YAAGTPLSSPEL

SEQ ID NO: 1687 - protein, 4 aa, Unknown
  Description of Unknown: Linker sequence
KVEH

SEQ ID NO: 1688 - protein, 4 aa, Unknown
  Description of Unknown: Linker sequence
SHGQ

SEQ ID NO: 1689 - protein, 4 aa, Unknown
  Description of Unknown: Linker sequence
VDLS

SEQ ID NO: 1690 - protein, 5 aa, Unknown
  Description of Unknown: Linker sequence
KGLDA

SEQ ID NO: 1691 - protein, 5 aa, Unknown
  Description of Unknown: Linker sequence
LGPNA

SEQ ID NO: 1692 - protein, 5 aa, Unknown
  Description of Unknown: Linker sequence
LTGRI

SEQ ID NO: 1693 - protein, 6 aa, Unknown
  Description of Unknown: Linker sequence
ITRRSV

SEQ ID NO: 1694 - protein, 6 aa, Unknown
  Description of Unknown: Linker sequence
VKRQDI

SEQ ID NO: 1695 - protein, 7 aa, Unknown
  Description of Unknown: Linker sequence
FDKTGAE

SEQ ID NO: 1696 - protein, 17 aa, Unknown
  Description of Unknown: Linker sequence
ESNLQYDAGDKGIYRHY

SEQ ID NO: 1697 - protein, 5 aa, Unknown
  Description of Unknown: Linker sequence
DIGTI

SEQ ID NO: 1698 - protein, 27 aa, Unknown
  Description of Unknown: Linker sequence
TKKPVPDFSFYDRSAPIYTQPRYLPPS

SEQ ID NO: 1699 - protein, 4 aa, Unknown
  Description of Unknown: Linker sequence
KTPL

SEQ ID NO: 1700 - protein, 7 aa, Unknown
  Description of Unknown: Linker sequence
NCYGCET

SEQ ID NO: 1701 - protein, 16 aa, Unknown
  Description of Unknown: Linker sequence
YGIDVKIPEGLEPPNE

SEQ ID NO: 1702 - protein, 6 aa, Unknown
  Description of Unknown: Linker sequence
VGGFYN

SEQ ID NO: 1703 - protein, 7 aa, Unknown
  Description of Unknown: Linker sequence
VLTGKAR

SEQ ID NO: 1704 - protein, 14 aa, Unknown
  Description of Unknown: Linker sequence
FDVAESVIPSSGTF

SEQ ID NO: 1705 - protein, 5 aa, Unknown
  Description of Unknown: Linker sequence
TLKPW

SEQ ID NO: 1706 - protein, 9 aa, Unknown
  Description of Unknown: Linker sequence
VQNTTHLDE

SEQ ID NO: 1707 - protein, 11 aa, Unknown
  Description of Unknown: Linker sequence
LKGEPSDMDKA

SEQ ID NO: 1708 - protein, 14 aa, Unknown
  Description of Unknown: Linker sequence
HFPAMVSRISGIGL

SEQ ID NO: 1709 - protein, 15 aa, Unknown
  Description of Unknown: Linker sequence
QVSRGAEHLDDLDLN

SEQ ID NO: 1710 - protein, 26 aa, Unknown
  Description of Unknown: Linker sequence
LAQVDPGENARYCTLQGRNEVPDTLD

SEQ ID NO: 1711 - protein, 27 aa, Unknown
  Description of Unknown: Linker sequence
YNEEVVALPVGGFYRFRKSGDRHGWEG

SEQ ID NO: 1712 - protein, 13 aa, Unknown
  Description of Unknown: Linker sequence
HDPFTLEPYSRDP

SEQ ID NO: 1713 - protein, 13 aa, Unknown
  Description of Unknown: Linker sequence
YTPAGEPIPTNKR

SEQ ID NO: 1714 - protein, 4 aa, Unknown
  Description of Unknown: Linker sequence
NIPP

SEQ ID NO: 1715 - protein, 4 aa, Unknown
  Description of Unknown: Linker sequence
RGWA

SEQ ID NO: 1716 - protein, 5 aa, Unknown
  Description of Unknown: Linker sequence
AFETP

SEQ ID NO: 1717 - protein, 5 aa, Unknown
  Description of Unknown: Linker sequence
DELRG

SEQ ID NO: 1718 - protein, 6 aa, Unknown
  Description of Unknown: Linker sequence
EIPDVV

SEQ ID NO: 1719 - protein, 7 aa, Unknown
  Description of Unknown: Linker sequence
KGGYDGR

SEQ ID NO: 1720 - protein, 7 aa, Unknown
  Description of Unknown: Linker sequence
RRGEPHV

SEQ ID NO: 1721 - protein, 8 aa, Unknown
  Description of Unknown: Linker sequence
LKVPRPGT

SEQ ID NO: 1722 - protein, 14 aa, Unknown
  Description of Unknown: Linker sequence
NLDGKPLLTGKRNP

SEQ ID NO: 1723 - protein, 6 aa, Unknown
  Description of Unknown: Linker sequence
DHSDVA

SEQ ID NO: 1724 - protein, 8 aa, Unknown
  Description of Unknown: Linker sequence
FKPAYGSI

SEQ ID NO: 1725 - protein, 19 aa, Unknown
  Description of Unknown: Linker sequence
AFPGTPHLLPPANSGDADA

SEQ ID NO: 1726 - protein, 12 aa, Unknown
  Description of Unknown: Linker sequence
YGKDDKLYPKDP

SEQ ID NO: 1727 - protein, 9 aa, Unknown
  Description of Unknown: Linker sequence
KYNLYGKDI

SEQ ID NO: 1728 - protein, 6 aa, Unknown
  Description of Unknown: Linker sequence
LREGNL

SEQ ID NO: 1729 - protein, 6 aa, Unknown
  Description of Unknown: Linker sequence
DCNEKL

SEQ ID NO: 1730 - protein, 6 aa, Unknown
  Description of Unknown: Linker sequence
LYPSDP

SEQ ID NO: 1731 - protein, 6 aa, Unknown
  Description of Unknown: Linker sequence
YGAHDA

SEQ ID NO: 1732 - protein, 9 aa, Unknown
  Description of Unknown: Linker sequence
QFKMMGETD

SEQ ID NO: 1733 - protein, 6 aa, Unknown
  Description of Unknown: Linker sequence
FETEYF

SEQ ID NO: 1734 - protein, 11 aa, Unknown
  Description of Unknown: Linker sequence
TSPHDHQTHAY

SEQ ID NO: 1735 - protein, 9 aa, Unknown
  Description of Unknown: Linker sequence
KADPKGITE

SEQ ID NO: 1736 - protein, 34 aa, Unknown
  Description of Unknown: Linker sequence
LTAKEPTEVESVECPHIAVGVWEANEKLPETPDR

SEQ ID NO: 1737 - protein, 4 aa, Unknown
  Description of Unknown: Linker sequence
VVPN

SEQ ID NO: 1738 - protein, 5 aa, Unknown
  Description of Unknown: Linker sequence
LSPPV

SEQ ID NO: 1739 - protein, 7 aa, Unknown
  Description of Unknown: Linker sequence
DVKNGEC

SEQ ID NO: 1740 - protein, 7 aa, Unknown
  Description of Unknown: Linker sequence
KDDIVDR

SEQ ID NO: 1741 - protein, 7 aa, Unknown
  Description of Unknown: Linker sequence
SDKKCSV

SEQ ID NO: 1742 - protein, 7 aa, Unknown
  Description of Unknown: Linker sequence
TKVPLVA

SEQ ID NO: 1743 - protein, 9 aa, Unknown
  Description of Unknown: Linker sequence
LAQLDNYGQ

SEQ ID NO: 1744 - protein, 12 aa, Unknown
  Description of Unknown: Linker sequence
NYNVKSPITGND

SEQ ID NO: 1745 - protein, 85 aa, Unknown
  Description of Unknown: Linker sequence
KPLKEPKTVNVVQFEPSKGAIGKAYKKDAKLVMEYLAICDECYITEMEMLLNEKGEFTIETEGKTFQLTKDMINVKRFQKTLYVE

SEQ ID NO: 1746 - protein, 4 aa, Unknown
  Description of Unknown: Linker sequence
SNGG

SEQ ID NO: 1747 - protein, 13 aa, Unknown
  Description of Unknown: Linker sequence
FSVDEIVQPDPPI

SEQ ID NO: 1748 - protein, 10 aa, Unknown
  Description of Unknown: Linker sequence
LTPRRSRKLK

SEQ ID NO: 1749 - protein, 6 aa, Unknown
  Description of Unknown: Linker sequence
DEPRSV

SEQ ID NO: 1750 - protein, 29 aa, Unknown
  Description of Unknown: Linker sequence
LPTANGDGGALALDSLTVLGAGGNNANDW

SEQ ID NO: 1751 - protein, 6 aa, Unknown
  Description of Unknown: Linker sequence
RNNLTR

SEQ ID NO: 1752 - protein, 8 aa, Unknown
  Description of Unknown: Linker sequence
RAMTDVHQ

SEQ ID NO: 1753 - protein, 24 aa, Unknown
  Description of Unknown: Linker sequence
TTENPELQLEPLSAPEVTEPTATD

SEQ ID NO: 1754 - protein, 6 aa, Unknown
  Description of Unknown: Linker sequence
VPRDCG

SEQ ID NO: 1755 - protein, 7 aa, Unknown
  Description of Unknown: Linker sequence
VRSRGPE

SEQ ID NO: 1756 - protein, 40 aa, Unknown
  Description of Unknown: Linker sequence
QEPEFQRMSALRLAACKRKEQEHGKDRGNTPKKPRLVFTD

SEQ ID NO: 1757 - protein, 14 aa, Unknown
  Description of Unknown: Linker sequence
AEGFGLPEEKGPDL

SEQ ID NO: 1758 - protein, 4 aa, Unknown
  Description of Unknown: Linker sequence
KGGK

SEQ ID NO: 1759 - protein, 6 aa, Unknown
  Description of Unknown: Linker sequence
KNQKPI

SEQ ID NO: 1760 - protein, 7 aa, Unknown
  Description of Unknown: Linker sequence
RGTLNVS

SEQ ID NO: 1761 - protein, 9 aa, Unknown
  Description of Unknown: Linker sequence
TVGAGLPII

SEQ ID NO: 1762 - protein, 4 aa, Unknown
  Description of Unknown: Linker sequence
LDGE

SEQ ID NO: 1763 - protein, 4 aa, Unknown
  Description of Unknown: Linker sequence
LGNW

SEQ ID NO: 1764 - protein, 7 aa, Unknown
  Description of Unknown: Linker sequence
HLFPDCA

SEQ ID NO: 1765 - protein, 18 aa, Unknown
  Description of Unknown: Linker sequence
IPKAELLTSESRGVLPDT

SEQ ID NO: 1766 - protein, 5 aa, Unknown
  Description of Unknown: Linker sequence
ETVAP

SEQ ID NO: 1767 - protein, 6 aa, Unknown
  Description of Unknown: Linker sequence
QGLTSF

SEQ ID NO: 1768 - protein, 7 aa, Unknown
  Description of Unknown: Linker sequence
VSKPKME

SEQ ID NO: 1769 - protein, 5 aa, Unknown
  Description of Unknown: Linker sequence
TVAAP

SEQ ID NO: 1770 - protein, 26 aa, Unknown
  Description of Unknown: Linker sequence
GGNPPGGNRGTTTTRRPATTTGSSPG

SEQ ID NO: 1771 - protein, 7 aa, Unknown
  Description of Unknown: Linker sequence
CKPCICT

SEQ ID NO: 1772 - protein, 6 aa, Unknown
  Description of Unknown: Linker sequence
VPSEVS

SEQ ID NO: 1773 - protein, 10 aa, Unknown
  Description of Unknown: Linker sequence
EPKSCDKTHT

SEQ ID NO: 1774 - protein, 7 aa, Unknown
  Description of Unknown: Linker sequence
CPPCKCP

SEQ ID NO: 1775 - protein, 9 aa, Unknown
  Description of Unknown: Linker sequence
EPRGPTIKP

SEQ ID NO: 1776 - protein, 5 aa, Unknown
  Description of Unknown: Linker sequence
ATENE

SEQ ID NO: 1777 - protein, 6 aa, Unknown
  Description of Unknown: Linker sequence
AKSVGI

SEQ ID NO: 1778 - protein, 7 aa, Unknown
  Description of Unknown: Linker sequence
ATWTGDS

SEQ ID NO: 1779 - protein, 10 aa, Unknown
  Description of Unknown: Linker sequence
ATITNANWDD

SEQ ID NO: 1780 - protein, 11 aa, Unknown
  Description of Unknown: Linker sequence
NGKDFSEPLPE

SEQ ID NO: 1781 - protein, 6 aa, Unknown
  Description of Unknown: Linker sequence
KQPLRR

SEQ ID NO: 1782 - protein, 8 aa, Unknown
  Description of Unknown: Linker sequence
LSPYTESS

SEQ ID NO: 1783 - protein, 4 aa, Unknown
  Description of Unknown: Linker sequence
VDSE

SEQ ID NO: 1784 - protein, 5 aa, Unknown
  Description of Unknown: Linker sequence
FVTGP

SEQ ID NO: 1785 - protein, 7 aa, Unknown
  Description of Unknown: Linker sequence
IKGDAYY

SEQ ID NO: 1786 - protein, 8 aa, Unknown
  Description of Unknown: Linker sequence
TKSGVVHF

SEQ ID NO: 1787 - protein, 9 aa, Unknown
  Description of Unknown: Linker sequence
VVLGEEVSF

SEQ ID NO: 1788 - protein, 12 aa, Unknown
  Description of Unknown: Linker sequence
IVPNDAAKPYNM

SEQ ID NO: 1789 - protein, 26 aa, Unknown
  Description of Unknown: Linker sequence
YLPSNNMEEPPYIDTGDPADRDATGV

SEQ ID NO: 1790 - protein, 4 aa, Unknown
  Description of Unknown: Linker sequence
GALP

SEQ ID NO: 1791 - protein, 8 aa, Unknown
  Description of Unknown: Linker sequence
FGVDWLKG

SEQ ID NO: 1792 - protein, 4 aa, Unknown
  Description of Unknown: Linker sequence
ILPQ

SEQ ID NO: 1793 - protein, 7 aa, Unknown
  Description of Unknown: Linker sequence
EAPLDNS

SEQ ID NO: 1794 - protein, 14 aa, Unknown
  Description of Unknown: Linker sequence
AAERVPLANPFAGE

SEQ ID NO: 1795 - protein, 4 aa, Unknown
  Description of Unknown: Linker sequence
EGVL

SEQ ID NO: 1796 - protein, 6 aa, Unknown
  Description of Unknown: Linker sequence
LVKIEP

SEQ ID NO: 1797 - protein, 6 aa, Unknown
  Description of Unknown: Linker sequence
RSLIGD

SEQ ID NO: 1798 - protein, 7 aa, Unknown
  Description of Unknown: Linker sequence
DASAVHP

SEQ ID NO: 1799 - protein, 7 aa, Unknown
  Description of Unknown: Linker sequence
EFPELDV

SEQ ID NO: 1800 - protein, 7 aa, Unknown
  Description of Unknown: Linker sequence
FSDYFEH

SEQ ID NO: 1801 - protein, 7 aa, Unknown
  Description of Unknown: Linker sequence
KVSRLGE

SEQ ID NO: 1802 - protein, 7 aa, Unknown
  Description of Unknown: Linker sequence
NGAFRTR

SEQ ID NO: 1803 - protein, 7 aa, Unknown
  Description of Unknown: Linker sequence
PLKSAPS

SEQ ID NO: 1804 - protein, 8 aa, Unknown
  Description of Unknown: Linker sequence
ARISGLNS

SEQ ID NO: 1805 - protein, 10 aa, Unknown
  Description of Unknown: Linker sequence
QRIAADTERD

SEQ ID NO: 1806 - protein, 11 aa, Unknown
  Description of Unknown: Linker sequence
ERFGLSNQGRA

SEQ ID NO: 1807 - protein, 11 aa, Unknown
  Description of Unknown: Linker sequence
LLAAPAGPRAT

SEQ ID NO: 1808 - protein, 12 aa, Unknown
  Description of Unknown: Linker sequence
KVGEEAPGTLHP

SEQ ID NO: 1809 - protein, 12 aa, Unknown
  Description of Unknown: Linker sequence
NAVGVDVNTASA

SEQ ID NO: 1810 - protein, 13 aa, Unknown
  Description of Unknown: Linker sequence
AAGFLRVMNGDNP

SEQ ID NO: 1811 - protein, 13 aa, Unknown
  Description of Unknown: Linker sequence
GVESLKDLKPGMV

SEQ ID NO: 1812 - protein, 13 aa, Unknown
  Description of Unknown: Linker sequence
SIGVGQYQHDVSQ

SEQ ID NO: 1813 - protein, 17 aa, Unknown
  Description of Unknown: Linker sequence
LDKPGRDPRPEFKTAEF

SEQ ID NO: 1814 - protein, 23 aa, Unknown
  Description of Unknown: Linker sequence
LKRLDPKKFTDETFGLPTVTDIL

SEQ ID NO: 1815 - protein, 4 aa, Unknown
  Description of Unknown: Linker sequence
LEGE

SEQ ID NO: 1816 - protein, 5 aa, Unknown
  Description of Unknown: Linker sequence
RLGFK

SEQ ID NO: 1817 - protein, 9 aa, Unknown
  Description of Unknown: Linker sequence
RGRPFEPPV

SEQ ID NO: 1818 - protein, 15 aa, Unknown
  Description of Unknown: Linker sequence
RGEVEETLKEDLPNV

SEQ ID NO: 1819 - protein, 4 aa, Unknown
  Description of Unknown: Linker sequence
LEYE

SEQ ID NO: 1820 - protein, 9 aa, Unknown
  Description of Unknown: Linker sequence
SYGLPPLNA

SEQ ID NO: 1821 - protein, 5 aa, Unknown
  Description of Unknown: Linker sequence
ILHDE

SEQ ID NO: 1822 - protein, 13 aa, Unknown
  Description of Unknown: Linker sequence
KGWGGLPIGTEGR

SEQ ID NO: 1823 - protein, 4 aa, Unknown
  Description of Unknown: Linker sequence
PQSP

SEQ ID NO: 1824 - protein, 6 aa, Unknown
  Description of Unknown: Linker sequence
DGFEAL

SEQ ID NO: 1825 - protein, 6 aa, Unknown
  Description of Unknown: Linker sequence
EQNPWK

SEQ ID NO: 1826 - protein, 6 aa, Unknown
  Description of Unknown: Linker sequence
SEHWQR

SEQ ID NO: 1827 - protein, 9 aa, Unknown
  Description of Unknown: Linker sequence
LDPQACPTV

SEQ ID NO: 1828 - protein, 5 aa, Unknown
  Description of Unknown: Linker sequence
KTPLT

SEQ ID NO: 1829 - protein, 6 aa, Unknown
  Description of Unknown: Linker sequence
LRQLTT

SEQ ID NO: 1830 - protein, 4 aa, Unknown
  Description of Unknown: Linker sequence
QNDI

SEQ ID NO: 1831 - protein, 7 aa, Unknown
  Description of Unknown: Linker sequence
INARAPV

SEQ ID NO: 1832 - protein, 9 aa, Unknown
  Description of Unknown: Linker sequence
TVTHGDIDL

SEQ ID NO: 1833 - protein, 10 aa, Unknown
  Description of Unknown: Linker sequence
TKTDVAGEAE

SEQ ID NO: 1834 - protein, 24 aa, Unknown
  Description of Unknown: Linker sequence
LFNTNGFMLEENVVSTKPRFHFIA

SEQ ID NO: 1835 - protein, 7 aa, Unknown
  Description of Unknown: Linker sequence
ASLDQPF

SEQ ID NO: 1836 - protein, 9 aa, Unknown
  Description of Unknown: Linker sequence
VKPGRQYQE

SEQ ID NO: 1837 - protein, 4 aa, Unknown
  Description of Unknown: Linker sequence
DGFE

SEQ ID NO: 1838 - protein, 5 aa, Unknown
  Description of Unknown: Linker sequence
LRRFN

SEQ ID NO: 1839 - protein, 6 aa, Unknown
  Description of Unknown: Linker sequence
KRTGET

SEQ ID NO: 1840 - protein, 16 aa, Unknown
  Description of Unknown: Linker sequence
VEGEQSIPMVSRLGMK

SEQ ID NO: 1841 - protein, 22 aa, Unknown
  Description of Unknown: Linker sequence
AEGHITTNHVAATRAAKSKVRR

SEQ ID NO: 1842 - protein, 8 aa, Unknown
  Description of Unknown: Linker sequence
VDKSDEPL

SEQ ID NO: 1843 - protein, 7 aa, Unknown
  Description of Unknown: Linker sequence
IVSPANE

SEQ ID NO: 1844 - protein, 11 aa, Unknown
  Description of Unknown: Linker sequence
VENEPNLCYNA

SEQ ID NO: 1845 - protein, 13 aa, Unknown
  Description of Unknown: Linker sequence
FITLEENKPTRPV

SEQ ID NO: 1846 - protein, 4 aa, Unknown
  Description of Unknown: Linker sequence
EDGI

SEQ ID NO: 1847 - protein, 4 aa, Unknown
  Description of Unknown: Linker sequence
HKLK

SEQ ID NO: 1848 - protein, 4 aa, Unknown
  Description of Unknown: Linker sequence
KGGE

SEQ ID NO: 1849 - protein, 4 aa, Unknown
  Description of Unknown: Linker sequence
SHSL

SEQ ID NO: 1850 - protein, 6 aa, Unknown
  Description of Unknown: Linker sequence
WSTDIL

SEQ ID NO: 1851 - protein, 9 aa, Unknown
  Description of Unknown: Linker sequence
DIIKPDPPK

SEQ ID NO: 1852 - protein, 13 aa, Unknown
  Description of Unknown: Linker sequence
KDQKEPKNKTFLR

SEQ ID NO: 1853 - protein, 7 aa, Unknown
  Description of Unknown: Linker sequence
WDNQCQC

SEQ ID NO: 1854 - protein, 42 aa, Unknown
  Description of Unknown: Linker sequence
SSATRSTTKQVTPQPEEQKERKTTEMQSPMQPVDQASLPGHC

SEQ ID NO: 1855 - protein, 5 aa, Unknown
  Description of Unknown: Linker sequence
LNKPI

SEQ ID NO: 1856 - protein, 5 aa, Unknown
  Description of Unknown: Linker sequence
NHQSN

SEQ ID NO: 1857 - protein, 5 aa, Unknown
  Description of Unknown: Linker sequence
NSIDQ

SEQ ID NO: 1858 - protein, 7 aa, Unknown
  Description of Unknown: Linker sequence
YLPNVTK

SEQ ID NO: 1859 - protein, 9 aa, Unknown
  Description of Unknown: Linker sequence
LANLKNLGW

SEQ ID NO: 1860 - protein, 9 aa, Unknown
  Description of Unknown: Linker sequence
LKDLKKLKS

SEQ ID NO: 1861 - protein, 10 aa, Unknown
  Description of Unknown: Linker sequence
FLDENKVKDL

SEQ ID NO: 1862 - protein, 10 aa, Unknown
  Description of Unknown: Linker sequence
NLKKKSVTDA

SEQ ID NO: 1863 - protein, 11 aa, Unknown
  Description of Unknown: Linker sequence
FLNGNKLTDIK

SEQ ID NO: 1864 - protein, 11 aa, Unknown
  Description of Unknown: Linker sequence
PNTVKNTDGSL

SEQ ID NO: 1865 - protein, 11 aa, Unknown
  Description of Unknown: Linker sequence
SLEHNGISDIN

SEQ ID NO: 1866 - protein, 13 aa, Unknown
  Description of Unknown: Linker sequence
IANNSDIKSVQGI

SEQ ID NO: 1867 - protein, 5 aa, Unknown
  Description of Unknown: Linker sequence
FTTLT

SEQ ID NO: 1868 - protein, 5 aa, Unknown
  Description of Unknown: Linker sequence
KAPEV

SEQ ID NO: 1869 - protein, 9 aa, Unknown
  Description of Unknown: Linker sequence
VSDVAVDVV

SEQ ID NO: 1870 - protein, 6 aa, Unknown
  Description of Unknown: Linker sequence
INTSYF

SEQ ID NO: 1871 - protein, 22 aa, Unknown
  Description of Unknown: Linker sequence
SGIISLEDLPDYTRSDEPLNSI

SEQ ID NO: 1872 - protein, 4 aa, Unknown
  Description of Unknown: Linker sequence
VNGQ

SEQ ID NO: 1873 - protein, 5 aa, Unknown
  Description of Unknown: Linker sequence
FKNAT

SEQ ID NO: 1874 - protein, 5 aa, Unknown
  Description of Unknown: Linker sequence
FYPNR

SEQ ID NO: 1875 - protein, 5 aa, Unknown
  Description of Unknown: Linker sequence
MDNDV

SEQ ID NO: 1876 - protein, 6 aa, Unknown
  Description of Unknown: Linker sequence
FPVPTL

SEQ ID NO: 1877 - protein, 6 aa, Unknown
  Description of Unknown: Linker sequence
VNDQGQ

SEQ ID NO: 1878 - protein, 7 aa, Unknown
  Description of Unknown: Linker sequence
SSFTPNV

SEQ ID NO: 1879 - protein, 7 aa, Unknown
  Description of Unknown: Linker sequence
VKGTIAA

SEQ ID NO: 1880 - protein, 8 aa, Unknown
  Description of Unknown: Linker sequence
SKKFPSYS

SEQ ID NO: 1881 - protein, 9 aa, Unknown
  Description of Unknown: Linker sequence
ITYQTYSEV

SEQ ID NO: 1882 - protein, 10 aa, Unknown
  Description of Unknown: Linker sequence
FATDKGFPKT

SEQ ID NO: 1883 - protein, 12 aa, Unknown
  Description of Unknown: Linker sequence
TADPIPDAGRSS

SEQ ID NO: 1884 - protein, 4 aa, Unknown
  Description of Unknown: Linker sequence
EKCF

SEQ ID NO: 1885 - protein, 4 aa, Unknown
  Description of Unknown: Linker sequence
KNGK

SEQ ID NO: 1886 - protein, 5 aa, Unknown
  Description of Unknown: Linker sequence
EKSHM

SEQ ID NO: 1887 - protein, 5 aa, Unknown
  Description of Unknown: Linker sequence
NTNSD

SEQ ID NO: 1888 - protein, 6 aa, Unknown
  Description of Unknown: Linker sequence
NAPEKH

SEQ ID NO: 1889 - protein, 7 aa, Unknown
  Description of Unknown: Linker sequence
ACPVAAL

SEQ ID NO: 1890 - protein, 7 aa, Unknown
  Description of Unknown: Linker sequence
DERSKSL

SEQ ID NO: 1891 - protein, 7 aa, Unknown
  Description of Unknown: Linker sequence
KCLLCGR

SEQ ID NO: 1892 - protein, 7 aa, Unknown
  Description of Unknown: Linker sequence
TETYAMK

SEQ ID NO: 1893 - protein, 9 aa, Unknown
  Description of Unknown: Linker sequence
DTNCLLCGQ

SEQ ID NO: 1894 - protein, 10 aa, Unknown
  Description of Unknown: Linker sequence
NGGGQPHVNP

SEQ ID NO: 1895 - protein, 14 aa, Unknown
  Description of Unknown: Linker sequence
YKARASKPFLPKDK

SEQ ID NO: 1896 - protein, 18 aa, Unknown
  Description of Unknown: Linker sequence
LDIHEFKCGPCNRRENCE

SEQ ID NO: 1897 - protein, 6 aa, Unknown
  Description of Unknown: Linker sequence
VVGGEL

SEQ ID NO: 1898 - protein, 5 aa, Unknown
  Description of Unknown: Linker sequence
HNGFF

SEQ ID NO: 1899 - protein, 11 aa, Unknown
  Description of Unknown: Linker sequence
VKGKEGDEEEE

SEQ ID NO: 1900 - protein, 4 aa, Unknown
  Description of Unknown: Linker sequence
KLIV

SEQ ID NO: 1901 - protein, 6 aa, Unknown
  Description of Unknown: Linker sequence
TIGNRA

SEQ ID NO: 1902 - protein, 13 aa, Unknown
  Description of Unknown: Linker sequence
VPPSKPTVNIPSS

SEQ ID NO: 1903 - protein, 5 aa, Unknown
  Description of Unknown: Linker sequence
FFSIL

SEQ ID NO: 1904 - protein, 6 aa, Unknown
  Description of Unknown: Linker sequence
TTGEWK

SEQ ID NO: 1905 - protein, 7 aa, Unknown
  Description of Unknown: Linker sequence
MSTEEAE

SEQ ID NO: 1906 - protein, 8 aa, Unknown
  Description of Unknown: Linker sequence
ASQVESDW

SEQ ID NO: 1907 - protein, 7 aa, Unknown
  Description of Unknown: Linker sequence
KLHLSNC

SEQ ID NO: 1908 - protein, 4 aa, Unknown
  Description of Unknown: Linker sequence
DANF

SEQ ID NO: 1909 - protein, 7 aa, Unknown
  Description of Unknown: Linker sequence
VGLEKNA

SEQ ID NO: 1910 - protein, 8 aa, Unknown
  Description of Unknown: Linker sequence
TNSTEETL

SEQ ID NO: 1911 - protein, 9 aa, Unknown
  Description of Unknown: Linker sequence
KTWENVNAQ

SEQ ID NO: 1912 - protein, 9 aa, Unknown
  Description of Unknown: Linker sequence
YLPTLYVSQ

SEQ ID NO: 1913 - protein, 11 aa, Unknown
  Description of Unknown: Linker sequence
SHRYGFGKIDA

SEQ ID NO: 1914 - protein, 12 aa, Unknown
  Description of Unknown: Linker sequence
GDWRDSAMGKKY

SEQ ID NO: 1915 - protein, 4 aa, Unknown
  Description of Unknown: Linker sequence
KGTL

SEQ ID NO: 1916 - protein, 7 aa, Unknown
  Description of Unknown: Linker sequence
KLNKDIV

SEQ ID NO: 1917 - protein, 8 aa, Unknown
  Description of Unknown: Linker sequence
ETRKRALS

SEQ ID NO: 1918 - protein, 33 aa, Unknown
  Description of Unknown: Linker sequence
VYPPDYNPEGKVTKRKHDNEGSGSKRPKVEYSE

SEQ ID NO: 1919 - protein, 8 aa, Unknown
  Description of Unknown: Linker sequence
IERHSIHW

SEQ ID NO: 1920 - protein, 9 aa, Unknown
  Description of Unknown: Linker sequence
DLTGTPLFV

SEQ ID NO: 1921 - protein, 10 aa, Unknown
  Description of Unknown: Linker sequence
NGPASLPYDI

SEQ ID NO: 1922 - protein, 14 aa, Unknown
  Description of Unknown: Linker sequence
VNGSDINVDWGKPI

SEQ ID NO: 1923 - protein, 44 aa, Unknown
  Description of Unknown: Linker sequence
YAGAPGGLPTDEGTPPVDHQCLDTLDVRPVVPRSVPVNSFVKRP

SEQ ID NO: 1924 - protein, 6 aa, Unknown
  Description of Unknown: Linker sequence
QFGRKG

SEQ ID NO: 1925 - protein, 9 aa, Unknown
  Description of Unknown: Linker sequence
IASGAIGGL

SEQ ID NO: 1926 - protein, 4 aa, Unknown
  Description of Unknown: Linker sequence
SGNP

SEQ ID NO: 1927 - protein, 6 aa, Unknown
  Description of Unknown: Linker sequence
VTGISP

SEQ ID NO: 1928 - protein, 6 aa, Unknown
  Description of Unknown: Linker sequence
IKRADA

SEQ ID NO: 1929 - protein, 7 aa, Unknown
  Description of Unknown: Linker sequence
VQPKLTA

SEQ ID NO: 1930 - protein, 14 aa, Unknown
  Description of Unknown: Linker sequence
TGVMKNDTNENLKK

SEQ ID NO: 1931 - protein, 24 aa, Unknown
  Description of Unknown: Linker sequence
FLPRVGVGTSFGLPQTRRISLASP

SEQ ID NO: 1932 - protein, 4 aa, Unknown
  Description of Unknown: Linker sequence
ASNM

SEQ ID NO: 1933 - protein, 6 aa, Unknown
  Description of Unknown: Linker sequence
ESKPSV

SEQ ID NO: 1934 - protein, 7 aa, Unknown
  Description of Unknown: Linker sequence
IKMLGSK

SEQ ID NO: 1935 - protein, 7 aa, Unknown
  Description of Unknown: Linker sequence
LRREPNL

SEQ ID NO: 1936 - protein, 7 aa, Unknown
  Description of Unknown: Linker sequence
LSRSSNP

SEQ ID NO: 1937 - protein, 8 aa, Unknown
  Description of Unknown: Linker sequence
RLGCRYSK

SEQ ID NO: 1938 - protein, 4 aa, Unknown
  Description of Unknown: Linker sequence
ETPA

SEQ ID NO: 1939 - protein, 8 aa, Unknown
  Description of Unknown: Linker sequence
FANHTYVP

SEQ ID NO: 1940 - protein, 5 aa, Unknown
  Description of Unknown: Linker sequence
LFEWL

SEQ ID NO: 1941 - protein, 14 aa, Unknown
  Description of Unknown: Linker sequence
HELGGKNASGGYGG

SEQ ID NO: 1942 - protein, 5 aa, Unknown
  Description of Unknown: Linker sequence
RGDVG

SEQ ID NO: 1943 - protein, 4 aa, Unknown
  Description of Unknown: Linker sequence
DYTR

SEQ ID NO: 1944 - protein, 8 aa, Unknown
  Description of Unknown: Linker sequence
QTQAVSQQ

SEQ ID NO: 1945 - protein, 8 aa, Unknown
  Description of Unknown: Linker sequence
YTDHQMLV

SEQ ID NO: 1946 - protein, 4 aa, Unknown
  Description of Unknown: Linker sequence
LNNR

SEQ ID NO: 1947 - protein, 12 aa, Unknown
  Description of Unknown: Linker sequence
TCRKTNKLSPYD

SEQ ID NO: 1948 - protein, 5 aa, Unknown
  Description of Unknown: Linker sequence
VVNNV

SEQ ID NO: 1949 - protein, 7 aa, Unknown
  Description of Unknown: Linker sequence
VQARASS

SEQ ID NO: 1950 - protein, 8 aa, Unknown
  Description of Unknown: Linker sequence
TYIPRKEV

SEQ ID NO: 1951 - protein, 10 aa, Unknown
  Description of Unknown: Linker sequence
IQATIIRQNQ

SEQ ID NO: 1952 - protein, 4 aa, Unknown
  Description of Unknown: Linker sequence
KGDD

SEQ ID NO: 1953 - protein, 4 aa, Unknown
  Description of Unknown: Linker sequence
SDVV

SEQ ID NO: 1954 - protein, 6 aa, Unknown
  Description of Unknown: Linker sequence
VAQSSY

SEQ ID NO: 1955 - protein, 8 aa, Unknown
  Description of Unknown: Linker sequence
TSRDYDTQ

SEQ ID NO: 1956 - protein, 11 aa, Unknown
  Description of Unknown: Linker sequence
YAPFLPKTWTS

SEQ ID NO: 1957 - protein, 5 aa, Unknown
  Description of Unknown: Linker sequence
AGVNL

SEQ ID NO: 1958 - protein, 11 aa, Unknown
  Description of Unknown: Linker sequence
TLLLKSPTTHP

SEQ ID NO: 1959 - protein, 5 aa, Unknown
  Description of Unknown: Linker sequence
VESAM

SEQ ID NO: 1960 - protein, 6 aa, Unknown
  Description of Unknown: Linker sequence
GPLWSN

SEQ ID NO: 1961 - protein, 9 aa, Unknown
  Description of Unknown: Linker sequence
QVENTGIHE

SEQ ID NO: 1962 - protein, 8 aa, Unknown
  Description of Unknown: Linker sequence
SCDNLPHN

SEQ ID NO: 1963 - protein, 16 aa, Unknown
  Description of Unknown: Linker sequence
ICDRNHTWLPVSDDAC

SEQ ID NO: 1964 - protein, 4 aa, Unknown
  Description of Unknown: Linker sequence
YYPA

SEQ ID NO: 1965 - protein, 5 aa, Unknown
  Description of Unknown: Linker sequence
SGQPL

SEQ ID NO: 1966 - protein, 5 aa, Unknown
  Description of Unknown: Linker sequence
VYSGK

SEQ ID NO: 1967 - protein, 7 aa, Unknown
  Description of Unknown: Linker sequence
VNDQGKE

SEQ ID NO: 1968 - protein, 11 aa, Unknown
  Description of Unknown: Linker sequence
FGNKYWLMLNE

SEQ ID NO: 1969 - protein, 19 aa, Unknown
  Description of Unknown: Linker sequence
QSFAPVKGASAVPLVGRAS

SEQ ID NO: 1970 - protein, 4 aa, Unknown
  Description of Unknown: Linker sequence
PVSE

SEQ ID NO: 1971 - protein, 5 aa, Unknown
  Description of Unknown: Linker sequence
AGKLV

SEQ ID NO: 1972 - protein, 7 aa, Unknown
  Description of Unknown: Linker sequence
LEKDGSN

SEQ ID NO: 1973 - protein, 14 aa, Unknown
  Description of Unknown: Linker sequence
NNDPSWNPGPTWDP

SEQ ID NO: 1974 - protein, 4 aa, Unknown
  Description of Unknown: Linker sequence
GVPF

SEQ ID NO: 1975 - protein, 4 aa, Unknown
  Description of Unknown: Linker sequence
ICQS

SEQ ID NO: 1976 - protein, 6 aa, Unknown
  Description of Unknown: Linker sequence
VNYEDP

SEQ ID NO: 1977 - protein, 8 aa, Unknown
  Description of Unknown: Linker sequence
RARGENEP

SEQ ID NO: 1978 - protein, 6 aa, Unknown
  Description of Unknown: Linker sequence
LAGTGP

SEQ ID NO: 1979 - protein, 10 aa, Unknown
  Description of Unknown: Linker sequence
AAGGSVKGKK

SEQ ID NO: 1980 - protein, 8 aa, Unknown
  Description of Unknown: Linker sequence
LMTPEYVA

SEQ ID NO: 1981 - protein, 17 aa, Unknown
  Description of Unknown: Linker sequence
GFESVLEAVTALAFYVP

SEQ ID NO: 1982 - protein, 18 aa, Unknown
  Description of Unknown: Linker sequence
HKLGAVDVPDLVYSEAGP

SEQ ID NO: 1983 - protein, 35 aa, Unknown
  Description of Unknown: Linker sequence
QHPPKDSSGQRVAVSPTSQRLQLLEPFDKWDGKDL

SEQ ID NO: 1984 - protein, 41 aa, Unknown
  Description of Unknown: Linker sequence
TLKFNPETDFLTGKDGKKFKLEAPDADELPRAEFDPGQDTY

SEQ ID NO: 1985 - protein, 4 aa, Unknown
  Description of Unknown: Linker sequence
LVLE

SEQ ID NO: 1986 - protein, 4 aa, Unknown
  Description of Unknown: Linker sequence
SESG

SEQ ID NO: 1987 - protein, 5 aa, Unknown
  Description of Unknown: Linker sequence
EISGM

SEQ ID NO: 1988 - protein, 5 aa, Unknown
  Description of Unknown: Linker sequence
FAARS

SEQ ID NO: 1989 - protein, 7 aa, Unknown
  Description of Unknown: Linker sequence
QKSGKGL

SEQ ID NO: 1990 - protein, 11 aa, Unknown
  Description of Unknown: Linker sequence
GEVFPQKKVSA

SEQ ID NO: 1991 - protein, 13 aa, Unknown
  Description of Unknown: Linker sequence
KHPAVRKEPGPGL

SEQ ID NO: 1992 - protein, 14 aa, Unknown
  Description of Unknown: Linker sequence
YPHWEGEIIRFETE

SEQ ID NO: 1993 - protein, 9 aa, Unknown
  Description of Unknown: Linker sequence
EYPALGEVF

SEQ ID NO: 1994 - protein, 7 aa, Unknown
  Description of Unknown: Linker sequence
QDDDCTP

SEQ ID NO: 1995 - protein, 4 aa, Unknown
  Description of Unknown: Linker sequence
HNGK

SEQ ID NO: 1996 - protein, 5 aa, Unknown
  Description of Unknown: Linker sequence
SSVSR

SEQ ID NO: 1997 - protein, 6 aa, Unknown
  Description of Unknown: Linker sequence
AAHPVG

SEQ ID NO: 1998 - protein, 6 aa, Unknown
  Description of Unknown: Linker sequence
ARFDVT

SEQ ID NO: 1999 - protein, 6 aa, Unknown
  Description of Unknown: Linker sequence
EGRDMN

SEQ ID NO: 2000 - protein, 6 aa, Unknown
  Description of Unknown: Linker sequence
KFLRTE

SEQ ID NO: 2001 - protein, 8 aa, Unknown
  Description of Unknown: Linker sequence
LDLFYNTP

SEQ ID NO: 2002 - protein, 8 aa, Unknown
  Description of Unknown: Linker sequence
RTAEQQEA

SEQ ID NO: 2003 - protein, 11 aa, Unknown
  Description of Unknown: Linker sequence
YRAVPEGGQKE

SEQ ID NO: 2004 - protein, 8 aa, Unknown
  Description of Unknown: Linker sequence
HDPRRFGR

SEQ ID NO: 2005 - protein, 10 aa, Unknown
  Description of Unknown: Linker sequence
RRGDYREIPL

SEQ ID NO: 2006 - protein, 11 aa, Unknown
  Description of Unknown: Linker sequence
RHAVYGREGLP

SEQ ID NO: 2007 - protein, 23 aa, Unknown
  Description of Unknown: Linker sequence
ELGGSTLSDQSYRQPDGLPGGFQ

SEQ ID NO: 2008 - protein, 6 aa, Unknown
  Description of Unknown: Linker sequence
ESGKTS

SEQ ID NO: 2009 - protein, 7 aa, Unknown
  Description of Unknown: Linker sequence
FLDIHNI

SEQ ID NO: 2010 - protein, 7 aa, Unknown
  Description of Unknown: Linker sequence
VYPNIEE

SEQ ID NO: 2011 - protein, 9 aa, Unknown
  Description of Unknown: Linker sequence
RQGIPNESW

SEQ ID NO: 2012 - protein, 17 aa, Unknown
  Description of Unknown: Linker sequence
TKINERYELCDTYPALL

SEQ ID NO: 2013 - protein, 4 aa, Unknown
  Description of Unknown: Linker sequence
NGIV

SEQ ID NO: 2014 - protein, 5 aa, Unknown
  Description of Unknown: Linker sequence
SRRVP

SEQ ID NO: 2015 - protein, 17 aa, Unknown
  Description of Unknown: Linker sequence
LEKEKQFEKYSELKGTV

SEQ ID NO: 2016 - protein, 12 aa, Unknown
  Description of Unknown: Linker sequence
KDSPKGVGRPTK

SEQ ID NO: 2017 - protein, 4 aa, Unknown
  Description of Unknown: Linker sequence
ILIP

SEQ ID NO: 2018 - protein, 4 aa, Unknown
  Description of Unknown: Linker sequence
LAPA

SEQ ID NO: 2019 - protein, 5 aa, Unknown
  Description of Unknown: Linker sequence
CSGEY

SEQ ID NO: 2020 - protein, 5 aa, Unknown
  Description of Unknown: Linker sequence
STPHP

SEQ ID NO: 2021 - protein, 5 aa, Unknown
  Description of Unknown: Linker sequence
WGCDK

SEQ ID NO: 2022 - protein, 6 aa, Unknown
  Description of Unknown: Linker sequence
YFAMDE

SEQ ID NO: 2023 - protein, 9 aa, Unknown
  Description of Unknown: Linker sequence
RAETIDDIR

SEQ ID NO: 2024 - protein, 6 aa, Unknown
  Description of Unknown: Linker sequence
NDDIQG

SEQ ID NO: 2025 - protein, 7 aa, Unknown
  Description of Unknown: Linker sequence
YREKYCT

SEQ ID NO: 2026 - protein, 4 aa, Unknown
  Description of Unknown: Linker sequence
DADL

SEQ ID NO: 2027 - protein, 4 aa, Unknown
  Description of Unknown: Linker sequence
PNTA

SEQ ID NO: 2028 - protein, 5 aa, Unknown
  Description of Unknown: Linker sequence
VAVGV

SEQ ID NO: 2029 - protein, 6 aa, Unknown
  Description of Unknown: Linker sequence
VNIALA

SEQ ID NO: 2030 - protein, 17 aa, Unknown
  Description of Unknown: Linker sequence
KNLEEPVKPFPGVQGSS

SEQ ID NO: 2031 - protein, 26 aa, Unknown
  Description of Unknown: Linker sequence
LKGTLELHPNGLIKTDEYMRTSEPDV

SEQ ID NO: 2032 - protein, 6 aa, Unknown
  Description of Unknown: Linker sequence
YYPQIA

SEQ ID NO: 2033 - protein, 4 aa, Unknown
  Description of Unknown: Linker sequence
LGDA

SEQ ID NO: 2034 - protein, 7 aa, Unknown
  Description of Unknown: Linker sequence
FKHSGGL

SEQ ID NO: 2035 - protein, 20 aa, Unknown
  Description of Unknown: Linker sequence
FEAERKENCPACSQLPQNIQ

SEQ ID NO: 2036 - protein, 8 aa, Unknown
  Description of Unknown: Linker sequence
YGLDTINK

SEQ ID NO: 2037 - protein, 9 aa, Unknown
  Description of Unknown: Linker sequence
SMDNPDNEI

SEQ ID NO: 2038 - protein, 10 aa, Unknown
  Description of Unknown: Linker sequence
QQGRYPGVSN

SEQ ID NO: 2039 - protein, 8 aa, Unknown
  Description of Unknown: Linker sequence
TKLQNPDL

SEQ ID NO: 2040 - protein, 10 aa, Unknown
  Description of Unknown: Linker sequence
GGRGYGSESG

SEQ ID NO: 2041 - protein, 12 aa, Unknown
  Description of Unknown: Linker sequence
LQQHRPSPELTL

SEQ ID NO: 2042 - protein, 17 aa, Unknown
  Description of Unknown: Linker sequence
LGGKWQPGRGPCVLQEY

SEQ ID NO: 2043 - protein, 5 aa, Unknown
  Description of Unknown: Linker sequence
YQKLT

SEQ ID NO: 2044 - protein, 7 aa, Unknown
  Description of Unknown: Linker sequence
FISNQTI

SEQ ID NO: 2045 - protein, 7 aa, Unknown
  Description of Unknown: Linker sequence
SWEGNPI

SEQ ID NO: 2046 - protein, 8 aa, Unknown
  Description of Unknown: Linker sequence
FREVVSPQ

SEQ ID NO: 2047 - protein, 9 aa, Unknown
  Description of Unknown: Linker sequence
LADVPSSPY

SEQ ID NO: 2048 - protein, 4 aa, Unknown
  Description of Unknown: Linker sequence
FVSA

SEQ ID NO: 2049 - protein, 4 aa, Unknown
  Description of Unknown: Linker sequence
HKRS

SEQ ID NO: 2050 - protein, 5 aa, Unknown
  Description of Unknown: Linker sequence
KAAPD

SEQ ID NO: 2051 - protein, 19 aa, Unknown
  Description of Unknown: Linker sequence
PLDSPDETEDPEPNYAGEP

SEQ ID NO: 2052 - protein, 6 aa, Unknown
  Description of Unknown: Linker sequence
EVGNEE

SEQ ID NO: 2053 - protein, 13 aa, Unknown
  Description of Unknown: Linker sequence
ALPDEETGLELNE

SEQ ID NO: 2054 - protein, 4 aa, Unknown
  Description of Unknown: Linker sequence
QVDA

SEQ ID NO: 2055 - protein, 5 aa, Unknown
  Description of Unknown: Linker sequence
WRKDP

SEQ ID NO: 2056 - protein, 6 aa, Unknown
  Description of Unknown: Linker sequence
PSHGII

SEQ ID NO: 2057 - protein, 7 aa, Unknown
  Description of Unknown: Linker sequence
EGQGKAK

SEQ ID NO: 2058 - protein, 8 aa, Unknown
  Description of Unknown: Linker sequence
KINLAIKT

SEQ ID NO: 2059 - protein, 8 aa, Unknown
  Description of Unknown: Linker sequence
TEMYDTPT

SEQ ID NO: 2060 - protein, 6 aa, Unknown
  Description of Unknown: Linker sequence
AHELPM

SEQ ID NO: 2061 - protein, 12 aa, Unknown
  Description of Unknown: Linker sequence
EKPKGRDSKKVR

SEQ ID NO: 2062 - protein, 14 aa, Unknown
  Description of Unknown: Linker sequence
IEGTSPEIVVNPVR

SEQ ID NO: 2063 - protein, 7 aa, Unknown
  Description of Unknown: Linker sequence
QRTKVQI

SEQ ID NO: 2064 - protein, 26 aa, Unknown
  Description of Unknown: Linker sequence
VDMGFDTSKLGSYQRVAEPVVPPQEM

SEQ ID NO: 2065 - protein, 5 aa, Unknown
  Description of Unknown: Linker sequence
MNAHI

SEQ ID NO: 2066 - protein, 6 aa, Unknown
  Description of Unknown: Linker sequence
ADDYQA

SEQ ID NO: 2067 - protein, 6 aa, Unknown
  Description of Unknown: Linker sequence
YEGFTG

SEQ ID NO: 2068 - protein, 7 aa, Unknown
  Description of Unknown: Linker sequence
QVDDPLK

SEQ ID NO: 2069 - protein, 11 aa, Unknown
  Description of Unknown: Linker sequence
YKPKRFEYVTW

SEQ ID NO: 2070 - protein, 13 aa, Unknown
  Description of Unknown: Linker sequence
ILPLWHHDDTYLF

SEQ ID NO: 2071 - protein, 22 aa, Unknown
  Description of Unknown: Linker sequence
DMILPKKSVSKVKQTQLLTTEG

SEQ ID NO: 2072 - protein, 4 aa, Unknown
  Description of Unknown: Linker sequence
IDNP

SEQ ID NO: 2073 - protein, 4 aa, Unknown
  Description of Unknown: Linker sequence
GMDH

SEQ ID NO: 2074 - protein, 4 aa, Unknown
  Description of Unknown: Linker sequence
IGDC

SEQ ID NO: 2075 - protein, 5 aa, Unknown
  Description of Unknown: Linker sequence
EGVLH

SEQ ID NO: 2076 - protein, 5 aa, Unknown
  Description of Unknown: Linker sequence
NQKEL

SEQ ID NO: 2077 - protein, 5 aa, Unknown
  Description of Unknown: Linker sequence
QGNAL

SEQ ID NO: 2078 - protein, 5 aa, Unknown
  Description of Unknown: Linker sequence
QSGYQ

SEQ ID NO: 2079 - protein, 6 aa, Unknown
  Description of Unknown: Linker sequence
ARPDDE

SEQ ID NO: 2080 - protein, 6 aa, Unknown
  Description of Unknown: Linker sequence
MGVSAI

SEQ ID NO: 2081 - protein, 6 aa, Unknown
  Description of Unknown: Linker sequence
RNFQGY

SEQ ID NO: 2082 - protein, 7 aa, Unknown
  Description of Unknown: Linker sequence
TTQGDTD

SEQ ID NO: 2083 - protein, 5 aa, Unknown
  Description of Unknown: Linker sequence
IRDAN

SEQ ID NO: 2084 - protein, 7 aa, Unknown
  Description of Unknown: Linker sequence
YARPSSA

SEQ ID NO: 2085 - protein, 4 aa, Unknown
  Description of Unknown: Linker sequence
RGKF

SEQ ID NO: 2086 - protein, 4 aa, Unknown
  Description of Unknown: Linker sequence
THAV

SEQ ID NO: 2087 - protein, 5 aa, Unknown
  Description of Unknown: Linker sequence
ETPKI

SEQ ID NO: 2088 - protein, 5 aa, Unknown
  Description of Unknown: Linker sequence
SDTAN

SEQ ID NO: 2089 - protein, 7 aa, Unknown
  Description of Unknown: Linker sequence
TKQLAPT

SEQ ID NO: 2090 - protein, 10 aa, Unknown
  Description of Unknown: Linker sequence
AGDYKNLGGE

SEQ ID NO: 2091 - protein, 19 aa, Unknown
  Description of Unknown: Linker sequence
TYYTFNFSLEGAKMSLPGT

SEQ ID NO: 2092 - protein, 5 aa, Unknown
  Description of Unknown: Linker sequence
YNKSS

SEQ ID NO: 2093 - protein, 8 aa, Unknown
  Description of Unknown: Linker sequence
YGTPDYKY

SEQ ID NO: 2094 - protein, 11 aa, Unknown
  Description of Unknown: Linker sequence
PYGKAHTLGLK

SEQ ID NO: 2095 - protein, 6 aa, Unknown
  Description of Unknown: Linker sequence
DTEEKK

SEQ ID NO: 2096 - protein, 19 aa, Unknown
  Description of Unknown: Linker sequence
DIPNRRRKVSKHKHANFYP

SEQ ID NO: 2097 - protein, 6 aa, Unknown
  Description of Unknown: Linker sequence
PCSHVV

SEQ ID NO: 2098 - protein, 6 aa, Unknown
  Description of Unknown: Linker sequence
ANENGT

SEQ ID NO: 2099 - protein, 6 aa, Unknown
  Description of Unknown: Linker sequence
NRKNNI

SEQ ID NO: 2100 - protein, 8 aa, Unknown
  Description of Unknown: Linker sequence
LAPEDYTG

SEQ ID NO: 2101 - protein, 4 aa, Unknown
  Description of Unknown: Linker sequence
IGGK

SEQ ID NO: 2102 - protein, 4 aa, Unknown
  Description of Unknown: Linker sequence
VGDD

SEQ ID NO: 2103 - protein, 6 aa, Unknown
  Description of Unknown: Linker sequence
INTTKY

SEQ ID NO: 2104 - protein, 7 aa, Unknown
  Description of Unknown: Linker sequence
AATVTGY

SEQ ID NO: 2105 - protein, 7 aa, Unknown
  Description of Unknown: Linker sequence
GGADGKT

SEQ ID NO: 2106 - protein, 7 aa, Unknown
  Description of Unknown: Linker sequence
QNKDGSI

SEQ ID NO: 2107 - protein, 7 aa, Unknown
  Description of Unknown: Linker sequence
TDNNGKT

SEQ ID NO: 2108 - protein, 8 aa, Unknown
  Description of Unknown: Linker sequence
AAGVTGTA

SEQ ID NO: 2109 - protein, 9 aa, Unknown
  Description of Unknown: Linker sequence
QVGANDGET

SEQ ID NO: 2110 - protein, 11 aa, Unknown
  Description of Unknown: Linker sequence
TADDGTSKTAL

SEQ ID NO: 2111 - protein, 21 aa, Unknown
  Description of Unknown: Linker sequence
LKQINSQTLGLDTLNVQQKYK

SEQ ID NO: 2112 - protein, 23 aa, Unknown
  Description of Unknown: Linker sequence
AEGHNFKAQPDLAEAAATTTENP

SEQ ID NO: 2113 - protein, 4 aa, Unknown
  Description of Unknown: Linker sequence
AGAR

SEQ ID NO: 2114 - protein, 5 aa, Unknown
  Description of Unknown: Linker sequence
AEALL

SEQ ID NO: 2115 - protein, 6 aa, Unknown
  Description of Unknown: Linker sequence
AWPEEV

SEQ ID NO: 2116 - protein, 6 aa, Unknown
  Description of Unknown: Linker sequence
NRGVEA

SEQ ID NO: 2117 - protein, 8 aa, Unknown
  Description of Unknown: Linker sequence
EALPLPFA

SEQ ID NO: 2118 - protein, 8 aa, Unknown
  Description of Unknown: Linker sequence
RGVDPLGQ

SEQ ID NO: 2119 - protein, 9 aa, Unknown
  Description of Unknown: Linker sequence
LEVTPNRPD

SEQ ID NO: 2120 - protein, 9 aa, Unknown
  Description of Unknown: Linker sequence
VEDPEGAPH

SEQ ID NO: 2121 - protein, 10 aa, Unknown
  Description of Unknown: Linker sequence
AGSPKPPEAI

SEQ ID NO: 2122 - protein, 10 aa, Unknown
  Description of Unknown: Linker sequence
FGLRVAPSPL

SEQ ID NO: 2123 - protein, 13 aa, Unknown
  Description of Unknown: Linker sequence
TIPLALPAFFPAP

SEQ ID NO: 2124 - protein, 14 aa, Unknown
  Description of Unknown: Linker sequence
LGYALVEPEAALKA

SEQ ID NO: 2125 - protein, 19 aa, Unknown
  Description of Unknown: Linker sequence
LPLPDKPLAFQDPSRHPAA

SEQ ID NO: 2126 - protein, 5 aa, Unknown
  Description of Unknown: Linker sequence
GLQSA

SEQ ID NO: 2127 - protein, 6 aa, Unknown
  Description of Unknown: Linker sequence
HGELTR

SEQ ID NO: 2128 - protein, 7 aa, Unknown
  Description of Unknown: Linker sequence
LKDKQLN

SEQ ID NO: 2129 - protein, 5 aa, Unknown
  Description of Unknown: Linker sequence
FYPQY

SEQ ID NO: 2130 - protein, 7 aa, Unknown
  Description of Unknown: Linker sequence
DFHYDEK

SEQ ID NO: 2131 - protein, 10 aa, Unknown
  Description of Unknown: Linker sequence
DYLLDFSAVY

SEQ ID NO: 2132 - protein, 10 aa, Unknown
  Description of Unknown: Linker sequence
PLDVTNRPRT

SEQ ID NO: 2133 - protein, 17 aa, Unknown
  Description of Unknown: Linker sequence
NGEYSLKSAVKLPNVLS

SEQ ID NO: 2134 - protein, 6 aa, Unknown
  Description of Unknown: Linker sequence
DRRAGL

SEQ ID NO: 2135 - protein, 7 aa, Unknown
  Description of Unknown: Linker sequence
FLASMDE

SEQ ID NO: 2136 - protein, 8 aa, Unknown
  Description of Unknown: Linker sequence
IMRETINV

SEQ ID NO: 2137 - protein, 11 aa, Unknown
  Description of Unknown: Linker sequence
RFPNARTSYTM

SEQ ID NO: 2138 - protein, 6 aa, Unknown
  Description of Unknown: Linker sequence
SDPAKV

SEQ ID NO: 2139 - protein, 11 aa, Unknown
  Description of Unknown: Linker sequence
TSNGASCMPSM

SEQ ID NO: 2140 - protein, 12 aa, Unknown
  Description of Unknown: Linker sequence
AGSAPAEPTGDV

SEQ ID NO: 2141 - protein, 7 aa, Unknown
  Description of Unknown: Linker sequence
MRVKNDF

SEQ ID NO: 2142 - protein, 14 aa, Unknown
  Description of Unknown: Linker sequence
YEGKDVHIKEDERY

SEQ ID NO: 2143 - protein, 15 aa, Unknown
  Description of Unknown: Linker sequence
LGLKIIDLSAIQDEV

SEQ ID NO: 2144 - protein, 5 aa, Unknown
  Description of Unknown: Linker sequence
LEPSR

SEQ ID NO: 2145 - protein, 6 aa, Unknown
  Description of Unknown: Linker sequence
CSNVAA

SEQ ID NO: 2146 - protein, 8 aa, Unknown
  Description of Unknown: Linker sequence
QKVTINPV

SEQ ID NO: 2147 - protein, 11 aa, Unknown
  Description of Unknown: Linker sequence
ALPPGAAKQQL

SEQ ID NO: 2148 - protein, 11 aa, Unknown
  Description of Unknown: Linker sequence
ALRRGTAGSVT

SEQ ID NO: 2149 - protein, 16 aa, Unknown
  Description of Unknown: Linker sequence
ESFGATNTNARENTPF

SEQ ID NO: 2150 - protein, 4 aa, Unknown
  Description of Unknown: Linker sequence
DCDY

SEQ ID NO: 2151 - protein, 4 aa, Unknown
  Description of Unknown: Linker sequence
DWSD

SEQ ID NO: 2152 - protein, 4 aa, Unknown
  Description of Unknown: Linker sequence
FAGQ

SEQ ID NO: 2153 - protein, 4 aa, Unknown
  Description of Unknown: Linker sequence
HEGV

SEQ ID NO: 2154 - protein, 4 aa, Unknown
  Description of Unknown: Linker sequence
RDGE

SEQ ID NO: 2155 - protein, 4 aa, Unknown
  Description of Unknown: Linker sequence
SATR

SEQ ID NO: 2156 - protein, 4 aa, Unknown
  Description of Unknown: Linker sequence
SIPA

SEQ ID NO: 2157 - protein, 4 aa, Unknown
  Description of Unknown: Linker sequence
VYGQ

SEQ ID NO: 2158 - protein, 5 aa, Unknown
  Description of Unknown: Linker sequence
ACGAT

SEQ ID NO: 2159 - protein, 5 aa, Unknown
  Description of Unknown: Linker sequence
VYQAA

SEQ ID NO: 2160 - protein, 6 aa, Unknown
  Description of Unknown: Linker sequence
EAGVDR

SEQ ID NO: 2161 - protein, 6 aa, Unknown
  Description of Unknown: Linker sequence
SGGKTV

SEQ ID NO: 2162 - protein, 7 aa, Unknown
  Description of Unknown: Linker sequence
VPLSEKV

SEQ ID NO: 2163 - protein, 8 aa, Unknown
  Description of Unknown: Linker sequence
ANHPRGFA

SEQ ID NO: 2164 - protein, 9 aa, Unknown
  Description of Unknown: Linker sequence
HDLQGERPY

SEQ ID NO: 2165 - protein, 10 aa, Unknown
  Description of Unknown: Linker sequence
GCDGFHGISR

SEQ ID NO: 2166 - protein, 11 aa, Unknown
  Description of Unknown: Linker sequence
ADTPPVSHELI

SEQ ID NO: 2167 - protein, 4 aa, Unknown
  Description of Unknown: Linker sequence
GHRQ

SEQ ID NO: 2168 - protein, 4 aa, Unknown
  Description of Unknown: Linker sequence
LTGA

SEQ ID NO: 2169 - protein, 6 aa, Unknown
  Description of Unknown: Linker sequence
ALPSEL

SEQ ID NO: 2170 - protein, 6 aa, Unknown
  Description of Unknown: Linker sequence
RAGGSI

SEQ ID NO: 2171 - protein, 6 aa, Unknown
  Description of Unknown: Linker sequence
VSADNV

SEQ ID NO: 2172 - protein, 11 aa, Unknown
  Description of Unknown: Linker sequence
HTQTDTSSPDP

SEQ ID NO: 2173 - protein, 12 aa, Unknown
  Description of Unknown: Linker sequence
LKREKQDESCSL

SEQ ID NO: 2174 - protein, 13 aa, Unknown
  Description of Unknown: Linker sequence
FNPLKTGVCQLDN

SEQ ID NO: 2175 - protein, 4 aa, Unknown
  Description of Unknown: Linker sequence
ALGI

SEQ ID NO: 2176 - protein, 4 aa, Unknown
  Description of Unknown: Linker sequence
KDGV

SEQ ID NO: 2177 - protein, 4 aa, Unknown
  Description of Unknown: Linker sequence
NLRS

SEQ ID NO: 2178 - protein, 6 aa, Unknown
  Description of Unknown: Linker sequence
EIPKPS

SEQ ID NO: 2179 - protein, 7 aa, Unknown
  Description of Unknown: Linker sequence
EKMVEPQ

SEQ ID NO: 2180 - protein, 10 aa, Unknown
  Description of Unknown: Linker sequence
KSKVYTRTPT

SEQ ID NO: 2181 - protein, 6 aa, Unknown
  Description of Unknown: Linker sequence
ELVPKP

SEQ ID NO: 2182 - protein, 6 aa, Unknown
  Description of Unknown: Linker sequence
FGFPGG

SEQ ID NO: 2183 - protein, 6 aa, Unknown
  Description of Unknown: Linker sequence
LRNLDE

SEQ ID NO: 2184 - protein, 7 aa, Unknown
  Description of Unknown: Linker sequence
FSNKKSW

SEQ ID NO: 2185 - protein, 7 aa, Unknown
  Description of Unknown: Linker sequence
LFEKNDF

SEQ ID NO: 2186 - protein, 7 aa, Unknown
  Description of Unknown: Linker sequence
LYPNACS

SEQ ID NO: 2187 - protein, 7 aa, Unknown
  Description of Unknown: Linker sequence
RRAVYAN

SEQ ID NO: 2188 - protein, 7 aa, Unknown
  Description of Unknown: Linker sequence
RSHRMPV

SEQ ID NO: 2189 - protein, 8 aa, Unknown
  Description of Unknown: Linker sequence
EWNWPQPV

SEQ ID NO: 2190 - protein, 16 aa, Unknown
  Description of Unknown: Linker sequence
ITPAYPSMCATHNITE

SEQ ID NO: 2191 - protein, 16 aa, Unknown
  Description of Unknown: Linker sequence
RLDQPQVPLSLTLSDK

SEQ ID NO: 2192 - protein, 21 aa, Unknown
  Description of Unknown: Linker sequence
ILKPIEDGPLQVRVWNPKIYA

SEQ ID NO: 2193 - protein, 16 aa, Unknown
  Description of Unknown: Linker sequence
ISSSMTNSTAASRPPV

SEQ ID NO: 2194 - protein, 5 aa, Unknown
  Description of Unknown: Linker sequence
ELVTV

SEQ ID NO: 2195 - protein, 11 aa, Unknown
  Description of Unknown: Linker sequence
HDDLWQTLPDP

SEQ ID NO: 2196 - protein, 4 aa, Unknown
  Description of Unknown: Linker sequence
QGTN

SEQ ID NO: 2197 - protein, 16 aa, Unknown
  Description of Unknown: Linker sequence
NVYPELRVPDHQDIAF

SEQ ID NO: 2198 - protein, 6 aa, Unknown
  Description of Unknown: Linker sequence
QLSVNQ

SEQ ID NO: 2199 - protein, 8 aa, Unknown
  Description of Unknown: Linker sequence
DKAQFRNG

SEQ ID NO: 2200 - protein, 13 aa, Unknown
  Description of Unknown: Linker sequence
ENPYRPVTFDYLM

SEQ ID NO: 2201 - protein, 27 aa, Unknown
  Description of Unknown: Linker sequence
DYGNSPLHRFKKPGSKNFQNIFPPSAT

SEQ ID NO: 2202 - protein, 10 aa, Unknown
  Description of Unknown: Linker sequence
FKPLPAQESE

SEQ ID NO: 2203 - protein, 7 aa, Unknown
  Description of Unknown: Linker sequence
KAAGLEM

SEQ ID NO: 2204 - protein, 8 aa, Unknown
  Description of Unknown: Linker sequence
EIPPQAII

SEQ ID NO: 2205 - protein, 27 aa, Unknown
  Description of Unknown: Linker sequence
ESGEPSSLPRPATHWPFKTAFQHHYLV

SEQ ID NO: 2206 - protein, 8 aa, Unknown
  Description of Unknown: Linker sequence
EVHYARPI

SEQ ID NO: 2207 - protein, 25 aa, Unknown
  Description of Unknown: Linker sequence
WSRLKAKDWGSSSGSQGREDSVLSY

SEQ ID NO: 2208 - protein, 4 aa, Unknown
  Description of Unknown: Linker sequence
LGTA

SEQ ID NO: 2209 - protein, 5 aa, Unknown
  Description of Unknown: Linker sequence
LGRRF

SEQ ID NO: 2210 - protein, 6 aa, Unknown
  Description of Unknown: Linker sequence
ANTDNT

SEQ ID NO: 2211 - protein, 6 aa, Unknown
  Description of Unknown: Linker sequence
KRTIPA

SEQ ID NO: 2212 - protein, 7 aa, Unknown
  Description of Unknown: Linker sequence
AIDDSNI

SEQ ID NO: 2213 - protein, 7 aa, Unknown
  Description of Unknown: Linker sequence
PLTKTDV

SEQ ID NO: 2214 - protein, 8 aa, Unknown
  Description of Unknown: Linker sequence
NYLVSDGI

SEQ ID NO: 2215 - protein, 9 aa, Unknown
  Description of Unknown: Linker sequence
LLDDEGFNW

SEQ ID NO: 2216 - protein, 4 aa, Unknown
  Description of Unknown: Linker sequence
TKAE

SEQ ID NO: 2217 - protein, 4 aa, Unknown
  Description of Unknown: Linker sequence
TVAV

SEQ ID NO: 2218 - protein, 4 aa, Unknown
  Description of Unknown: Linker sequence
YRTM

SEQ ID NO: 2219 - protein, 5 aa, Unknown
  Description of Unknown: Linker sequence
ARTPL

SEQ ID NO: 2220 - protein, 5 aa, Unknown
  Description of Unknown: Linker sequence
DRPDL

SEQ ID NO: 2221 - protein, 5 aa, Unknown
  Description of Unknown: Linker sequence
TGTAK

SEQ ID NO: 2222 - protein, 5 aa, Unknown
  Description of Unknown: Linker sequence
VAMQK

SEQ ID NO: 2223 - protein, 5 aa, Unknown
  Description of Unknown: Linker sequence
YNMQV

SEQ ID NO: 2224 - protein, 6 aa, Unknown
  Description of Unknown: Linker sequence
FRMYEK

SEQ ID NO: 2225 - protein, 6 aa, Unknown
  Description of Unknown: Linker sequence
QAAKST

SEQ ID NO: 2226 - protein, 7 aa, Unknown
  Description of Unknown: Linker sequence
YMTGQPV

SEQ ID NO: 2227 - protein, 8 aa, Unknown
  Description of Unknown: Linker sequence
VVEDGQVV

SEQ ID NO: 2228 - protein, 10 aa, Unknown
  Description of Unknown: Linker sequence
KEGLEIQNES

SEQ ID NO: 2229 - protein, 11 aa, Unknown
  Description of Unknown: Linker sequence
AFGIDNLFDVK

SEQ ID NO: 2230 - protein, 11 aa, Unknown
  Description of Unknown: Linker sequence
TIPTNRPVVRD

SEQ ID NO: 2231 - protein, 15 aa, Unknown
  Description of Unknown: Linker sequence
VDSFTGRLMKGRRYS

SEQ ID NO: 2232 - protein, 24 aa, Unknown
  Description of Unknown: Linker sequence
VRTLKAEKDYTYDIKTKAVQLTEE

SEQ ID NO: 2233 - protein, 12 aa, Unknown
  Description of Unknown: Linker sequence
DLPPLEEGRYYY

SEQ ID NO: 2234 - protein, 18 aa, Unknown
  Description of Unknown: Linker sequence
HGTALEHRRVVSPYGHRF

SEQ ID NO: 2235 - protein, 7 aa, Unknown
  Description of Unknown: Linker sequence
AEANVEY

SEQ ID NO: 2236 - protein, 9 aa, Unknown
  Description of Unknown: Linker sequence
IPLVTGPGV

SEQ ID NO: 2237 - protein, 4 aa, Unknown
  Description of Unknown: Linker sequence
INDV

SEQ ID NO: 2238 - protein, 4 aa, Unknown
  Description of Unknown: Linker sequence
KARL

SEQ ID NO: 2239 - protein, 5 aa, Unknown
  Description of Unknown: Linker sequence
HPEHG

SEQ ID NO: 2240 - protein, 5 aa, Unknown
  Description of Unknown: Linker sequence
YIGKP

SEQ ID NO: 2241 - protein, 7 aa, Unknown
  Description of Unknown: Linker sequence
YGYRRLR

SEQ ID NO: 2242 - protein, 8 aa, Unknown
  Description of Unknown: Linker sequence
EYLKRPLI

SEQ ID NO: 2243 - protein, 8 aa, Unknown
  Description of Unknown: Linker sequence
FADLPRKY

SEQ ID NO: 2244 - protein, 8 aa, Unknown
  Description of Unknown: Linker sequence
SGLQDVAH

SEQ ID NO: 2245 - protein, 13 aa, Unknown
  Description of Unknown: Linker sequence
VGGGLSTNPMLAQ

SEQ ID NO: 2246 - protein, 15 aa, Unknown
  Description of Unknown: Linker sequence
DDVGLQTTEACGDCP

SEQ ID NO: 2247 - protein, 16 aa, Unknown
  Description of Unknown: Linker sequence
DGPAPEPVKHPIDHVG

SEQ ID NO: 2248 - protein, 16 aa, Unknown
  Description of Unknown: Linker sequence
GSPLAGESLDEVLDPT

SEQ ID NO: 2249 - protein, 4 aa, Unknown
  Description of Unknown: Linker sequence
EVRE

SEQ ID NO: 2250 - protein, 4 aa, Unknown
  Description of Unknown: Linker sequence
HGEV

SEQ ID NO: 2251 - protein, 4 aa, Unknown
  Description of Unknown: Linker sequence
KLPP

SEQ ID NO: 2252 - protein, 6 aa, Unknown
  Description of Unknown: Linker sequence
FGREGN

SEQ ID NO: 2253 - protein, 6 aa, Unknown
  Description of Unknown: Linker sequence
LGKGSS

SEQ ID NO: 2254 - protein, 6 aa, Unknown
  Description of Unknown: Linker sequence
PFPKDV

SEQ ID NO: 2255 - protein, 6 aa, Unknown
  Description of Unknown: Linker sequence
SEHFGE

SEQ ID NO: 2256 - protein, 6 aa, Unknown
  Description of Unknown: Linker sequence
YTGVRR

SEQ ID NO: 2257 - protein, 7 aa, Unknown
  Description of Unknown: Linker sequence
DTHTLDY

SEQ ID NO: 2258 - protein, 8 aa, Unknown
  Description of Unknown: Linker sequence
ESDYEVGG

SEQ ID NO: 2259 - protein, 11 aa, Unknown
  Description of Unknown: Linker sequence
GNLPLGAGLSS

SEQ ID NO: 2260 - protein, 13 aa, Unknown
  Description of Unknown: Linker sequence
FSLNDLRKENSWI

SEQ ID NO: 2261 - protein, 9 aa, Unknown
  Description of Unknown: Linker sequence
EHGLAPPDR

SEQ ID NO: 2262 - protein, 12 aa, Unknown
  Description of Unknown: Linker sequence
AYPQTPLLPRDP

SEQ ID NO: 2263 - protein, 5 aa, Unknown
  Description of Unknown: Linker sequence
QFATV

SEQ ID NO: 2264 - protein, 4 aa, Unknown
  Description of Unknown: Linker sequence
LLTA

SEQ ID NO: 2265 - protein, 6 aa, Unknown
  Description of Unknown: Linker sequence
ARHPLL

SEQ ID NO: 2266 - protein, 6 aa, Unknown
  Description of Unknown: Linker sequence
LGGLEV

SEQ ID NO: 2267 - protein, 6 aa, Unknown
  Description of Unknown: Linker sequence
WTEGWE

SEQ ID NO: 2268 - protein, 7 aa, Unknown
  Description of Unknown: Linker sequence
YDEGLTS

SEQ ID NO: 2269 - protein, 8 aa, Unknown
  Description of Unknown: Linker sequence
TLGLRSPV

SEQ ID NO: 2270 - protein, 14 aa, Unknown
  Description of Unknown: Linker sequence
HLDLSAPKLRLREE

SEQ ID NO: 2271 - protein, 21 aa, Unknown
  Description of Unknown: Linker sequence
YATEKEEPKPERTEVVAKLRR

SEQ ID NO: 2272 - protein, 6 aa, Unknown
  Description of Unknown: Linker sequence
ELGVSL

SEQ ID NO: 2273 - protein, 6 aa, Unknown
  Description of Unknown: Linker sequence
MSSKGT

SEQ ID NO: 2274 - protein, 7 aa, Unknown
  Description of Unknown: Linker sequence
LKLGRAF

SEQ ID NO: 2275 - protein, 8 aa, Unknown
  Description of Unknown: Linker sequence
GFNIEKFP

SEQ ID NO: 2276 - protein, 15 aa, Unknown
  Description of Unknown: Linker sequence
TAPLPGYNTEFASGI

SEQ ID NO: 2277 - protein, 22 aa, Unknown
  Description of Unknown: Linker sequence
CFRNEVGLPDSSKTEKVTSETV

SEQ ID NO: 2278 - protein, 4 aa, Unknown
  Description of Unknown: Linker sequence
KSRT

SEQ ID NO: 2279 - protein, 5 aa, Unknown
  Description of Unknown: Linker sequence
DRAGA

SEQ ID NO: 2280 - protein, 5 aa, Unknown
  Description of Unknown: Linker sequence
FYVSA

SEQ ID NO: 2281 - protein, 5 aa, Unknown
  Description of Unknown: Linker sequence
IATGG

SEQ ID NO: 2282 - protein, 5 aa, Unknown
  Description of Unknown: Linker sequence
IGGGT

SEQ ID NO: 2283 - protein, 5 aa, Unknown
  Description of Unknown: Linker sequence
LFRKI

SEQ ID NO: 2284 - protein, 5 aa, Unknown
  Description of Unknown: Linker sequence
PRSLS

SEQ ID NO: 2285 - protein, 5 aa, Unknown
  Description of Unknown: Linker sequence
TGKKV

SEQ ID NO: 2286 - protein, 6 aa, Unknown
  Description of Unknown: Linker sequence
DVRGNM

SEQ ID NO: 2287 - protein, 6 aa, Unknown
  Description of Unknown: Linker sequence
LNDGSQ

SEQ ID NO: 2288 - protein, 6 aa, Unknown
  Description of Unknown: Linker sequence
NIENGG

SEQ ID NO: 2289 - protein, 6 aa, Unknown
  Description of Unknown: Linker sequence
RDPGAR

SEQ ID NO: 2290 - protein, 6 aa, Unknown
  Description of Unknown: Linker sequence
SREVKS

SEQ ID NO: 2291 - protein, 7 aa, Unknown
  Description of Unknown: Linker sequence
RQWNGKE

SEQ ID NO: 2292 - protein, 7 aa, Unknown
  Description of Unknown: Linker sequence
SIYFQPP

SEQ ID NO: 2293 - protein, 8 aa, Unknown
  Description of Unknown: Linker sequence
VPQIRAPS

SEQ ID NO: 2294 - protein, 8 aa, Unknown
  Description of Unknown: Linker sequence
WFSDDPNV

SEQ ID NO: 2295 - protein, 11 aa, Unknown
  Description of Unknown: Linker sequence
SEDPELPYMRP

SEQ ID NO: 2296 - protein, 8 aa, Unknown
  Description of Unknown: Linker sequence
AFDGPFDE

SEQ ID NO: 2297 - protein, 6 aa, Unknown
  Description of Unknown: Linker sequence
HGDDRG

SEQ ID NO: 2298 - protein, 5 aa, Unknown
  Description of Unknown: Linker sequence
LRPSP

SEQ ID NO: 2299 - protein, 4 aa, Unknown
  Description of Unknown: Linker sequence
LNVA

SEQ ID NO: 2300 - protein, 6 aa, Unknown
  Description of Unknown: Linker sequence
LSTSQK

SEQ ID NO: 2301 - protein, 21 aa, Unknown
  Description of Unknown: Linker sequence
GAADIGLGYPNGNQGWGRVTL

SEQ ID NO: 2302 - protein, 4 aa, Unknown
  Description of Unknown: Linker sequence
YIGI

SEQ ID NO: 2303 - protein, 7 aa, Unknown
  Description of Unknown: Linker sequence
DGRVIRG

SEQ ID NO: 2304 - protein, 17 aa, Unknown
  Description of Unknown: Linker sequence
TLSFDKSNDGETPEGIG

SEQ ID NO: 2305 - protein, 18 aa, Unknown
  Description of Unknown: Linker sequence
EIAPLHAQGGGIDQLQGI

SEQ ID NO: 2306 - protein, 4 aa, Unknown
  Description of Unknown: Linker sequence
ANNG

SEQ ID NO: 2307 - protein, 4 aa, Unknown
  Description of Unknown: Linker sequence
ESNL

SEQ ID NO: 2308 - protein, 4 aa, Unknown
  Description of Unknown: Linker sequence
KISA

SEQ ID NO: 2309 - protein, 4 aa, Unknown
  Description of Unknown: Linker sequence
MDSA

SEQ ID NO: 2310 - protein, 4 aa, Unknown
  Description of Unknown: Linker sequence
MMTP

SEQ ID NO: 2311 - protein, 4 aa, Unknown
  Description of Unknown: Linker sequence
VGGI

SEQ ID NO: 2312 - protein, 5 aa, Unknown
  Description of Unknown: Linker sequence
YTQRL

SEQ ID NO: 2313 - protein, 6 aa, Unknown
  Description of Unknown: Linker sequence
AEKGKA

SEQ ID NO: 2314 - protein, 6 aa, Unknown
  Description of Unknown: Linker sequence
MIRVPV

SEQ ID NO: 2315 - protein, 7 aa, Unknown
  Description of Unknown: Linker sequence
SYTATED

SEQ ID NO: 2316 - protein, 8 aa, Unknown
  Description of Unknown: Linker sequence
ETINPAHP

SEQ ID NO: 2317 - protein, 8 aa, Unknown
  Description of Unknown: Linker sequence
SKFSGGNL

SEQ ID NO: 2318 - protein, 8 aa, Unknown
  Description of Unknown: Linker sequence
TAYFVDAP

SEQ ID NO: 2319 - protein, 9 aa, Unknown
  Description of Unknown: Linker sequence
ISPKEPHNK

SEQ ID NO: 2320 - protein, 9 aa, Unknown
  Description of Unknown: Linker sequence
LSDKPGNPV

SEQ ID NO: 2321 - protein, 9 aa, Unknown
  Description of Unknown: Linker sequence
RYPSITRDM

SEQ ID NO: 2322 - protein, 10 aa, Unknown
  Description of Unknown: Linker sequence
MLSQVPYFSR

SEQ ID NO: 2323 - protein, 11 aa, Unknown
  Description of Unknown: Linker sequence
APSRYFASEPK

SEQ ID NO: 2324 - protein, 14 aa, Unknown
  Description of Unknown: Linker sequence
HTLDAVNIADRYDA

SEQ ID NO: 2325 - protein, 31 aa, Unknown
  Description of Unknown: Linker sequence
ADIALSLPELNPYIPDDFSLIKSEKKYDHPE

SEQ ID NO: 2326 - protein, 7 aa, Unknown
  Description of Unknown: Linker sequence
DVQPMQY

SEQ ID NO: 2327 - protein, 11 aa, Unknown
  Description of Unknown: Linker sequence
HMSPSWTLLKL

SEQ ID NO: 2328 - protein, 8 aa, Unknown
  Description of Unknown: Linker sequence
LEMVSKPM

SEQ ID NO: 2329 - protein, 51 aa, Unknown
  Description of Unknown: Linker sequence
YGPKGKGKGMGAGTLSTDKGESLGIKYEEGQSHRPTNPNASRMAQKVGGSD

SEQ ID NO: 2330 - protein, 5 aa, Unknown
  Description of Unknown: Linker sequence
VGQSL

SEQ ID NO: 2331 - protein, 6 aa, Unknown
  Description of Unknown: Linker sequence
VSRSST

SEQ ID NO: 2332 - protein, 12 aa, Unknown
  Description of Unknown: Linker sequence
ERNDVAPNKPDE

SEQ ID NO: 2333 - protein, 12 aa, Unknown
  Description of Unknown: Linker sequence
TETAAAADPGLS

SEQ ID NO: 2334 - protein, 14 aa, Unknown
  Description of Unknown: Linker sequence
VAESDRPELTSARR

SEQ ID NO: 2335 - protein, 4 aa, Unknown
  Description of Unknown: Linker sequence
PFYP

SEQ ID NO: 2336 - protein, 6 aa, Unknown
  Description of Unknown: Linker sequence
GVSEKP

SEQ ID NO: 2337 - protein, 9 aa, Unknown
  Description of Unknown: Linker sequence
LGMGDVASL

SEQ ID NO: 2338 - protein, 15 aa, Unknown
  Description of Unknown: Linker sequence
ALGGEARLPVLKDRN

SEQ ID NO: 2339 - protein, 17 aa, Unknown
  Description of Unknown: Linker sequence
AAGLEAEAPKSAKELSL

SEQ ID NO: 2340 - protein, 4 aa, Unknown
  Description of Unknown: Linker sequence
KGRF

SEQ ID NO: 2341 - protein, 5 aa, Unknown
  Description of Unknown: Linker sequence
KAGSL

SEQ ID NO: 2342 - protein, 6 aa, Unknown
  Description of Unknown: Linker sequence
NTGIFI

SEQ ID NO: 2343 - protein, 6 aa, Unknown
  Description of Unknown: Linker sequence
QLVKSE

SEQ ID NO: 2344 - protein, 7 aa, Unknown
  Description of Unknown: Linker sequence
KLKYVPH

SEQ ID NO: 2345 - protein, 7 aa, Unknown
  Description of Unknown: Linker sequence
LGFDEVI

SEQ ID NO: 2346 - protein, 9 aa, Unknown
  Description of Unknown: Linker sequence
MLATNLTDK

SEQ ID NO: 2347 - protein, 16 aa, Unknown
  Description of Unknown: Linker sequence
LKDHILQFVIPNRGVT

SEQ ID NO: 2348 - protein, 17 aa, Unknown
  Description of Unknown: Linker sequence
RAKGSTKFTRVPKRVYW

SEQ ID NO: 2349 - protein, 5 aa, Unknown
  Description of Unknown: Linker sequence
FQKLM

SEQ ID NO: 2350 - protein, 6 aa, Unknown
  Description of Unknown: Linker sequence
NAPTPQ

SEQ ID NO: 2351 - protein, 8 aa, Unknown
  Description of Unknown: Linker sequence
EFKEGEDA

SEQ ID NO: 2352 - protein, 6 aa, Unknown
  Description of Unknown: Linker sequence
AGTLLP

SEQ ID NO: 2353 - protein, 6 aa, Unknown
  Description of Unknown: Linker sequence
LAPYKV

SEQ ID NO: 2354 - protein, 7 aa, Unknown
  Description of Unknown: Linker sequence
ESIKDDK

SEQ ID NO: 2355 - protein, 7 aa, Unknown
  Description of Unknown: Linker sequence
FHDKPEI

SEQ ID NO: 2356 - protein, 8 aa, Unknown
  Description of Unknown: Linker sequence
ITTPKDDE

SEQ ID NO: 2357 - protein, 9 aa, Unknown
  Description of Unknown: Linker sequence
HDITPSMTP

SEQ ID NO: 2358 - protein, 10 aa, Unknown
  Description of Unknown: Linker sequence
AEATVAPVSP

SEQ ID NO: 2359 - protein, 11 aa, Unknown
  Description of Unknown: Linker sequence
IDALADKYEPS

SEQ ID NO: 2360 - protein, 4 aa, Unknown
  Description of Unknown: Linker sequence
FYGK

SEQ ID NO: 2361 - protein, 8 aa, Unknown
  Description of Unknown: Linker sequence
ALSNTGEI

SEQ ID NO: 2362 - protein, 15 aa, Unknown
  Description of Unknown: Linker sequence
TATPPGSVTVPHPNI

SEQ ID NO: 2363 - protein, 19 aa, Unknown
  Description of Unknown: Linker sequence
RSPVFTDNSSPPAVPQSFQ

SEQ ID NO: 2364 - protein, 8 aa, Unknown
  Description of Unknown: Linker sequence
IRNIDQDV

SEQ ID NO: 2365 - protein, 8 aa, Unknown
  Description of Unknown: Linker sequence
REETNLMD

SEQ ID NO: 2366 - protein, 6 aa, Unknown
  Description of Unknown: Linker sequence
HALPLV

SEQ ID NO: 2367 - protein, 6 aa, Unknown
  Description of Unknown: Linker sequence
EGRSKK

SEQ ID NO: 2368 - protein, 27 aa, Unknown
  Description of Unknown: Linker sequence
NKEKKAVSPLLLTTTNSSEGLSMGNYI

SEQ ID NO: 2369 - protein, 7 aa, Unknown
  Description of Unknown: Linker sequence
DLASGQI

SEQ ID NO: 2370 - protein, 7 aa, Unknown
  Description of Unknown: Linker sequence
TLANGAV

SEQ ID NO: 2371 - protein, 8 aa, Unknown
  Description of Unknown: Linker sequence
DYDGYNQF

SEQ ID NO: 2372 - protein, 9 aa, Unknown
  Description of Unknown: Linker sequence
DTGGAPGTV

SEQ ID NO: 2373 - protein, 9 aa, Unknown
  Description of Unknown: Linker sequence
QTNGGQFPY

SEQ ID NO: 2374 - protein, 10 aa, Unknown
  Description of Unknown: Linker sequence
TGIKGAFRTR

SEQ ID NO: 2375 - protein, 5 aa, Unknown
  Description of Unknown: Linker sequence
SLPAR

SEQ ID NO: 2376 - protein, 4 aa, Unknown
  Description of Unknown: Linker sequence
IYPD

SEQ ID NO: 2377 - protein, 4 aa, Unknown
  Description of Unknown: Linker sequence
KCAV

SEQ ID NO: 2378 - protein, 4 aa, Unknown
  Description of Unknown: Linker sequence
MAPK

SEQ ID NO: 2379 - protein, 4 aa, Unknown
  Description of Unknown: Linker sequence
TESL

SEQ ID NO: 2380 - protein, 5 aa, Unknown
  Description of Unknown: Linker sequence
ASADQ

SEQ ID NO: 2381 - protein, 10 aa, Unknown
  Description of Unknown: Linker sequence
YTLRQPPPAT

SEQ ID NO: 2382 - protein, 11 aa, Unknown
  Description of Unknown: Linker sequence
DQSDPNDPKSR

SEQ ID NO: 2383 - protein, 24 aa, Unknown
  Description of Unknown: Linker sequence
SLHDMADEAGLPVQTEDGEATGTI

SEQ ID NO: 2384 - protein, 5 aa, Unknown
  Description of Unknown: Linker sequence
DGIEE

SEQ ID NO: 2385 - protein, 6 aa, Unknown
  Description of Unknown: Linker sequence
VEHLPK

SEQ ID NO: 2386 - protein, 4 aa, Unknown
  Description of Unknown: Linker sequence
QAHS

SEQ ID NO: 2387 - protein, 7 aa, Unknown
  Description of Unknown: Linker sequence
AKEAFVS

SEQ ID NO: 2388 - protein, 9 aa, Unknown
  Description of Unknown: Linker sequence
QGILLHRSR

SEQ ID NO: 2389 - protein, 4 aa, Unknown
  Description of Unknown: Linker sequence
ESEY

SEQ ID NO: 2390 - protein, 5 aa, Unknown
  Description of Unknown: Linker sequence
DGPTP

SEQ ID NO: 2391 - protein, 8 aa, Unknown
  Description of Unknown: Linker sequence
VGSEKVSK

SEQ ID NO: 2392 - protein, 4 aa, Unknown
  Description of Unknown: Linker sequence
IGQS

SEQ ID NO: 2393 - protein, 15 aa, Unknown
  Description of Unknown: Linker sequence
VSNINNTVSPSSASF

SEQ ID NO: 2394 - protein, 16 aa, Unknown
  Description of Unknown: Linker sequence
ALPTNARPLLPPISNP

SEQ ID NO: 2395 - protein, 8 aa, Unknown
  Description of Unknown: Linker sequence
VRERPVPR

SEQ ID NO: 2396 - protein, 9 aa, Unknown
  Description of Unknown: Linker sequence
EQADGAVRG

SEQ ID NO: 2397 - protein, 13 aa, Unknown
  Description of Unknown: Linker sequence
ARSGYRPDSGATP

SEQ ID NO: 2398 - protein, 8 aa, Unknown
  Description of Unknown: Linker sequence
PDIDKLGY

SEQ ID NO: 2399 - protein, 5 aa, Unknown
  Description of Unknown: Linker sequence
LGYSM

SEQ ID NO: 2400 - protein, 13 aa, Unknown
  Description of Unknown: Linker sequence
SGVIKKFTAIIDP

SEQ ID NO: 2401 - protein, 6 aa, Unknown
  Description of Unknown: Linker sequence
RTSRQL

SEQ ID NO: 2402 - protein, 4 aa, Unknown
  Description of Unknown: Linker sequence
SGCK

SEQ ID NO: 2403 - protein, 5 aa, Unknown
  Description of Unknown: Linker sequence
VSTGV

SEQ ID NO: 2404 - protein, 10 aa, Unknown
  Description of Unknown: Linker sequence
QALDGDITDM

SEQ ID NO: 2405 - protein, 8 aa, Unknown
  Description of Unknown: Linker sequence
HTAGSIPM

SEQ ID NO: 2406 - protein, 8 aa, Unknown
  Description of Unknown: Linker sequence
WEGHVPHY

SEQ ID NO: 2407 - protein, 9 aa, Unknown
  Description of Unknown: Linker sequence
VEGKREEAL

SEQ ID NO: 2408 - protein, 13 aa, Unknown
  Description of Unknown: Linker sequence
PMQTFSKQREVDF

SEQ ID NO: 2409 - protein, 10 aa, Unknown
  Description of Unknown: Linker sequence
VYFNERINVD

SEQ ID NO: 2410 - protein, 6 aa, Unknown
  Description of Unknown: Linker sequence
SGGPAT

SEQ ID NO: 2411 - protein, 8 aa, Unknown
  Description of Unknown: Linker sequence
YAATSTGR

SEQ ID NO: 2412 - protein, 9 aa, Unknown
  Description of Unknown: Linker sequence
TGGTEAAGG

SEQ ID NO: 2413 - protein, 6 aa, Unknown
  Description of Unknown: Linker sequence
FDPTEF

SEQ ID NO: 2414 - protein, 7 aa, Unknown
  Description of Unknown: Linker sequence
VDLDFNR

SEQ ID NO: 2415 - protein, 10 aa, Unknown
  Description of Unknown: Linker sequence
SNDAGFAMTS

SEQ ID NO: 2416 - protein, 11 aa, Unknown
  Description of Unknown: Linker sequence
NGFDPATGDLS

SEQ ID NO: 2417 - protein, 8 aa, Unknown
  Description of Unknown: Linker sequence
FSQPAPDR

SEQ ID NO: 2418 - protein, 5 aa, Unknown
  Description of Unknown: Linker sequence
CQPNE

SEQ ID NO: 2419 - protein, 5 aa, Unknown
  Description of Unknown: Linker sequence
KGVPC

SEQ ID NO: 2420 - protein, 5 aa, Unknown
  Description of Unknown: Linker sequence
PFITE

SEQ ID NO: 2421 - protein, 6 aa, Unknown
  Description of Unknown: Linker sequence
SIPTCE

SEQ ID NO: 2422 - protein, 6 aa, Unknown
  Description of Unknown: Linker sequence
VEEHNI

SEQ ID NO: 2423 - protein, 7 aa, Unknown
  Description of Unknown: Linker sequence
SNKEVIQ

SEQ ID NO: 2424 - protein, 7 aa, Unknown
  Description of Unknown: Linker sequence
TAKGDTK

SEQ ID NO: 2425 - protein, 9 aa, Unknown
  Description of Unknown: Linker sequence
GRWYPAFAD

SEQ ID NO: 2426 - protein, 16 aa, Unknown
  Description of Unknown: Linker sequence
IFYDFLHVNVIPTVSF

SEQ ID NO: 2427 - protein, 5 aa, Unknown
  Description of Unknown: Linker sequence
PGPAS

SEQ ID NO: 2428 - protein, 7 aa, Unknown
  Description of Unknown: Linker sequence
KVSKKTG

SEQ ID NO: 2429 - protein, 8 aa, Unknown
  Description of Unknown: Linker sequence
ACNIASMP

SEQ ID NO: 2430 - protein, 8 aa, Unknown
  Description of Unknown: Linker sequence
FNDEASDE

SEQ ID NO: 2431 - protein, 18 aa, Unknown
  Description of Unknown: Linker sequence
SLNAGELKKAAPADPSAP

SEQ ID NO: 2432 - protein, 10 aa, Unknown
  Description of Unknown: Linker sequence
DKYYMASPDL

SEQ ID NO: 2433 - protein, 10 aa, Unknown
  Description of Unknown: Linker sequence
NATNATQPIH

SEQ ID NO: 2434 - protein, 4 aa, Unknown
  Description of Unknown: Linker sequence
EFPP

SEQ ID NO: 2435 - protein, 9 aa, Unknown
  Description of Unknown: Linker sequence
ENELMYGVP

SEQ ID NO: 2436 - protein, 13 aa, Unknown
  Description of Unknown: Linker sequence
QSKDFLIPIGKAK

SEQ ID NO: 2437 - protein, 4 aa, Unknown
  Description of Unknown: Linker sequence
AGEV

SEQ ID NO: 2438 - protein, 4 aa, Unknown
  Description of Unknown: Linker sequence
LHPT

SEQ ID NO: 2439 - protein, 4 aa, Unknown
  Description of Unknown: Linker sequence
RIEA

SEQ ID NO: 2440 - protein, 4 aa, Unknown
  Description of Unknown: Linker sequence
SPGA

SEQ ID NO: 2441 - protein, 4 aa, Unknown
  Description of Unknown: Linker sequence
YFTA

SEQ ID NO: 2442 - protein, 6 aa, Unknown
  Description of Unknown: Linker sequence
DGSTGK

SEQ ID NO: 2443 - protein, 6 aa, Unknown
  Description of Unknown: Linker sequence
EKGERV

SEQ ID NO: 2444 - protein, 6 aa, Unknown
  Description of Unknown: Linker sequence
KGDIET

SEQ ID NO: 2445 - protein, 7 aa, Unknown
  Description of Unknown: Linker sequence
DEGMITE

SEQ ID NO: 2446 - protein, 7 aa, Unknown
  Description of Unknown: Linker sequence
QEASVSG

SEQ ID NO: 2447 - protein, 4 aa, Unknown
  Description of Unknown: Linker sequence
EAAN

SEQ ID NO: 2448 - protein, 4 aa, Unknown
  Description of Unknown: Linker sequence
RYGL

SEQ ID NO: 2449 - protein, 5 aa, Unknown
  Description of Unknown: Linker sequence
EVLDY

SEQ ID NO: 2450 - protein, 5 aa, Unknown
  Description of Unknown: Linker sequence
RPFVS

SEQ ID NO: 2451 - protein, 5 aa, Unknown
  Description of Unknown: Linker sequence
SLVNQ

SEQ ID NO: 2452 - protein, 5 aa, Unknown
  Description of Unknown: Linker sequence
SMGSS

SEQ ID NO: 2453 - protein, 6 aa, Unknown
  Description of Unknown: Linker sequence
SKEFSP

SEQ ID NO: 2454 - protein, 7 aa, Unknown
  Description of Unknown: Linker sequence
AAKGEKI

SEQ ID NO: 2455 - protein, 7 aa, Unknown
  Description of Unknown: Linker sequence
GAPDAER

SEQ ID NO: 2456 - protein, 7 aa, Unknown
  Description of Unknown: Linker sequence
RGEAMPK

SEQ ID NO: 2457 - protein, 8 aa, Unknown
  Description of Unknown: Linker sequence
SGAKKNHF

SEQ ID NO: 2458 - protein, 8 aa, Unknown
  Description of Unknown: Linker sequence
TGRSYKLF

SEQ ID NO: 2459 - protein, 9 aa, Unknown
  Description of Unknown: Linker sequence
AALPASAKV

SEQ ID NO: 2460 - protein, 9 aa, Unknown
  Description of Unknown: Linker sequence
DGFRTSHEI

SEQ ID NO: 2461 - protein, 10 aa, Unknown
  Description of Unknown: Linker sequence
KSMNPEHPHV

SEQ ID NO: 2462 - protein, 10 aa, Unknown
  Description of Unknown: Linker sequence
RGTAQNPDIY

SEQ ID NO: 2463 - protein, 11 aa, Unknown
  Description of Unknown: Linker sequence
WVPENCIQCNQ

SEQ ID NO: 2464 - protein, 12 aa, Unknown
  Description of Unknown: Linker sequence
DRTKEPGAPGDP

SEQ ID NO: 2465 - protein, 28 aa, Unknown
  Description of Unknown: Linker sequence
TVGIEDDVTGTSLPVDNAFADTTPKGTI

SEQ ID NO: 2466 - protein, 4 aa, Unknown
  Description of Unknown: Linker sequence
AGED

SEQ ID NO: 2467 - protein, 4 aa, Unknown
  Description of Unknown: Linker sequence
DADS

SEQ ID NO: 2468 - protein, 4 aa, Unknown
  Description of Unknown: Linker sequence
DGTV

SEQ ID NO: 2469 - protein, 4 aa, Unknown
  Description of Unknown: Linker sequence
QDGR

SEQ ID NO: 2470 - protein, 5 aa, Unknown
  Description of Unknown: Linker sequence
LGAGE

SEQ ID NO: 2471 - protein, 5 aa, Unknown
  Description of Unknown: Linker sequence
QPGRG

SEQ ID NO: 2472 - protein, 6 aa, Unknown
  Description of Unknown: Linker sequence
DFADGS

SEQ ID NO: 2473 - protein, 6 aa, Unknown
  Description of Unknown: Linker sequence
YDRPDR

SEQ ID NO: 2474 - protein, 7 aa, Unknown
  Description of Unknown: Linker sequence
KADAAPQ

SEQ ID NO: 2475 - protein, 15 aa, Unknown
  Description of Unknown: Linker sequence
PLGEAPDAYADDASG

SEQ ID NO: 2476 - protein, 4 aa, Unknown
  Description of Unknown: Linker sequence
PCFP

SEQ ID NO: 2477 - protein, 7 aa, Unknown
  Description of Unknown: Linker sequence
DLESPVK

SEQ ID NO: 2478 - protein, 7 aa, Unknown
  Description of Unknown: Linker sequence
FLRIQNV

SEQ ID NO: 2479 - protein, 10 aa, Unknown
  Description of Unknown: Linker sequence
LGHPCTRTPH

SEQ ID NO: 2480 - protein, 6 aa, Unknown
  Description of Unknown: Linker sequence
HFPKTF

SEQ ID NO: 2481 - protein, 7 aa, Unknown
  Description of Unknown: Linker sequence
RKLLGVK

SEQ ID NO: 2482 - protein, 7 aa, Unknown
  Description of Unknown: Linker sequence
SATPIPR

SEQ ID NO: 2483 - protein, 8 aa, Unknown
  Description of Unknown: Linker sequence
FYGDLDVT

SEQ ID NO: 2484 - protein, 8 aa, Unknown
  Description of Unknown: Linker sequence
SLPFKLTN

SEQ ID NO: 2485 - protein, 9 aa, Unknown
  Description of Unknown: Linker sequence
CSLKETLPE

SEQ ID NO: 2486 - protein, 9 aa, Unknown
  Description of Unknown: Linker sequence
ISEKPMNRL

SEQ ID NO: 2487 - protein, 9 aa, Unknown
  Description of Unknown: Linker sequence
TMLVPMDRV

SEQ ID NO: 2488 - protein, 10 aa, Unknown
  Description of Unknown: Linker sequence
IYRLTSGISQ

SEQ ID NO: 2489 - protein, 11 aa, Unknown
  Description of Unknown: Linker sequence
HGGIPKKIEGK

SEQ ID NO: 2490 - protein, 12 aa, Unknown
  Description of Unknown: Linker sequence
IDEMPPGRKEVQ

SEQ ID NO: 2491 - protein, 12 aa, Unknown
  Description of Unknown: Linker sequence
TPKEGEYVRRIL

SEQ ID NO: 2492 - protein, 9 aa, Unknown
  Description of Unknown: Linker sequence
KSDYTQNNI

SEQ ID NO: 2493 - protein, 15 aa, Unknown
  Description of Unknown: Linker sequence
EGMGPVLAPVTPVPV

SEQ ID NO: 2494 - protein, 7 aa, Unknown
  Description of Unknown: Linker sequence
MLNQNWH

SEQ ID NO: 2495 - protein, 10 aa, Unknown
  Description of Unknown: Linker sequence
NMTNATDASP

SEQ ID NO: 2496 - protein, 14 aa, Unknown
  Description of Unknown: Linker sequence
LLYDERTTNLTLDE

SEQ ID NO: 2497 - protein, 6 aa, Unknown
  Description of Unknown: Linker sequence
EAGYPG

SEQ ID NO: 2498 - protein, 7 aa, Unknown
  Description of Unknown: Linker sequence
LFDSLSP

SEQ ID NO: 2499 - protein, 7 aa, Unknown
  Description of Unknown: Linker sequence
TREGKST

SEQ ID NO: 2500 - protein, 5 aa, Unknown
  Description of Unknown: Linker sequence
AEGDM

SEQ ID NO: 2501 - protein, 6 aa, Unknown
  Description of Unknown: Linker sequence
AALDKK

SEQ ID NO: 2502 - protein, 6 aa, Unknown
  Description of Unknown: Linker sequence
ENEGLE

SEQ ID NO: 2503 - protein, 7 aa, Unknown
  Description of Unknown: Linker sequence
RFRPLRD

SEQ ID NO: 2504 - protein, 7 aa, Unknown
  Description of Unknown: Linker sequence
VASRARP

SEQ ID NO: 2505 - protein, 4 aa, Unknown
  Description of Unknown: Linker sequence
TKNI

SEQ ID NO: 2506 - protein, 6 aa, Unknown
  Description of Unknown: Linker sequence
VSAGST

SEQ ID NO: 2507 - protein, 9 aa, Unknown
  Description of Unknown: Linker sequence
SGSVKTGTT

SEQ ID NO: 2508 - protein, 10 aa, Unknown
  Description of Unknown: Linker sequence
DLDIKGYVAA

SEQ ID NO: 2509 - protein, 13 aa, Unknown
  Description of Unknown: Linker sequence
SRSGTPSTSIDTS

SEQ ID NO: 2510 - protein, 9 aa, Unknown
  Description of Unknown: Linker sequence
CDGDEYKPV

SEQ ID NO: 2511 - protein, 14 aa, Unknown
  Description of Unknown: Linker sequence
DGPCEPDEDEDVCQ

SEQ ID NO: 2512 - protein, 14 aa, Unknown
  Description of Unknown: Linker sequence
RAVLSSTRMGGHFV

SEQ ID NO: 2513 - protein, 4 aa, Unknown
  Description of Unknown: Linker sequence
QLRT

SEQ ID NO: 2514 - protein, 5 aa, Unknown
  Description of Unknown: Linker sequence
DITNA

SEQ ID NO: 2515 - protein, 6 aa, Unknown
  Description of Unknown: Linker sequence
QEVVAP

SEQ ID NO: 2516 - protein, 4 aa, Unknown
  Description of Unknown: Linker sequence
ILGE

SEQ ID NO: 2517 - protein, 5 aa, Unknown
  Description of Unknown: Linker sequence
SQGGK

SEQ ID NO: 2518 - protein, 6 aa, Unknown
  Description of Unknown: Linker sequence
IARPPA

SEQ ID NO: 2519 - protein, 7 aa, Unknown
  Description of Unknown: Linker sequence
PTFAVER

SEQ ID NO: 2520 - protein, 12 aa, Unknown
  Description of Unknown: Linker sequence
EGTYGDRPHRPY

SEQ ID NO: 2521 - protein, 24 aa, Unknown
  Description of Unknown: Linker sequence
YSGDLGNREKDVLPDPSLPPLADL

SEQ ID NO: 2522 - protein, 4 aa, Unknown
  Description of Unknown: Linker sequence
DYTE

SEQ ID NO: 2523 - protein, 4 aa, Unknown
  Description of Unknown: Linker sequence
TFSY

SEQ ID NO: 2524 - protein, 6 aa, Unknown
  Description of Unknown: Linker sequence
DTFIDH

SEQ ID NO: 2525 - protein, 8 aa, Unknown
  Description of Unknown: Linker sequence
EMGKYDNH

SEQ ID NO: 2526 - protein, 9 aa, Unknown
  Description of Unknown: Linker sequence
YGQFEPPAL

SEQ ID NO: 2527 - protein, 16 aa, Unknown
  Description of Unknown: Linker sequence
KYLVQNRVTGEIYESA

SEQ ID NO: 2528 - protein, 13 aa, Unknown
  Description of Unknown: Linker sequence
DLSVFPELEEGDY

SEQ ID NO: 2529 - protein, 9 aa, Unknown
  Description of Unknown: Linker sequence
DYGFIEPNE

SEQ ID NO: 2530 - protein, 5 aa, Unknown
  Description of Unknown: Linker sequence
PAPAP

SEQ ID NO: 2531 - protein, 10 aa, Unknown
  Description of Unknown: Linker sequence
APAPAPAPAP

SEQ ID NO: 2532 - protein, 12 aa, Unknown
  Description of Unknown: Linker sequence
APAPAPAPAPAP

SEQ ID NO: 2533 - protein, 14 aa, Unknown
  Description of Unknown: Linker sequence
APAPAPAPAPAPAP

SEQ ID NO: 2534 - protein, 16 aa, Unknown
  Description of Unknown: Linker sequence
APAPAPAPAPAPAPAP

SEQ ID NO: 2535 - protein, 18 aa, Unknown
  Description of Unknown: Linker sequence
APAPAPAPAPAPAPAPAP

SEQ ID NO: 2536 - protein, 20 aa, Unknown
  Description of Unknown: Linker sequence
APAPAPAPAPAPAPAPAPAP

SEQ ID NO: 2537 - protein, 22 aa, Unknown
  Description of Unknown: Linker sequence
APAPAPAPAPAPAPAPAPAPAP

SEQ ID NO: 2538 - protein, 24 aa, Unknown
  Description of Unknown: Linker sequence
APAPAPAPAPAPAPAPAPAPAPAP

SEQ ID NO: 2539 - protein, 26 aa, Unknown
  Description of Unknown: Linker sequence
APAPAPAPAPAPAPAPAPAPAPAPAP

SEQ ID NO: 2540 - protein, 28 aa, Unknown
  Description of Unknown: Linker sequence
APAPAPAPAPAPAPAPAPAPAPAPAPAP

SEQ ID NO: 2541 - protein, 30 aa, Unknown
  Description of Unknown: Linker sequence
APAPAPAPAPAPAPAPAPAPAPAPAPAPAP

SEQ ID NO: 2542 - protein, 32 aa, Unknown
  Description of Unknown: Linker sequence
APAPAPAPAPAPAPAPAPAPAPAPAPAPAPAP

SEQ ID NO: 2543 - protein, 33 aa, Unknown
  Description of Unknown: Linker sequence
EPEPEPEPIPEPPKEAPVVIEKPKPKPKPKPKP

SEQ ID NO: 2544 - protein, 34 aa, Unknown
  Description of Unknown: Linker sequence
APAPAPAPAPAPAPAPAPAPAPAPAPAPAPAPAP

SEQ ID NO: 2545 - protein, 5 aa, Unknown
  Description of Unknown: Linker sequence
EAAAK

SEQ ID NO: 2546 - protein, 10 aa, Unknown
  Description of Unknown: Linker sequence
EAAAKEAAAK

SEQ ID NO: 2547 - protein, 12 aa, Unknown
  Description of Unknown: Linker sequence
AEAAAKEAAAKA

SEQ ID NO: 2548 - protein, 15 aa, Unknown
  Description of Unknown: Linker sequence
EAAAKEAAAKEAAAK

SEQ ID NO: 2549 - protein, 17 aa, Unknown
  Description of Unknown: Linker sequence
AEAAAKEAAAKEAAAKA

SEQ ID NO: 2550 - protein, 22 aa, Unknown
  Description of Unknown: Linker sequence
AEAAAKEAAAKEAAAKEAAAKA

SEQ ID NO: 2551 - protein, 27 aa, Unknown
  Description of Unknown: Linker sequence
AEAAAKEAAAKEAAAKEAAAKEAAAKA

SEQ ID NO: 2552 - protein, 46 aa, Unknown
  Description of Unknown: Linker sequence
AEAAAKEAAAKEAAAKEAAAKALEAEAAAKEAAAKEAAAKEAAAKA

SEQ ID NO: 2553 - protein, 6 aa, Unknown
  Description of Unknown: Linker sequence
KSGEDI

SEQ ID NO: 2554 - protein, 29 aa, Unknown
  Description of Unknown: Linker sequence
INQGEDSVPAKKFKAAPAEISDGEDRSKC

SEQ ID NO: 2555 - protein, 5 aa, Unknown
  Description of Unknown: Linker sequence
RSPEW

SEQ ID NO: 2556 - protein, 19 aa, Unknown
  Description of Unknown: Linker sequence
SAFGIRPPLRLGEFTMPEH

SEQ ID NO: 2557 - protein, 12 aa, Unknown
  Description of Unknown: Linker sequence
LNTGASDNFTRW

SEQ ID NO: 2558 - protein, 12 aa, Unknown
  Description of Unknown: Linker sequence
AEKGEDIEIKKV

SEQ ID NO: 2559 - protein, 15 aa, Unknown
  Description of Unknown: Linker sequence
VDRADPLEQGAGDQG

SEQ ID NO: 2560 - protein, 4 aa, Unknown
  Description of Unknown: Linker sequence
DGDF

SEQ ID NO: 2561 - protein, 4 aa, Unknown
  Description of Unknown: Linker sequence
KNDK

SEQ ID NO: 2562 - protein, 4 aa, Unknown
  Description of Unknown: Linker sequence
PIRS

SEQ ID NO: 2563 - protein, 4 aa, Unknown
  Description of Unknown: Linker sequence
PMTG

SEQ ID NO: 2564 - protein, 4 aa, Unknown
  Description of Unknown: Linker sequence
RACC

SEQ ID NO: 2565 - protein, 4 aa, Unknown
  Description of Unknown: Linker sequence
VGTT

SEQ ID NO: 2566 - protein, 5 aa, Unknown
  Description of Unknown: Linker sequence
DAGIR

SEQ ID NO: 2567 - protein, 5 aa, Unknown
  Description of Unknown: Linker sequence
DDLPL

SEQ ID NO: 2568 - protein, 5 aa, Unknown
  Description of Unknown: Linker sequence
GCTSV

SEQ ID NO: 2569 - protein, 5 aa, Unknown
  Description of Unknown: Linker sequence
ITAFV

SEQ ID NO: 2570 - protein, 5 aa, Unknown
  Description of Unknown: Linker sequence
TASEM

SEQ ID NO: 2571 - protein, 5 aa, Unknown
  Description of Unknown: Linker sequence
TGDNK

SEQ ID NO: 2572 - protein, 5 aa, Unknown
  Description of Unknown: Linker sequence
YETDL

SEQ ID NO: 2573 - protein, 6 aa, Unknown
  Description of Unknown: Linker sequence
LADDNF

SEQ ID NO: 2574 - protein, 6 aa, Unknown
  Description of Unknown: Linker sequence
MGSGTA

SEQ ID NO: 2575 - protein, 7 aa, Unknown
  Description of Unknown: Linker sequence
ARVEPSH

SEQ ID NO: 2576 - protein, 7 aa, Unknown
  Description of Unknown: Linker sequence
EMVLDDS

SEQ ID NO: 2577 - protein, 7 aa, Unknown
  Description of Unknown: Linker sequence
RDTPPKR

SEQ ID NO: 2578 - protein, 7 aa, Unknown
  Description of Unknown: Linker sequence
TGRDTLR

SEQ ID NO: 2579 - protein, 8 aa, Unknown
  Description of Unknown: Linker sequence
LDPPRKEV

SEQ ID NO: 2580 - protein, 9 aa, Unknown
  Description of Unknown: Linker sequence
LAWFEEGEE

SEQ ID NO: 2581 - protein, 10 aa, Unknown
  Description of Unknown: Linker sequence
ALGLPEALIP

SEQ ID NO: 2582 - protein, 12 aa, Unknown
  Description of Unknown: Linker sequence
DKTGTLTTNQMS

SEQ ID NO: 2583 - protein, 12 aa, Unknown
  Description of Unknown: Linker sequence
ITGSTYAPEGEV

SEQ ID NO: 2584 - protein, 14 aa, Unknown
  Description of Unknown: Linker sequence
IGIFGENEEVADRA

SEQ ID NO: 2585 - protein, 6 aa, Unknown
  Description of Unknown: Linker sequence
YLRQDL

SEQ ID NO: 2586 - protein, 8 aa, Unknown
  Description of Unknown: Linker sequence
ESQSLSIQ

SEQ ID NO: 2587 - protein, 6 aa, Unknown
  Description of Unknown: Linker sequence
SGKQSY

SEQ ID NO: 2588 - protein, 14 aa, Unknown
  Description of Unknown: Linker sequence
FRARGKAVSTVFDQ

SEQ ID NO: 2589 - protein, 6 aa, Unknown
  Description of Unknown: Linker sequence
DANSEM

SEQ ID NO: 2590 - protein, 7 aa, Unknown
  Description of Unknown: Linker sequence
DITAQKE

SEQ ID NO: 2591 - protein, 8 aa, Unknown
  Description of Unknown: Linker sequence
TVESTGKV

SEQ ID NO: 2592 - protein, 5 aa, Unknown
  Description of Unknown: Linker sequence
AQDRK

SEQ ID NO: 2593 - protein, 4 aa, Unknown
  Description of Unknown: Linker sequence
FYGK

SEQ ID NO: 2594 - protein, 8 aa, Unknown
  Description of Unknown: Linker sequence
ALSSTGEI

SEQ ID NO: 2595 - protein, 15 aa, Unknown
  Description of Unknown: Linker sequence
TATPPGSVTVPHPNI

SEQ ID NO: 2596 - protein, 5 aa, Unknown
  Description of Unknown: Linker sequence
SSSSG

SEQ ID NO: 2597 - protein, 10 aa, Unknown
  Description of Unknown: Linker sequence
SSSSGSSSSG

SEQ ID NO: 2598 - protein, 13 aa, Unknown
  Description of Unknown: Linker sequence
SGSSSSGSSSSGS

SEQ ID NO: 2599 - protein, 15 aa, Unknown
  Description of Unknown: Linker sequence
SSSSGSSSSGSSSSG

SEQ ID NO: 2600 - protein, 19 aa, Unknown
  Description of Unknown: Linker sequence
SVTVSSSGSSSSGSSSSGS

SEQ ID NO: 2601 - protein, 20 aa, Unknown
  Description of Unknown: Linker sequence
SSSSGSSSSGSSSSGSSSSG

SEQ ID NO: 2602 - protein, 25 aa, Unknown
  Description of Unknown: Linker sequence
SSSSGSSSSGSSSSGSSSSGSSSSG

SEQ ID NO: 2603 - protein, 17 aa, Unknown
  Description of Unknown: Linker sequence
LLQVPLPPWPGAPVGGE

SEQ ID NO: 2604 - protein, 6 aa, Unknown
  Description of Unknown: Linker sequence
FRGPDR

SEQ ID NO: 2605 - protein, 4 aa, Unknown
  Description of Unknown: Linker sequence
EGGK

SEQ ID NO: 2606 - protein, 6 aa, Unknown
  Description of Unknown: Linker sequence
INDKYE

SEQ ID NO: 2607 - protein, 6 aa, Unknown
  Description of Unknown: Linker sequence
NETTNK

SEQ ID NO: 2608 - protein, 8 aa, Unknown
  Description of Unknown: Linker sequence
DFDSGSLR

SEQ ID NO: 2609 - protein, 9 aa, Unknown
  Description of Unknown: Linker sequence
KNGDNDFRY

SEQ ID NO: 2610 - protein, 11 aa, Unknown
  Description of Unknown: Linker sequence
PMNVFYKDSLF

SEQ ID NO: 2611 - protein, 4 aa, Unknown
  Description of Unknown: Linker sequence
GGEA

SEQ ID NO: 2612 - protein, 4 aa, Unknown
  Description of Unknown: Linker sequence
LGDV

SEQ ID NO: 2613 - protein, 5 aa, Unknown
  Description of Unknown: Linker sequence
YSNVE

SEQ ID NO: 2614 - protein, 6 aa, Unknown
  Description of Unknown: Linker sequence
DPVSKE

SEQ ID NO: 2615 - protein, 6 aa, Unknown
  Description of Unknown: Linker sequence
GLPGDK

SEQ ID NO: 2616 - protein, 6 aa, Unknown
  Description of Unknown: Linker sequence
IVPPGQ

SEQ ID NO: 2617 - protein, 9 aa, Unknown
  Description of Unknown: Linker sequence
TVPIAQDQV

SEQ ID NO: 2618 - protein, 11 aa, Unknown
  Description of Unknown: Linker sequence
EVPKNETKENG

SEQ ID NO: 2619 - protein, 12 aa, Unknown
  Description of Unknown: Linker sequence
MYYQQPGQQLAT

SEQ ID NO: 2620 - protein, 16 aa, Unknown
  Description of Unknown: Linker sequence
QPGCSSGQACENALPV

SEQ ID NO: 2621 - protein, 15 aa, Unknown
  Description of Unknown: Linker sequence
ALGGEARLPVLKDRN

SEQ ID NO: 2622 - protein, 8 aa, Unknown
  Description of Unknown: Linker sequence
KYTYEHDP

SEQ ID NO: 2623 - protein, 10 aa, Unknown
  Description of Unknown: Linker sequence
IGGPPNACLD

SEQ ID NO: 2624 - protein, 20 aa, Unknown
  Description of Unknown: Linker sequence
ENAQRFNQAQSGNIQSTVML

SEQ ID NO: 2625 - protein, 25 aa, Unknown
  Description of Unknown: Linker sequence
LQNREHETNGVAKSDQKQEQLLLKK

SEQ ID NO: 2626 - protein, 9 aa, Unknown
  Description of Unknown: Linker sequence
CEMGSTFQL

SEQ ID NO: 2627 - protein, 26 aa, Unknown
  Description of Unknown: Linker sequence
PDGRNQNPDLTGLCEPTPQDHIKVTQ

SEQ ID NO: 2628 - protein, 4 aa, Unknown
  Description of Unknown: Linker sequence
LGTA

SEQ ID NO: 2629 - protein, 4 aa, Unknown
  Description of Unknown: Linker sequence
NHPA

SEQ ID NO: 2630 - protein, 5 aa, Unknown
  Description of Unknown: Linker sequence
CNLTP

SEQ ID NO: 2631 - protein, 5 aa, Unknown
  Description of Unknown: Linker sequence
IRRTS

SEQ ID NO: 2632 - protein, 6 aa, Unknown
  Description of Unknown: Linker sequence
KYLPVK

SEQ ID NO: 2633 - protein, 7 aa, Unknown
  Description of Unknown: Linker sequence
ISGTPIQ

SEQ ID NO: 2634 - protein, 8 aa, Unknown
  Description of Unknown: Linker sequence
RDADASDK

SEQ ID NO: 2635 - protein, 9 aa, Unknown
  Description of Unknown: Linker sequence
TGEEGFDGA

SEQ ID NO: 2636 - protein, 10 aa, Unknown
  Description of Unknown: Linker sequence
ESLQTGKISV

SEQ ID NO: 2637 - protein, 14 aa, Unknown
  Description of Unknown: Linker sequence
DLFPQNYSTKAVEP

SEQ ID NO: 2638 - protein, 4 aa, Unknown
  Description of Unknown: Linker sequence
SATH

SEQ ID NO: 2639 - protein, 7 aa, Unknown
  Description of Unknown: Linker sequence
YIPLPEP

SEQ ID NO: 2640 - protein, 8 aa, Unknown
  Description of Unknown: Linker sequence
RKTDGYSG

SEQ ID NO: 2641 - protein, 9 aa, Unknown
  Description of Unknown: Linker sequence
PSRADPNHL

SEQ ID NO: 2642 - protein, 10 aa, Unknown
  Description of Unknown: Linker sequence
LGTTQNSLTE

SEQ ID NO: 2643 - protein, 9 aa, Unknown
  Description of Unknown: Linker sequence
NLLGQQPLV

SEQ ID NO: 2644 - protein, 10 aa, Unknown
  Description of Unknown: Linker sequence
SSYGPASGPL

SEQ ID NO: 2645 - protein, 11 aa, Unknown
  Description of Unknown: Linker sequence
VAQLPKKQVYI

SEQ ID NO: 2646 - protein, 16 aa, Unknown
  Description of Unknown: Linker sequence
SATPQGQTAKIEVPHT

SEQ ID NO: 2647 - protein, 4 aa, Unknown
  Description of Unknown: Linker sequence
FSCS

SEQ ID NO: 2648 - protein, 8 aa, Unknown
  Description of Unknown: Linker sequence
FWLAIDMS

SEQ ID NO: 2649 - protein, 9 aa, Unknown
  Description of Unknown: Linker sequence
VKAAPQAPV

SEQ ID NO: 2650 - protein, 13 aa, Unknown
  Description of Unknown: Linker sequence
ADQSESQMIPKDS

SEQ ID NO: 2651 - protein, 4 aa, Unknown
  Description of Unknown: Linker sequence
FAFI

SEQ ID NO: 2652 - protein, 4 aa, Unknown
  Description of Unknown: Linker sequence
IQNT

SEQ ID NO: 2653 - protein, 5 aa, Unknown
  Description of Unknown: Linker sequence
GTLSP

SEQ ID NO: 2654 - protein, 6 aa, Unknown
  Description of Unknown: Linker sequence
QVPQDD

SEQ ID NO: 2655 - protein, 8 aa, Unknown
  Description of Unknown: Linker sequence
HLSAGCPH

SEQ ID NO: 2656 - protein, 11 aa, Unknown
  Description of Unknown: Linker sequence
FSTRVLPAQAT

SEQ ID NO: 2657 - protein, 4 aa, Unknown
  Description of Unknown: Linker sequence
EMDS

SEQ ID NO: 2658 - protein, 5 aa, Unknown
  Description of Unknown: Linker sequence
HFPLK

SEQ ID NO: 2659 - protein, 6 aa, Unknown
  Description of Unknown: Linker sequence
DLDNVT

SEQ ID NO: 2660 - protein, 6 aa, Unknown
  Description of Unknown: Linker sequence
FDGQLE

SEQ ID NO: 2661 - protein, 7 aa, Unknown
  Description of Unknown: Linker sequence
ITNECQW

SEQ ID NO: 2662 - protein, 7 aa, Unknown
  Description of Unknown: Linker sequence
SQPFPVV

SEQ ID NO: 2663 - protein, 7 aa, Unknown
  Description of Unknown: Linker sequence
TGARSNF

SEQ ID NO: 2664 - protein, 8 aa, Unknown
  Description of Unknown: Linker sequence
ESDASNPF

SEQ ID NO: 2665 - protein, 8 aa, Unknown
  Description of Unknown: Linker sequence
HFFGNRSI

SEQ ID NO: 2666 - protein, 9 aa, Unknown
  Description of Unknown: Linker sequence
QPIYPATLT

SEQ ID NO: 2667 - protein, 10 aa, Unknown
  Description of Unknown: Linker sequence
FLAGTRKCSV

SEQ ID NO: 2668 - protein, 12 aa, Unknown
  Description of Unknown: Linker sequence
LNPQHSAPKPNV

SEQ ID NO: 2669 - protein, 12 aa, Unknown
  Description of Unknown: Linker sequence
SKGKQLGENQLV

SEQ ID NO: 2670 - protein, 15 aa, Unknown
  Description of Unknown: Linker sequence
ATKQDPVRPKRPLSS

SEQ ID NO: 2671 - protein, 16 aa, Unknown
  Description of Unknown: Linker sequence
ICDSHPTNKNNPTTPL

SEQ ID NO: 2672 - protein, 9 aa, Unknown
  Description of Unknown: Linker sequence
YLDTKPAPV

SEQ ID NO: 2673 - protein, 4 aa, Unknown
  Description of Unknown: Linker sequence
IHKK

SEQ ID NO: 2674 - protein, 5 aa, Unknown
  Description of Unknown: Linker sequence
GIMPG

SEQ ID NO: 2675 - protein, 5 aa, Unknown
  Description of Unknown: Linker sequence
NPGEC

SEQ ID NO: 2676 - protein, 7 aa, Unknown
  Description of Unknown: Linker sequence
IGPNCPG

SEQ ID NO: 2677 - protein, 8 aa, Unknown
  Description of Unknown: Linker sequence
CITEGIPQ

SEQ ID NO: 2678 - protein, 8 aa, Unknown
  Description of Unknown: Linker sequence
LLRQGKTR

SEQ ID NO: 2679 - protein, 4 aa, Unknown
  Description of Unknown: Linker sequence
MRDQ

SEQ ID NO: 2680 - protein, 4 aa, Unknown
  Description of Unknown: Linker sequence
QEDP

SEQ ID NO: 2681 - protein, 5 aa, Unknown
  Description of Unknown: Linker sequence
CLDGK

SEQ ID NO: 2682 - protein, 5 aa, Unknown
  Description of Unknown: Linker sequence
QWELN

SEQ ID NO: 2683 - protein, 6 aa, Unknown
  Description of Unknown: Linker sequence
ALDGNI

SEQ ID NO: 2684 - protein, 6 aa, Unknown
  Description of Unknown: Linker sequence
TKQGDL

SEQ ID NO: 2685 - protein, 31 aa, Unknown
  Description of Unknown: Linker sequence
KGEKYEKRIERLSVRKEEDVKTRSGKLGDNV

SEQ ID NO: 2686 - protein, 27 aa, Unknown
  Description of Unknown: Linker sequence
AEDRPLSRELPAPAGGPVALSLHDEPT

SEQ ID NO: 2687 - protein, 9 aa, Unknown
  Description of Unknown: Linker sequence
PYQKTSIPK

SEQ ID NO: 2688 - protein, 9 aa, Unknown
  Description of Unknown: Linker sequence
RGAGKPNSS

SEQ ID NO: 2689 - protein, 6 aa, Unknown
  Description of Unknown: Linker sequence
AVGKNP

SEQ ID NO: 2690 - protein, 6 aa, Unknown
  Description of Unknown: Linker sequence
DTATNT

SEQ ID NO: 2691 - protein, 6 aa, Unknown
  Description of Unknown: Linker sequence
FLSEPV

SEQ ID NO: 2692 - protein, 6 aa, Unknown
  Description of Unknown: Linker sequence
LSFCNT

SEQ ID NO: 2693 - protein, 7 aa, Unknown
  Description of Unknown: Linker sequence
SNITSGY

SEQ ID NO: 2694 - protein, 7 aa, Unknown
  Description of Unknown: Linker sequence
VTPDGKK

SEQ ID NO: 2695 - protein, 7 aa, Unknown
  Description of Unknown: Linker sequence
YASGQFI

SEQ ID NO: 2696 - protein, 13 aa, Unknown
  Description of Unknown: Linker sequence
SIPVQPVYPSADF

SEQ ID NO: 2697 - protein, 7 aa, Unknown
  Description of Unknown: Linker sequence
EIPTSNI

SEQ ID NO: 2698 - protein, 8 aa, Unknown
  Description of Unknown: Linker sequence
KADFPTPS

SEQ ID NO: 2699 - protein, 10 aa, Unknown
  Description of Unknown: Linker sequence
HPYIQNPDPA

SEQ ID NO: 2700 - protein, 11 aa, Unknown
  Description of Unknown: Linker sequence
DTPPNFLDDDM

SEQ ID NO: 2701 - protein, 7 aa, Unknown
  Description of Unknown: Linker sequence
FCKALNP

SEQ ID NO: 2702 - protein, 13 aa, Unknown
  Description of Unknown: Linker sequence
HHDYSLPAAGESW

SEQ ID NO: 2703 - protein, 4 aa, Unknown
  Description of Unknown: Linker sequence
AEGV

SEQ ID NO: 2704 - protein, 7 aa, Unknown
  Description of Unknown: Linker sequence
LMLIADV

SEQ ID NO: 2705 - protein, 8 aa, Unknown
  Description of Unknown: Linker sequence
EAGEEGEK

SEQ ID NO: 2706 - protein, 22 aa, Unknown
  Description of Unknown: Linker sequence
RSTPPPEMPKPVPRKEVQAGVE

SEQ ID NO: 2707 - protein, 6 aa, Unknown
  Description of Unknown: Linker sequence
CVPLVR

SEQ ID NO: 2708 - protein, 6 aa, Unknown
  Description of Unknown: Linker sequence
KSDPIQ

SEQ ID NO: 2709 - protein, 4 aa, Unknown
  Description of Unknown: Linker sequence
AGVE

SEQ ID NO: 2710 - protein, 12 aa, Unknown
  Description of Unknown: Linker sequence
NAGGELFRDVNV

SEQ ID NO: 2711 - protein, 17 aa, Unknown
  Description of Unknown: Linker sequence
ERGAWSAPLPRQPRADT

SEQ ID NO: 2712 - protein, 19 aa, Unknown
  Description of Unknown: Linker sequence
LAGQQLEHGQTRRFGAISQ

SEQ ID NO: 2713 - protein, 4 aa, Unknown
  Description of Unknown: Linker sequence
IDNG

SEQ ID NO: 2714 - protein, 4 aa, Unknown
  Description of Unknown: Linker sequence
KVSW

SEQ ID NO: 2715 - protein, 5 aa, Unknown
  Description of Unknown: Linker sequence
NRGES

SEQ ID NO: 2716 - protein, 6 aa, Unknown
  Description of Unknown: Linker sequence
ITAKDE

SEQ ID NO: 2717 - protein, 6 aa, Unknown
  Description of Unknown: Linker sequence
LWPHTK

SEQ ID NO: 2718 - protein, 6 aa, Unknown
  Description of Unknown: Linker sequence
MAIGPV

SEQ ID NO: 2719 - protein, 8 aa, Unknown
  Description of Unknown: Linker sequence
AEKNYDVI

SEQ ID NO: 2720 - protein, 8 aa, Unknown
  Description of Unknown: Linker sequence
DLDRTLTQ

SEQ ID NO: 2721 - protein, 9 aa, Unknown
  Description of Unknown: Linker sequence
NIAHDDKPG

SEQ ID NO: 2722 - protein, 4 aa, Unknown
  Description of Unknown: Linker sequence
FFDK

SEQ ID NO: 2723 - protein, 6 aa, Unknown
  Description of Unknown: Linker sequence
LFSNDE

SEQ ID NO: 2724 - protein, 6 aa, Unknown
  Description of Unknown: Linker sequence
VTPGSE

SEQ ID NO: 2725 - protein, 7 aa, Unknown
  Description of Unknown: Linker sequence
ERKERDH

SEQ ID NO: 2726 - protein, 12 aa, Unknown
  Description of Unknown: Linker sequence
FDIDQNISSDDF

SEQ ID NO: 2727 - protein, 17 aa, Unknown
  Description of Unknown: Linker sequence
ELIDAIPEDENVTLYSQ

SEQ ID NO: 2728 - protein, 19 aa, Unknown
  Description of Unknown: Linker sequence
TMKQIVNENMKIERKVVSR

SEQ ID NO: 2729 - protein, 23 aa, Unknown
  Description of Unknown: Linker sequence
AHAIKRLYGNVKFGVGPVIEGGF

SEQ ID NO: 2730 - protein, 21 aa, Unknown
  Description of Unknown: Linker sequence
INGGWGPWSPWDICSVTCGGG

SEQ ID NO: 2731 - protein, 16 aa, Unknown
  Description of Unknown: Linker sequence
LKMKGLTYTMCDKTKF

SEQ ID NO: 2732 - protein, 7 aa, Unknown
  Description of Unknown: Linker sequence
LRGEVVS

SEQ ID NO: 2733 - protein, 10 aa, Unknown
  Description of Unknown: Linker sequence
IHLPKTLEGM

SEQ ID NO: 2734 - protein, 4 aa, Unknown
  Description of Unknown: Linker sequence
PYPV

SEQ ID NO: 2735 - protein, 14 aa, Unknown
  Description of Unknown: Linker sequence
LNKEGEPTKQRTRD

SEQ ID NO: 2736 - protein, 11 aa, Unknown
  Description of Unknown: Linker sequence
RFRDRLPEKLR

SEQ ID NO: 2737 - protein, 12 aa, Unknown
  Description of Unknown: Linker sequence
DAPQQDPEGNKT

SEQ ID NO: 2738 - protein, 4 aa, Unknown
  Description of Unknown: Linker sequence
ELPL

SEQ ID NO: 2739 - protein, 4 aa, Unknown
  Description of Unknown: Linker sequence
VHGK

SEQ ID NO: 2740 - protein, 5 aa, Unknown
  Description of Unknown: Linker sequence
TNTEK

SEQ ID NO: 2741 - protein, 9 aa, Unknown
  Description of Unknown: Linker sequence
DSPLKYWPK

SEQ ID NO: 2742 - protein, 12 aa, Unknown
  Description of Unknown: Linker sequence
SCSEPRCFNGGT

SEQ ID NO: 2743 - protein, 4 aa, Unknown
  Description of Unknown: Linker sequence
IDGK

SEQ ID NO: 2744 - protein, 5 aa, Unknown
  Description of Unknown: Linker sequence
PLEGT

SEQ ID NO: 2745 - protein, 9 aa, Unknown
  Description of Unknown: Linker sequence
AMPGWQDKV

SEQ ID NO: 2746 - protein, 8 aa, Unknown
  Description of Unknown: Linker sequence
YKKTARPK

SEQ ID NO: 2747 - protein, 12 aa, Unknown
  Description of Unknown: Linker sequence
TWAPHPRPLPQA

SEQ ID NO: 2748 - protein, 7 aa, Unknown
  Description of Unknown: Linker sequence
ELNEEMP

SEQ ID NO: 2749 - protein, 17 aa, Unknown
  Description of Unknown: Linker sequence
IVDYSPQQEGKVFFGAW

SEQ ID NO: 2750 - protein, 6 aa, Unknown
  Description of Unknown: Linker sequence
QRVRNR

SEQ ID NO: 2751 - protein, 5 aa, Unknown
  Description of Unknown: Linker sequence
LFVKP

SEQ ID NO: 2752 - protein, 6 aa, Unknown
  Description of Unknown: Linker sequence
NLNLTP

SEQ ID NO: 2753 - protein, 18 aa, Unknown
  Description of Unknown: Linker sequence
YSKKAPPQEEIEFVGEHP

SEQ ID NO: 2754 - protein, 4 aa, Unknown
  Description of Unknown: Linker sequence
IHSP

SEQ ID NO: 2755 - protein, 4 aa, Unknown
  Description of Unknown: Linker sequence
LTDS

SEQ ID NO: 2756 - protein, 5 aa, Unknown
  Description of Unknown: Linker sequence
KDGRL

SEQ ID NO: 2757 - protein, 9 aa, Unknown
  Description of Unknown: Linker sequence
ARINEREET

SEQ ID NO: 2758 - protein, 19 aa, Unknown
  Description of Unknown: Linker sequence
LWNCAPPQSEVVYRPLVSL

SEQ ID NO: 2759 - protein, 5 aa, Unknown
  Description of Unknown: Linker sequence
EFPEV

SEQ ID NO: 2760 - protein, 7 aa, Unknown
  Description of Unknown: Linker sequence
RTASHSI

SEQ ID NO: 2761 - protein, 21 aa, Unknown
  Description of Unknown: Linker sequence
EDGVIRRRVALLDPVKVNTKV

SEQ ID NO: 2762 - protein, 9 aa, Unknown
  Description of Unknown: Linker sequence
VLAGGKSGV

SEQ ID NO: 2763 - protein, 4 aa, Unknown
  Description of Unknown: Linker sequence
QKHV

SEQ ID NO: 2764 - protein, 5 aa, Unknown
  Description of Unknown: Linker sequence
VAPLI

SEQ ID NO: 2765 - protein, 6 aa, Unknown
  Description of Unknown: Linker sequence
AADTGL

SEQ ID NO: 2766 - protein, 6 aa, Unknown
  Description of Unknown: Linker sequence
FANDPQ

SEQ ID NO: 2767 - protein, 6 aa, Unknown
  Description of Unknown: Linker sequence
LLDHHQ

SEQ ID NO: 2768 - protein, 9 aa, Unknown
  Description of Unknown: Linker sequence
SSPHALGVI

SEQ ID NO: 2769 - protein, 11 aa, Unknown
  Description of Unknown: Linker sequence
SERSFPDDLNM

SEQ ID NO: 2770 - protein, 21 aa, Unknown
  Description of Unknown: Linker sequence
DMGYLGPDPVARSLRTRRAGA

SEQ ID NO: 2771 - protein, 4 aa, Unknown
  Description of Unknown: Linker sequence
ELPL

SEQ ID NO: 2772 - protein, 5 aa, Unknown
  Description of Unknown: Linker sequence
EMPSL

SEQ ID NO: 2773 - protein, 5 aa, Unknown
  Description of Unknown: Linker sequence
RREDI

SEQ ID NO: 2774 - protein, 8 aa, Unknown
  Description of Unknown: Linker sequence
IHYDWPGN

SEQ ID NO: 2775 - protein, 9 aa, Unknown
  Description of Unknown: Linker sequence
LLTGEYISE

SEQ ID NO: 2776 - protein, 11 aa, Unknown
  Description of Unknown: Linker sequence
RNRKVVKGFTP

SEQ ID NO: 2777 - protein, 17 aa, Unknown
  Description of Unknown: Linker sequence
IAATPIKTEYSGEIQPL

SEQ ID NO: 2778 - protein, 4 aa, Unknown
  Description of Unknown: Linker sequence
NQYR

SEQ ID NO: 2779 - protein, 7 aa, Unknown
  Description of Unknown: Linker sequence
EMGLSLQ

SEQ ID NO: 2780 - protein, 7 aa, Unknown
  Description of Unknown: Linker sequence
KDSAQNS

SEQ ID NO: 2781 - protein, 11 aa, Unknown
  Description of Unknown: Linker sequence
HDVELNLDYEE

SEQ ID NO: 2782 - protein, 5 aa, Unknown
  Description of Unknown: Linker sequence
PVDAQ

SEQ ID NO: 2783 - protein, 5 aa, Unknown
  Description of Unknown: Linker sequence
VPIIE

SEQ ID NO: 2784 - protein, 7 aa, Unknown
  Description of Unknown: Linker sequence
GVFDGGK

SEQ ID NO: 2785 - protein, 4 aa, Unknown
  Description of Unknown: Linker sequence
YLRE

SEQ ID NO: 2786 - protein, 6 aa, Unknown
  Description of Unknown: Linker sequence
IEEDSP

SEQ ID NO: 2787 - protein, 5 aa, Unknown
  Description of Unknown: Linker sequence
RKSFL

SEQ ID NO: 2788 - protein, 7 aa, Unknown
  Description of Unknown: Linker sequence
DILDDDR

SEQ ID NO: 2789 - protein, 7 aa, Unknown
  Description of Unknown: Linker sequence
SGKGGDK

SEQ ID NO: 2790 - protein, 15 aa, Unknown
  Description of Unknown: Linker sequence
MGGTFTDKDPFRSGR

SEQ ID NO: 2791 - protein, 4 aa, Unknown
  Description of Unknown: Linker sequence
VEER

SEQ ID NO: 2792 - protein, 7 aa, Unknown
  Description of Unknown: Linker sequence
ELPELTA

SEQ ID NO: 2793 - protein, 11 aa, Unknown
  Description of Unknown: Linker sequence
IKRFGVEDGSV

SEQ ID NO: 2794 - protein, 4 aa, Unknown
  Description of Unknown: Linker sequence
AYRW

SEQ ID NO: 2795 - protein, 4 aa, Unknown
  Description of Unknown: Linker sequence
EDAL

SEQ ID NO: 2796 - protein, 7 aa, Unknown
  Description of Unknown: Linker sequence
IRTVGEA

SEQ ID NO: 2797 - protein, 15 aa, Unknown
  Description of Unknown: Linker sequence
ETGLNAYLPGLAGKE

SEQ ID NO: 2798 - protein, 9 aa, Unknown
  Description of Unknown: Linker sequence
LEGRIKGKE

SEQ ID NO: 2799 - protein, 5 aa, Unknown
  Description of Unknown: Linker sequence
RMRNF

SEQ ID NO: 2800 - protein, 6 aa, Unknown
  Description of Unknown: Linker sequence
RGVLPE

SEQ ID NO: 2801 - protein, 6 aa, Unknown
  Description of Unknown: Linker sequence
SLEEQR

SEQ ID NO: 2802 - protein, 7 aa, Unknown
  Description of Unknown: Linker sequence
ANQLQNY

SEQ ID NO: 2803 - protein, 7 aa, Unknown
  Description of Unknown: Linker sequence
NYLLPAG

SEQ ID NO: 2804 - protein, 14 aa, Unknown
  Description of Unknown: Linker sequence
LDWQPRENPFQNLK

SEQ ID NO: 2805 - protein, 4 aa, Unknown
  Description of Unknown: Linker sequence
RIQM

SEQ ID NO: 2806 - protein, 4 aa, Unknown
  Description of Unknown: Linker sequence
WTDP

SEQ ID NO: 2807 - protein, 5 aa, Unknown
  Description of Unknown: Linker sequence
ELGLL

SEQ ID NO: 2808 - protein, 7 aa, Unknown
  Description of Unknown: Linker sequence
APSHGQI

SEQ ID NO: 2809 - protein, 8 aa, Unknown
  Description of Unknown: Linker sequence
ATGMVDER

SEQ ID NO: 2810 - protein, 5 aa, Unknown
  Description of Unknown: Linker sequence
FSLDE

SEQ ID NO: 2811 - protein, 6 aa, Unknown
  Description of Unknown: Linker sequence
HWKLEA

SEQ ID NO: 2812 - protein, 4 aa, Unknown
  Description of Unknown: Linker sequence
SEIG

SEQ ID NO: 2813 - protein, 8 aa, Unknown
  Description of Unknown: Linker sequence
KGIGHSRF

SEQ ID NO: 2814 - protein, 5 aa, Unknown
  Description of Unknown: Linker sequence
EGIKD

SEQ ID NO: 2815 - protein, 7 aa, Unknown
  Description of Unknown: Linker sequence
LSRFPTP

SEQ ID NO: 2816 - protein, 15 aa, Unknown
  Description of Unknown: Linker sequence
LLSPYHHVSGYSPRY

SEQ ID NO: 2817 - protein, 4 aa, Unknown
  Description of Unknown: Linker sequence
PGDW

SEQ ID NO: 2818 - protein, 6 aa, Unknown
  Description of Unknown: Linker sequence
DINKNE

SEQ ID NO: 2819 - protein, 6 aa, Unknown
  Description of Unknown: Linker sequence
ITPYAE

SEQ ID NO: 2820 - protein, 7 aa, Unknown
  Description of Unknown: Linker sequence
EFQSIGD

SEQ ID NO: 2821 - protein, 7 aa, Unknown
  Description of Unknown: Linker sequence
KDPEGNV

SEQ ID NO: 2822 - protein, 7 aa, Unknown
  Description of Unknown: Linker sequence
SLSVIGE

SEQ ID NO: 2823 - protein, 7 aa, Unknown
  Description of Unknown: Linker sequence
SPVNSKR

SEQ ID NO: 2824 - protein, 8 aa, Unknown
  Description of Unknown: Linker sequence
ENTRGFHG

SEQ ID NO: 2825 - protein, 8 aa, Unknown
  Description of Unknown: Linker sequence
NNLKRDYT

SEQ ID NO: 2826 - protein, 10 aa, Unknown
  Description of Unknown: Linker sequence
KYEDFRSPSA

SEQ ID NO: 2827 - protein, 24 aa, Unknown
  Description of Unknown: Linker sequence
YPRLTNKIPKPPQEVKPHPYGVDR

SEQ ID NO: 2828 - protein, 7 aa, Unknown
  Description of Unknown: Linker sequence
ARDRSYE

SEQ ID NO: 2829 - protein, 13 aa, Unknown
  Description of Unknown: Linker sequence
VTSTVKNDIYAHI

SEQ ID NO: 2830 - protein, 22 aa, Unknown
  Description of Unknown: Linker sequence
PYSERYGYRPALIPRPVMAGTL

SEQ ID NO: 2831 - protein, 5 aa, Unknown
  Description of Unknown: Linker sequence
VSQPG

SEQ ID NO: 2832 - protein, 6 aa, Unknown
  Description of Unknown: Linker sequence
LEGLPY

SEQ ID NO: 2833 - protein, 4 aa, Unknown
  Description of Unknown: Linker sequence
QPGV

SEQ ID NO: 2834 - protein, 5 aa, Unknown
  Description of Unknown: Linker sequence
WKLEG

SEQ ID NO: 2835 - protein, 6 aa, Unknown
  Description of Unknown: Linker sequence
TAYNAP

SEQ ID NO: 2836 - protein, 11 aa, Unknown
  Description of Unknown: Linker sequence
HKHDLSETNVY

SEQ ID NO: 2837 - protein, 7 aa, Unknown
  Description of Unknown: Linker sequence
VLQAVTD

SEQ ID NO: 2838 - protein, 4 aa, Unknown
  Description of Unknown: Linker sequence
YKDK

SEQ ID NO: 2839 - protein, 6 aa, Unknown
  Description of Unknown: Linker sequence
NLPFNM

SEQ ID NO: 2840 - protein, 6 aa, Unknown
  Description of Unknown: Linker sequence
WGVKDP

SEQ ID NO: 2841 - protein, 13 aa, Unknown
  Description of Unknown: Linker sequence
QKKKYGDKVPENL

SEQ ID NO: 2842 - protein, 14 aa, Unknown
  Description of Unknown: Linker sequence
NDLVEFNRFTNSPL

SEQ ID NO: 2843 - protein, 10 aa, Unknown
  Description of Unknown: Linker sequence
LKEQESPVKV

SEQ ID NO: 2844 - protein, 6 aa, Unknown
  Description of Unknown: Linker sequence
EEGIAN

SEQ ID NO: 2845 - protein, 11 aa, Unknown
  Description of Unknown: Linker sequence
ADFQGAGRRFD

SEQ ID NO: 2846 - protein, 6 aa, Unknown
  Description of Unknown: Linker sequence
AAGLPR

SEQ ID NO: 2847 - protein, 10 aa, Unknown
  Description of Unknown: Linker sequence
TFTGLPHRFE

SEQ ID NO: 2848 - protein, 4 aa, Unknown
  Description of Unknown: Linker sequence
TTVD

SEQ ID NO: 2849 - protein, 4 aa, Unknown
  Description of Unknown: Linker sequence
DNLR

SEQ ID NO: 2850 - protein, 5 aa, Unknown
  Description of Unknown: Linker sequence
FYHEP

SEQ ID NO: 2851 - protein, 6 aa, Unknown
  Description of Unknown: Linker sequence
ALGYPL

SEQ ID NO: 2852 - protein, 6 aa, Unknown
  Description of Unknown: Linker sequence
LLGEIS

SEQ ID NO: 2853 - protein, 6 aa, Unknown
  Description of Unknown: Linker sequence
MGTVGN

SEQ ID NO: 2854 - protein, 6 aa, Unknown
  Description of Unknown: Linker sequence
TGTNGK

SEQ ID NO: 2855 - protein, 10 aa, Unknown
  Description of Unknown: Linker sequence
RLQPVCGRME

SEQ ID NO: 2856 - protein, 12 aa, Unknown
  Description of Unknown: Linker sequence
TSEAHEKPEEKR

SEQ ID NO: 2857 - protein, 16 aa, Unknown
  Description of Unknown: Linker sequence
NFGGYFPNKLAEYHDF

SEQ ID NO: 2858 - protein, 15 aa, Unknown
  Description of Unknown: Linker sequence
RFAPPTWERIYPLDL

SEQ ID NO: 2859 - protein, 4 aa, Unknown
  Description of Unknown: Linker sequence
VFQP

SEQ ID NO: 2860 - protein, 13 aa, Unknown
  Description of Unknown: Linker sequence
EKASPAFYPQGQE

SEQ ID NO: 2861 - protein, 35 aa, Unknown
  Description of Unknown: Linker sequence
SMAVRFAKVPPDAAKAFIADRSMLFNGGTASRPPV

SEQ ID NO: 2862 - protein, 4 aa, Unknown
  Description of Unknown: Linker sequence
VLKL

SEQ ID NO: 2863 - protein, 6 aa, Unknown
  Description of Unknown: Linker sequence
DLKNSK

SEQ ID NO: 2864 - protein, 9 aa, Unknown
  Description of Unknown: Linker sequence
LKKDFQGVE

SEQ ID NO: 2865 - protein, 4 aa, Unknown
  Description of Unknown: Linker sequence
GYTG

SEQ ID NO: 2866 - protein, 4 aa, Unknown
  Description of Unknown: Linker sequence
PMSD

SEQ ID NO: 2867 - protein, 4 aa, Unknown
  Description of Unknown: Linker sequence
SDPE

SEQ ID NO: 2868 - protein, 5 aa, Unknown
  Description of Unknown: Linker sequence
DAPGQ

SEQ ID NO: 2869 - protein, 5 aa, Unknown
  Description of Unknown: Linker sequence
FEQTL

SEQ ID NO: 2870 - protein, 5 aa, Unknown
  Description of Unknown: Linker sequence
GGLSQ

SEQ ID NO: 2871 - protein, 6 aa, Unknown
  Description of Unknown: Linker sequence
AGENEI

SEQ ID NO: 2872 - protein, 6 aa, Unknown
  Description of Unknown: Linker sequence
QRCGFV

SEQ ID NO: 2873 - protein, 6 aa, Unknown
  Description of Unknown: Linker sequence
RQREGT

SEQ ID NO: 2874 - protein, 7 aa, Unknown
  Description of Unknown: Linker sequence
HGNNPLA

SEQ ID NO: 2875 - protein, 8 aa, Unknown
  Description of Unknown: Linker sequence
GAHYRTSP

SEQ ID NO: 2876 - protein, 8 aa, Unknown
  Description of Unknown: Linker sequence
QYTQDLDY

SEQ ID NO: 2877 - protein, 11 aa, Unknown
  Description of Unknown: Linker sequence
WAGFRRPRGNL

SEQ ID NO: 2878 - protein, 13 aa, Unknown
  Description of Unknown: Linker sequence
MGNHREASSGCYT

SEQ ID NO: 2879 - protein, 17 aa, Unknown
  Description of Unknown: Linker sequence
LVFDDENFTHTPQGNIV

SEQ ID NO: 2880 - protein, 6 aa, Unknown
  Description of Unknown: Linker sequence
ALPGFQ

SEQ ID NO: 2881 - protein, 14 aa, Unknown
  Description of Unknown: Linker sequence
RASSVAERHVSPDT

SEQ ID NO: 2882 - protein, 7 aa, Unknown
  Description of Unknown: Linker sequence
KISSGDW

SEQ ID NO: 2883 - protein, 7 aa, Unknown
  Description of Unknown: Linker sequence
SKSKNPI

SEQ ID NO: 2884 - protein, 11 aa, Unknown
  Description of Unknown: Linker sequence
FMNKDGCAGFT

SEQ ID NO: 2885 - protein, 4 aa, Unknown
  Description of Unknown: Linker sequence
IMGS

SEQ ID NO: 2886 - protein, 4 aa, Unknown
  Description of Unknown: Linker sequence
KPYK

SEQ ID NO: 2887 - protein, 5 aa, Unknown
  Description of Unknown: Linker sequence
EGPPM

SEQ ID NO: 2888 - protein, 5 aa, Unknown
  Description of Unknown: Linker sequence
LGAEI

SEQ ID NO: 2889 - protein, 5 aa, Unknown
  Description of Unknown: Linker sequence
YIPEK

SEQ ID NO: 2890 - protein, 6 aa, Unknown
  Description of Unknown: Linker sequence
GEKLNI

SEQ ID NO: 2891 - protein, 6 aa, Unknown
  Description of Unknown: Linker sequence
NKGYHI

SEQ ID NO: 2892 - protein, 7 aa, Unknown
  Description of Unknown: Linker sequence
CIETGEI

SEQ ID NO: 2893 - protein, 11 aa, Unknown
  Description of Unknown: Linker sequence
TGNPLLWSDDL

SEQ ID NO: 2894 - protein, 8 aa, Unknown
  Description of Unknown: Linker sequence
KHEYQDRF

SEQ ID NO: 2895 - protein, 9 aa, Unknown
  Description of Unknown: Linker sequence
CRFGYRDSI

SEQ ID NO: 2896 - protein, 9 aa, Unknown
  Description of Unknown: Linker sequence
RLDPTTVTP

SEQ ID NO: 2897 - protein, 11 aa, Unknown
  Description of Unknown: Linker sequence
PKEWQPVLTYG

SEQ ID NO: 2898 - protein, 19 aa, Unknown
  Description of Unknown: Linker sequence
CNTTKCNEGPILELENLPQ

SEQ ID NO: 2899 - protein, 24 aa, Unknown
  Description of Unknown: Linker sequence
CGLDLCNQGNSGRAVTYSRSRYLE

SEQ ID NO: 2900 - protein, 7 aa, Unknown
  Description of Unknown: Linker sequence
SFPKDPE

SEQ ID NO: 2901 - protein, 8 aa, Unknown
  Description of Unknown: Linker sequence
VRTEIAKK

SEQ ID NO: 2902 - protein, 14 aa, Unknown
  Description of Unknown: Linker sequence
IIRKDQRLKFGEGI

SEQ ID NO: 2903 - protein, 11 aa, Unknown
  Description of Unknown: Linker sequence
EQLLGTSFLTR

SEQ ID NO: 2904 - protein, 25 aa, Unknown
  Description of Unknown: Linker sequence
PHDQCACGVLTSEKRAPDLQDLPWQ

SEQ ID NO: 2905 - protein, 8 aa, Unknown
  Description of Unknown: Linker sequence
KVSGENHV

SEQ ID NO: 2906 - protein, 6 aa, Unknown
  Description of Unknown: Linker sequence
NVAEDY

SEQ ID NO: 2907 - protein, 4 aa, Unknown
  Description of Unknown: Linker sequence
IDWR

SEQ ID NO: 2908 - protein, 4 aa, Unknown
  Description of Unknown: Linker sequence
RKGS

SEQ ID NO: 2909 - protein, 5 aa, Unknown
  Description of Unknown: Linker sequence
LFKSP

SEQ ID NO: 2910 - protein, 8 aa, Unknown
  Description of Unknown: Linker sequence
QNLTAPAT

SEQ ID NO: 2911 - protein, 6 aa, Unknown
  Description of Unknown: Linker sequence
YAPRPR

SEQ ID NO: 2912 - protein, 7 aa, Unknown
  Description of Unknown: Linker sequence
YGPDGQR

SEQ ID NO: 2913 - protein, 9 aa, Unknown
  Description of Unknown: Linker sequence
VSQKTFPQL

SEQ ID NO: 2914 - protein, 17 aa, Unknown
  Description of Unknown: Linker sequence
GVSDDDAFEVGLTCGGI

SEQ ID NO: 2915 - protein, 4 aa, Unknown
  Description of Unknown: Linker sequence
FNDK

SEQ ID NO: 2916 - protein, 4 aa, Unknown
  Description of Unknown: Linker sequence
HDRN

SEQ ID NO: 2917 - protein, 5 aa, Unknown
  Description of Unknown: Linker sequence
KVKAD

SEQ ID NO: 2918 - protein, 6 aa, Unknown
  Description of Unknown: Linker sequence
EAGISS

SEQ ID NO: 2919 - protein, 6 aa, Unknown
  Description of Unknown: Linker sequence
IKASWA

SEQ ID NO: 2920 - protein, 6 aa, Unknown
  Description of Unknown: Linker sequence
LTRGFA

SEQ ID NO: 2921 - protein, 7 aa, Unknown
  Description of Unknown: Linker sequence
LNGRARA

SEQ ID NO: 2922 - protein, 7 aa, Unknown
  Description of Unknown: Linker sequence
SLATFDS

SEQ ID NO: 2923 - protein, 8 aa, Unknown
  Description of Unknown: Linker sequence
ALPEGHAK

SEQ ID NO: 2924 - protein, 8 aa, Unknown
  Description of Unknown: Linker sequence
ATTGVEGL

SEQ ID NO: 2925 - protein, 8 aa, Unknown
  Description of Unknown: Linker sequence
RPKSTEKL

SEQ ID NO: 2926 - protein, 9 aa, Unknown
  Description of Unknown: Linker sequence
YTSRKKTHE

SEQ ID NO: 2927 - protein, 10 aa, Unknown
  Description of Unknown: Linker sequence
ASPYHLGIND

SEQ ID NO: 2928 - protein, 10 aa, Unknown
  Description of Unknown: Linker sequence
GLQDWNVTPE

SEQ ID NO: 2929 - protein, 10 aa, Unknown
  Description of Unknown: Linker sequence
LDRKSGDYNQ

SEQ ID NO: 2930 - protein, 13 aa, Unknown
  Description of Unknown: Linker sequence
LLDRDLNLNLPPV

SEQ ID NO: 2931 - protein, 13 aa, Unknown
  Description of Unknown: Linker sequence
SEGLLPLDNHYHF

SEQ ID NO: 2932 - protein, 14 aa, Unknown
  Description of Unknown: Linker sequence
ESPVDSEQRGENDL

SEQ ID NO: 2933 - protein, 15 aa, Unknown
  Description of Unknown: Linker sequence
ALHDMNVELEEKTSH

SEQ ID NO: 2934 - protein, 15 aa, Unknown
  Description of Unknown: Linker sequence
VDKAPYRFTHGWTYS

SEQ ID NO: 2935 - protein, 16 aa, Unknown
  Description of Unknown: Linker sequence
HRGAHIYMNSWQSIDF

SEQ ID NO: 2936 - protein, 17 aa, Unknown
  Description of Unknown: Linker sequence
RENGLVRSPGGFPGEDL

SEQ ID NO: 2937 - protein, 18 aa, Unknown
  Description of Unknown: Linker sequence
VAGVGTRSSDGFQTSGDY

SEQ ID NO: 2938 - protein, 21 aa, Unknown
  Description of Unknown: Linker sequence
EIHVEQKLPQKLSAKAKELPI

SEQ ID NO: 2939 - protein, 6 aa, Unknown
  Description of Unknown: Linker sequence
RWQSFN

SEQ ID NO: 2940 - protein, 9 aa, Unknown
  Description of Unknown: Linker sequence
SLTARPGFL

SEQ ID NO: 2941 - protein, 10 aa, Unknown
  Description of Unknown: Linker sequence
LRIPFSEHLG

SEQ ID NO: 2942 - protein, 10 aa, Unknown
  Description of Unknown: Linker sequence
VVGGQQGSLE

SEQ ID NO: 2943 - protein, 13 aa, Unknown
  Description of Unknown: Linker sequence
DDFDKDTLNINFQ

SEQ ID NO: 2944 - protein, 13 aa, Unknown
  Description of Unknown: Linker sequence
YGRESLQSKFTQA

SEQ ID NO: 2945 - protein, 18 aa, Unknown
  Description of Unknown: Linker sequence
VEAPDLPQQEWAPTYEER

SEQ ID NO: 2946 - protein, 31 aa, Unknown
  Description of Unknown: Linker sequence
IGCPGDTQGDTYLSKGDKRVNEDAVRGLKAE

SEQ ID NO: 2947 - protein, 20 aa, Unknown
  Description of Unknown: Linker sequence
FQGYYLVSPSETFLERDVLK

SEQ ID NO: 2948 - DNA, 1374 bp, Artificial Sequence
  Description of Artificial Sequence: Synthetic polynucleotide
atggaatggacctgggtctttctcttcctcctgtcagtaactgcaggtgtccactcccaggttcagctgcagcagtctggagctgagctgatgaagcctggggcctcagtgaagatatcctgcaaggctactggctacacattcagtaactactggatagagtgggtaaagcagaggcctggacatggccttgagtggattggagagattttacctggaagtgatagtattaagtacaatgagaatttcaagggcaaggccacattcactgcagatacatcctccaacacagcctacatgcaactcagcagcctgacatctgaggactctgccgtctattactgtgcaagaagggggaactacccagactactggggccaaggcaccactctcacagtctcctcagccaaaacgacacccccatctgtctatccactggcccctggatctgctgcccaaactaactccatggtgaccctgggatgcctggtcaagggctatttccctgagccagtgacagtgacctggaactctggatccctgtccagcggtgtgcacaccttcccagctgtcctgcagtctgacctctacactctgagcagctcagtgactgtcccctccagcacctggcccagcgagaccgtcacctgcaacgttgcccacccggccagcagcaccaaggtggacaagaaaattgtgcccagggattgtggttgtaagccttgcatatgtacagtcccagaagtatcatctgtcttcatcttccccccaaagcccaaggatgtgctcaccattactctgactcctaaggtcacgtgtgttgtggtagacatcagcaaggatgatcccgaggtccagttcagctggtttgtagatgatgtggaggtgcacacagctcagacgcaaccccgggaggagcagttcaacagcactttccgctcagtcagtgaacttcccatcatgcaccaggactggctcaatggcaaggagttcaaatgcagggtcaacagtgcagctttccctgcccccatcgagaaaaccatctccaaaaccaaaggcagaccgaaggctccacaggtgtacaccattccacctcccaaggagcagatggccaaggataaagtcagtctgacctgcatgataacagacttcttccctgaagacattactgtggagtggcagtggaatgggcagccagcggagaactacaagaacactcagcccatcatggacacagatggctcttacttcgtctacagcaagctcaatgtgcagaagagcaactgggaggcaggaaatactttcacctgctctgtgttacatgagggcctgcacaaccaccatactgagaagagcctctcccactctcctggt

SEQ ID NO: 2949 - DNA, 1377 bp, Artificial Sequence
  Description of Artificial Sequence: Synthetic polynucleotide
atgggatggagctggatctttctctttctcctgtcaggaactacaggtgtcctctctgaggtccagctgcaacagtctggacctgagctggtgaagcctggggcttcagtgaagatatcctgcaagacttctggatacacattcactgaatacaccatacactgggtgaagcagagccatggagagagccttgagtggattggaggtattaatccaaacgatggtggtactatttacaaccagaagttcaagggcaaggccacattgactgtagacaagtcctccaaaacagcctacatggagctccgcagcctgacatctgaggattctgcagtcttttactgtgcaagagggccctccgccaggtttccttactggggccaagggactctggtcactgtctctgcagccaaaacgacacccccatctgtctatccactggcccctggatctgctgcccaaactaactccatggtgaccctgggatgcctggtcaagggctatttccctgagccagtgacagtgacctggaactctggatccctgtccagcggtgtgcacaccttcccagctgtcctgcagtctgacctctacactctgagcagctcagtgactgtcccctccagcacctggcccagcgagaccgtcacctgcaacgttgcccacccggccagcagcaccaaggtggacaagaaaattgtgcccagggattgtggttgtaagccttgcatatgtacagtcccagaagtatcatctgtcttcatcttccccccaaagcccaaggatgtgctcaccattactctgactcctaaggtcacgtgtgttgtggtagacatcagcaaggatgatcccgaggtccagttcagctggtttgtagatgatgtggaggtgcacacagctcagacgcaaccccgggaggagcagttcaacagcactttccgctcagtcagtgaacttcccatcatgcaccaggactggctcaatggcaaggagttcaaatgcagggtcaacagtgcagctttccctgcccccatcgagaaaaccatctccaaaaccaaaggcagaccgaaggctccacaggtgtacaccattccacctcccaaggagcagatggccaaggataaagtcagtctgacctgcatgataacagacttcttccctgaagacattactgtggagtggcagtggaatgggcagccagcggagaactacaagaacactcagcccatcatggacacagatggctcttacttcgtctacagcaagctcaatgtgcagaagagcaactgggaggcaggaaatactttcacctgctctgtgttacatgagggcctgcacaaccaccatactgagaagagcctctcccactctcctggt

SEQ ID NO: 2950 - DNA, 1377 bp, Artificial Sequence
  Description of Artificial Sequence: Synthetic polynucleotide
atgaacttcgggctcagcttgattttccttgtccttgttttaaaaggtgtccagtgtgaggttcatctggtggagtctgggggagccttagtgaagcctggagggtccctgaaactctcctgtgcagcctctggattcagtttcagtaaatatggcatgtcttgggttcgccagactccagacaagaggctggagtgggtcgcaaccattagtagtagtgggagtcgcacctactatccagacagtgtgaagggccaattcaccatctccagagacaatgccaagaacaccctgtacctgcaaatgagcagtctgaagtctgaggacacagccatgtattactgttcaattagctgggacggtgctatggactactggggtcaagggacctcagtcaccgtctcctcagccaaaacgacacccccatctgtctatccactggcccctggatctgctgcccaaactaactccatggtgaccctgggatgcctggtcaagggctatttccctgagccagtgacagtgacctggaactctggatccctgtccagcggtgtgcacaccttcccagctgtcctgcagtctgacctctacactctgagcagctcagtgactgtcccctccagcacctggcccagcgagaccgtcacctgcaacgttgcccacccggccagcagcaccaaggtggacaagaaaattgtgcccagggattgtggttgtaagccttgcatatgtacagtcccagaagtatcatctgtcttcatcttccccccaaagcccaaggatgtgctcaccattactctgactcctaaggtcacgtgtgttgtggtagacatcagcaaggatgatcccgaggtccagttcagctggtttgtagatgatgtggaggtgcacacagctcagacgcaaccccgggaggagcagttcaacagcactttccgctcagtcagtgaacttcccatcatgcaccaggactggctcaatggcaaggagttcaaatgcagggtcaacagtgcagctttccctgcccccatcgagaaaaccatctccaaaaccaaaggcagaccgaaggctccacaggtgtacaccattccacctcccaaggagcagatggccaaggataaagtcagtctgacctgcatgataacagacttcttccctgaagacattactgtggagtggcagtggaatgggcagccagcggagaactacaagaacactcagcccatcatggacacagatggctcttacttcgtctacagcaagctcaatgtgcagaagagcaactgggaggcaggaaatactttcacctgctctgtgttacatgagggcctgcacaaccaccatactgagaagagcctctcccactctcctggt

SEQ ID NO: 2951 - protein, 217 aa, Artificial Sequence
  Description of Artificial Sequence: Synthetic polypeptide
AQAAELVMTQTPASVSAAVGGTVTINCQSSESVYNSRLSWFQQKPGQPPKLLIYFASTLASGVSSRFSGSGSGTEFTLTISGVQCDDAATYYCAGHFSNSVYTFGGGTEVVVTGDPVAPTVLIFPPSADLVATGTVTIVCVANKYFPDVTVTWEVDGTTQTTGIENSKTPQNSADCTYNLSSTLTLTSTQYNSHKEYTCKVTQGTTSVVQSFNRGDC

SEQ ID NO: 2952 - protein, 220 aa, Artificial Sequence
  Description of Artificial Sequence: Synthetic polypeptide
AQAAELVMTQTPSSVSEPVGGTVTIKCQASQSIDSYLSWYQQKPGQPPKLLIYSASTLASGVPSRFKGSGSGTQFTLTISDLECADAATYYCQSNYWSTSYSYAVPFGGGTEVVVKGDPVAPTVLIFPPSADLVATGTVTIVCVANKYFPDVTVTWEVDGTTQTTGIENSKTPQNSADCTYNLSSTLTLTSTQYNSHKEYTCKVTQGTTSVVQSFNRGDC

SEQ ID NO: 2953 - protein, 227 aa, Artificial Sequence
  Description of Artificial Sequence: Synthetic polypeptide
AAQPAMAQSVKESGGRLVTPGTPLTLACTVSGFSLNTYSMFWVRQAPGKGLQWIGIISNFGVIYYATWAKGRFTISKTSTTVDLKITSPTTEDTATYFCVRKYGSEWGGDLWGPGTLVTVSSGQPKAPSVFPLAPCCGDTPSSTVTLGCLVKGYLPEPVTVTWNSGTLTNGVRTFPSVRQSSGLYSLSSVVSVTSSSQPVTCNVAHPATNTKVDKTVAPSTCSKTSC

SEQ ID NO: 2954 - protein, 222 aa, Artificial Sequence
  Description of Artificial Sequence: Synthetic polypeptide
MAQSVEESGGRLVTPGTPLTLTCTASGFSLINYYMNWVRQAPGKGLEWIGLITGWADTYYANSAKGRFTISKTSSTTVDLKITSPTTDDTATYFCVRGGHTNIISLWGPGTLVTVSSGQPKAPSVFPLPPCCGDTPSSTVTLGCLVKGYLPEPVTVTWNSGTLTNGVRIFPSVRQSSGLYSLSSVVSVTSSSQPVTCNVAHPATNTKVDKTVAPSTCSKTSC

SEQ ID NO: 2955 - protein, 462 aa, Artificial Sequence
  Description of Artificial Sequence: Synthetic polypeptide
MGWSCIILFLVATATGVHSQVQLVQSGAEVKKPGASVKVSCKASGYTFTSYWMHWVRQAPGQGLEWIGNINPSNGGTNYNEKFKSRATMTRDTSTSTAYMELSSLRSEDTAVYYCELGQGYWGQGTLVTVSSASTKGPSVFPLAPSSKSTSGGTAALGCLVKDYFPEPVTVSWNSGALTSGVHTFPAVLQSSGLYSLSSVVTVPSSSLGTQTYICNVNHKPSNTKVDKKVEPKSCDKTHTCPPCPAPELAGAPSVFLFPPKPKDTLMISRTPEVTCVVVDVSHEDPEVKFNWYVDGVEVHNAKTKPREEQYNSTYRVVSVLTVLHQDWLNGKEYKCKVSNKALPAPIEKTISKAKGQPREPQVYTLPPSRDELTKNQVSLTCLVKGFYPSDIAVEWESNGQPENNYKTTPPVLDSDGSFFLYSKLTVDKSRWQQGNVFSCSVMHEALHNHYTQKSLSLSPGK

SEQ ID NO: 2956 - protein, 462 aa, Artificial Sequence
  Description of Artificial Sequence: Synthetic polypeptide
MGWSCIILFLVATATGVHSQVQLVQSGAEVKKPGASVKVSCKASGYTFTSYWMHWVKQRPGQGLEWIGNINPSNGGTNYNEKFKSKATLTVDKSTSTAYMELSSLRSEDTAVYYCELGQGYWGQGTLVTVSSASTKGPSVFPLAPSSKSTSGGTAALGCLVKDYFPEPVTVSWNSGALTSGVHTFPAVLQSSGLYSLSSVVTVPSSSLGTQTYICNVNHKPSNTKVDKKVEPKSCDKTHTCPPCPAPELAGAPSVFLFPPKPKDTLMISRTPEVTCVVVDVSHEDPEVKFNWYVDGVEVHNAKTKPREEQYNSTYRVVSVLTVLHQDWLNGKEYKCKVSNKALPAPIEKTISKAKGQPREPQVYTLPPSRDELTKNQVSLTCLVKGFYPSDIAVEWESNGQPENNYKTTPPVLDSDGSFFLYSKLTVDKSRWQQGNVFSCSVMHEALHNHYTQKSLSLSPGK

SEQ ID NO: 2957 - protein, 462 aa, Artificial Sequence
  Description of Artificial Sequence: Synthetic polypeptide
MGWSCIILFLVATATGVHSQVQLVQSGAEVVKPGASVKLSCKASGYTFTSYWMHWVKQRPGQGLEWIGNINPSNGGTNYNEKFKSKATLTVDKSSSTAYMELSSLRSEDSAVYYCELGQGYWGQGTLVTVSSASTKGPSVFPLAPSSKSTSGGTAALGCLVKDYFPEPVTVSWNSGALTSGVHTFPAVLQSSGLYSLSSVVTVPSSSLGTQTYICNVNHKPSNTKVDKKVEPKSCDKTHTCPPCPAPELAGAPSVFLFPPKPKDTLMISRTPEVTCVVVDVSHEDPEVKFNWYVDGVEVHNAKTKPREEQYNSTYRVVSVLTVLHQDWLNGKEYKCKVSNKALPAPIEKTISKAKGQPREPQVYTLPPSRDELTKNQVSLTCLVKGFYPSDIAVEWESNGQPENNYKTTPPVLDSDGSFFLYSKLTVDKSRWQQGNVFSCSVMHEALHNHYTQKSLSLSPGK

SEQ ID NO: 2958 - protein, 462 aa, Artificial Sequence
  Description of Artificial Sequence: Synthetic polypeptide
MGWSCIILFLVATATGVHSQVQLVQSGAEVKKPGASVKVSCKASGYTFTSYWMHWVRQRPGQGLEWIGNINPSNGGTNYNEKFKSRATMTRDTSTSTAYMELSSLRSEDTAVYYCELGQGYWGQGTLVTVSSASTKGPSVFPLAPSSKSTSGGTAALGCLVKDYFPEPVTVSWNSGALTSGVHTFPAVLQSSGLYSLSSVVTVPSSSLGTQTYICNVNHKPSNTKVDKKVEPKSCDKTHTCPPCPAPELAGAPSVFLFPPKPKDTLMISRTPEVTCVVVDVSHEDPEVKFNWYVDGVEVHNAKTKPREEQYNSTYRVVSVLTVLHQDWLNGKEYKCKVSNKALPAPIEKTISKAKGQPREPQVYTLPPSRDELTKNQVSLTCLVKGFYPSDIAVEWESNGQPENNYKTTPPVLDSDGSFFLYSKLTVDKSRWQQGNVFSCSVMHEALHNHYTQKSLSLSPGK

SEQ ID NO: 2959 - protein, 462 aa, Artificial Sequence
  Description of Artificial Sequence: Synthetic polypeptide
MGWSCIILFLVATATGVHSQVQLVQSGAEVKKPGASVKVSCKASGYTFTSYWMHWVRQAPGQGLEWIGNINPSNGGTNYNEKFKSKATMTRDTSTSTAYMELSSLRSEDTAVYYCELGQGYWGQGTLVTVSSASTKGPSVFPLAPSSKSTSGGTAALGCLVKDYFPEPVTVSWNSGALTSGVHTFPAVLQSSGLYSLSSVVTVPSSSLGTQTYICNVNHKPSNTKVDKKVEPKSCDKTHTCPPCPAPELAGAPSVFLFPPKPKDTLMISRTPEVTCVVVDVSHEDPEVKFNWYVDGVEVHNAKTKPREEQYNSTYRVVSVLTVLHQDWLNGKEYKCKVSNKALPAPIEKTISKAKGQPREPQVYTLPPSRDELTKNQVSLTCLVKGFYPSDIAVEWESNGQPENNYKTTPPVLDSDGSFFLYSKLTVDKSRWQQGNVFSCSVMHEALHNHYTQKSLSLSPGK

SEQ ID NO: 2960 - protein, 462 aa, Artificial Sequence
  Description of Artificial Sequence: Synthetic polypeptide
MGWSCIILFLVATATGVHSQVQLVQSGAEVKKPGASVKVSCKASGYTFTSYWMHWVRQRPGQGLEWIGNINPSNGGTNYNEKFKSKATMTRDTSTSTAYMELSSLRSEDTAVYYCELGQGYWGQGTLVTVSSASTKGPSVFPLAPSSKSTSGGTAALGCLVKDYFPEPVTVSWNSGALTSGVHTFPAVLQSSGLYSLSSVVTVPSSSLGTQTYICNVNHKPSNTKVDKKVEPKSCDKTHTCPPCPAPELAGAPSVFLFPPKPKDTLMISRTPEVTCVVVDVSHEDPEVKFNWYVDGVEVHNAKTKPREEQYNSTYRVVSVLTVLHQDWLNGKEYKCKVSNKALPAPIEKTISKAKGQPREPQVYTLPPSRDELTKNQVSLTCLVKGFYPSDIAVEWESNGQPENNYKTTPPVLDSDGSFFLYSKLTVDKSRWQQGNVFSCSVMHEALHNHYTQKSLSLSPGK

SEQ ID NO: 2961 - protein, 462 aa, Artificial Sequence
  Description of Artificial Sequence: Synthetic polypeptide
MGWSCIILFLVATATGVHSQVQLVQSGAEVKKPGASVKVSCKASGYTFTSYWMHWVRQRPGQGLEWMGNINPSNGGTNYNEKFKSRVTMTRDTSTSTAYMELSSLRSEDTAVYYCELGQGYWGQGTLVTVSSASTKGPSVFPLAPSSKSTSGGTAALGCLVKDYFPEPVTVSWNSGALTSGVHTFPAVLQSSGLYSLSSVVTVPSSSLGTQTYICNVNHKPSNTKVDKKVEPKSCDKTHTCPPCPAPELAGAPSVFLFPPKPKDTLMISRTPEVTCVVVDVSHEDPEVKFNWYVDGVEVHNAKTKPREEQYNSTYRVVSVLTVLHQDWLNGKEYKCKVSNKALPAPIEKTISKAKGQPREPQVYTLPPSRDELTKNQVSLTCLVKGFYPSDIAVEWESNGQPENNYKTTPPVLDSDGSFFLYSKLTVDKSRWQQGNVFSCSVMHEALHNHYTQKSLSLSPGK

SEQ ID NO: 2962 - protein, 144 aa, Artificial Sequence
  Description of Artificial Sequence: Synthetic polypeptide
MKLPVRLLVLMFWIPASSSDVVMTQTPLSLPVSLGDQASISCRSSQSLVHSNGYTYLHWYLQRPGQSPKLLIYKVSNRFSGVPDRFSGSGSGTDFTLKISRVDAEDLGVYFCSQSTHVPYTFGGGTKLEIKRADAAPTVSISHH

SEQ ID NO: 2963 - protein, 114 aa, Artificial Sequence
  Description of Artificial Sequence: Synthetic polypeptide
  MOD_RES (3)..(3): Any amino acid
LQXSGAEIVMPGTAVTMSCKASGYTFTDFWMHWVKQRPGQGLEWIGAIDPSDSYSRINQKFKGKATLTVDESSSTAYMQLSSLTSEDSAVYYCARRITEAGAWFAYWGQGTTVT

SEQ ID NO: 2964 - protein, 454 aa, Artificial Sequence
  Description of Artificial Sequence: Synthetic polypeptide
METGLRWLLLVAVLKGVQCQSVEESGGHLVTPGTPLTLTCTVSGIDLSTYAMGWVRQAPGKGLEWIGVITKSGNTYYASWAKGRFAISKTSTTVDLKITSPTTEDTATYFCGRYGIGVSYYDIWGPGTLVTVSSGQPKAPSVFPLAPCCGDTPSSTVTLGCLVKGYLPEPVTVTWNSGTLTNGVRTFPSVRQSSGLYSLSSWSVTSSSQPVTCNVAHPATNTKVDKTVAPSTCSKPTCPPPELLGGPSVFIFPPKPKDTLMISRTPEVTCVVVDVSQDDPEVQFTWYINNEQVRTARPPLREQQFNSTIRVVSTLPIAHQDWLRGKEFKCKVHNKALPAPIEKTISKARGQPLEPKVYTGPPREELSSRSVSLTCMINGFYPSDISVEWEKNGKAEDNYKTTPAVLDSDGSYFLYSKLSVPTSEWQRGDVFTCSVHEALHNHYTQKSISRSPGK

SEQ ID NO: 2965 - protein, 450 aa, Artificial Sequence
  Description of Artificial Sequence: Synthetic polypeptide
METGLRWLLLVAVLKGVQCQSVEESGGHLVTPGTPLTLTCTVSGIDLSTYAMGWVRQAPGKGLEWIGVITKSGNTYYASWAKGRFAISKTSTTVDLKITSPTTEDTATYFCGRYGIGVSYYDIWGPGTLVTVSSGQPKAPSVFPLAPCCGDTPSSTVTLGCLVKGYLPEPVTVTWNSGTLTNGVRTFPSVRQSSGLYSLSSVVSVTSSSQPVTCNVAHPATNTKVDKTVAPSTCSKPTCPPPELLGGPSVFIFPPKPKDTLMISRTPEVTCVVVDVSQDDPEVQFTWYINNEQVRTARPPLREQQFNSTIRVVSTLPIAHQDWLRGKEEKCKVHNKALPAPIEKTISKARGQPLEPKVYTMGPPREELSSRSVSLTCMINGFYPSDISVEWEKNGKAEDNYKTTPAVLDSDGSYFLYSKLSVPTSEWQRGDVFTCSVMHEALHNHYTQKS

SEQ ID NO: 2966 - protein, 179 aa, Artificial Sequence
  Description of Artificial Sequence: Synthetic polypeptide
MKYLLPTAAAGLLLLAAQPAMAMAEVQLQQSGAELARPGTSVNLSCKTSGYSFTGYGVSWVKQRIGQGLEWIGEIYPRSGNTYYNEKFKGKATLTADKSSNTAYMELRSLTSEDSAVYFCARWNWERDAMDYWGQGTSVTVSSAKTTPPSDYPLAGGGGSGGGGSGGGGSDIVMTQTPL

SEQ ID NO: 2967 - protein, 121 aa, Artificial Sequence
  Description of Artificial Sequence: Synthetic polypeptide
EVQLVESGGGLVQPGGSLKLSCAASGFNFQISAIHWVRQASGKGLEWVGRIRSKSHNYATLYAASLKGRFTLSRDDSRNTAYLQMSSLQTEDMAVYYCTVLSANYDTFDYWGQGTLVTVSS

SEQ ID NO: 2968 - protein, 441 aa, Artificial Sequence
  Description of Artificial Sequence: Synthetic polypeptide
QVQLVQSGAEVKKPGSSVKVSCKASGYTFTDYYMNWVRQAPGQGLEWIGDINPNRGGTTYNQKFKGRVTITVDKSTSTAYMELSSLRSEDTAVYYCASYYAVGYWGQGTTVTVSSASTKGPSVFPLAPCSRSTSESTAALGCLVKDYFPEPVTVSWNSGALTSGVHTFPAVLQSSGLYSLSSVVTVPSSSLGTKTYTCNVDHKPSNTKVDKRVESKYGPPCPPCPAPEFLGGPSVFLFPPKPKDTLMISRTPEVTCVVVDVSQEDPEVQFNWYVDGVEVHNAKTKPREEQFNSTYRVVSVLTVLHQDWLNGKEYKCKVSNKGLPSSIEKTISKAKGQPREPQVYTLPPSQEEMTKNQVSLTCLVKGFYPSDIAVEWESNGQPENNYKTTPPVLDSDGSFFLYSRLTVDKSRWQEGNVFSCSVMHEALHNHYTQKSLSLSLG

SEQ ID NO: 2969 - protein, 440 aa, Artificial Sequence
  Description of Artificial Sequence: Synthetic polypeptide
QVQLVQSGAEVKKPGSSVKVSCKASGYTFTDYYMNWVRQAPGQGLEWIGDINPNRGGTTYNQKFKGRVTITVDKSTSTAYMELSSLRSEDTAVYYCASYYAVGYWGQGTTVTVSSASTKGPSVFPLAPCSRSTSESTAALGCLVKDYFPEPVTVSWNSGALTSGVHTFPAVLQSSGLYSLSSVVTVPSSSLGTKTYTCNVDHKPSNTKVDKRVESKYGPPCPPCPAPEFLGGPSVFLFPPKPKDTLMISRTPEVTCVVVDVSQEDPEVQFNWYVDGVEVHNAKTKPREEQFNSTYRWSVLTVLHQDWLNGKEYKCKVSNKGLPSSIEKTISKAKGQPREPQVYTLPPSQEEMTKNQVSLTCLVKGFYPSDIAVEWESNGQPENNYKTTPPVLDSDGSFFLYSRLTVDKSRWQEGNVFSCSVMHEALHNHYTQKSLSLSLG

SEQ ID NO: 2970 - protein, 416 aa, Artificial Sequence
  Description of Artificial Sequence: Synthetic polypeptide
EVQLVQSGAEVKKPGSSVKVSCKASGYTFTDYYMNWVRQAPGQGLEWIGDINPNRGGTTYNQKFKGRVTITVDKSTSTAYMELSSLRSSASTKGPSVFPLAPCSRSTSESTAALGCLVKDYFPEPVTVSWNSGALTSGVHTFPAVLQSSGLYSLSSVVTVPSSSLGTKTYTCNVDNKPSNTKVDKRVESKYGPPCPPCPAPEFLGGPSVFLFPPKPKDTLMISRTPEVICVVVDVSQEDPEVQFNWYVDGVEVHNAKTKPREEQFNSTYRVVSVLTVLHQDWLNGKEYKCKVSNKGLPSSIEKTISKAKGQPREPQVYTLPPSQEEMTKNQVSLTCLVKGFYPSDIAVEWESNGQPENNYKTTPPVLDSDGSFFLYSRLIVDKSRWQEGNVESCSVMHEALHNHYTQKSLSLSLGK

SEQ ID NO: 2971 - protein, 446 aa, Artificial Sequence
  Description of Artificial Sequence: Synthetic polypeptide
EVQLVQSGAEVKKPGSSVKVSCKASGYTFTDYYMNWVRQAPGQGLEWIGDINPNRGGTTYNQKFKGRVTITVDKSTSTAYMELSSLRSEDTAVYYCASYYAVGYWGQGTTVTVSSASTKGPSVFPLAPSSKSTSGGTAALGCLVKDYFPEPVTVSWNSGALTSGVHTFPAVLQSSGLYSLSSVVTVPSSSLGTQTYICNVNHKPSNTKVDKKVEPKSCDKTHTCPPCPAPELLGGPSVFLFPPKPKDTLMISRTPEVTCVVVDVSHEDPEVKFNWYVDGVEVHNAKTKPREEQYNSTYRVVSVLTVLFHQDWLNGKEYKCKVSNKALPAPIEKTISKAKGQPREPQVYTLPPSREEMTKNQVSLTCLVKGFYPSDIAVEWESNGQPENNYKTTPPVLDSDGSFELYSKLTVDKSRWQQGNVFSCSVMHEALHNHYTQKSLSLSPGK

SEQ ID NO: 2972 - protein, 445 aa, Artificial Sequence
  Description of Artificial Sequence: Synthetic polypeptide
EVQLVQSGAEVKKPGSSVKVSCKASGYTFTDYYMNWVRQAPGQGLEWIGDINPNRGGTTYNQKFKGRVTITVDKSTSTAYMELSSLRSEDTAVYYCASYYAVGYWGQGTTVTVSSASTKGPSVFPLAPSSKSTSGGTAALGCLVKDYFPEPVTVSWNSGALTSGVHTFPAVLQSSGLYSLSSVVTVPSSSLGTQTYICNVNHKPSNTKVDKKVEPKSCDKTHTCPPCPAPELLGGPSVFLFPPKPKDTLMISRTPEVICVVVDVSHEDPEVKFNWYVDGVEVHNAKTKPREEQYGSTYRVVSVLTVLHQDWLNGKEYKCKVSNKALPAPIEKTISKAKGQPREPQVYTLPPSREEMTKNQVSLTCLVKGFYPSDIAVEWESNGQPENNYKTTPPVLDSDGSFFLYSKLTVDKSRWQQGNVFSCSVMHEALHNHYTQKSLSLSPGK

SEQ ID NO: 2973 - protein, 442 aa, Artificial Sequence
  Description of Artificial Sequence: Synthetic polypeptide
EVQLVQSGAEVKKPGSSVKVSCKASGYTFTDYYMNWVRQAPGQGLEWIGDINPNRGGTTYNQKFKGRVTITVDKSTSTAYMELSSLRSEDTAVYYCASYYAVGYWGQGTTVTVSSASTKGPSVFPLAPSSKSTSGGTAALGCLVKDYFPEPVTVSWNSGALTSGVHTFPAVLQSSGLYSLSSVVTVPSSSLGTQTYICNVNHKPSNTKVDKKVEPKSCDKTHTCPPCPAPELLSVFLFPPKPKDTLMISRTPEVTCVVVDVSQEDPEVQFNWYVDGVEVHNAKTKPREEQFNSTYRVVSVLTVLHQDWLNGKEYKCKVSNKGLPSSIEKTISKAKGQPREPQVYTLPPSQEEMTKNQVSLTCLVKGEYPSDIAVEWESNGQPENNYKTTPPVLDSDGSFFLYSRLTVDKSRWQEGNVFSCSVMHEALHNHYTQKSLSLSLGK

SEQ ID NO: 2974 - protein, 445 aa, Artificial Sequence
  Description of Artificial Sequence: Synthetic polypeptide
EVQLVQSGAEVKKPGSSVKVSCKASGYTFTDYYMNWVRQAPGQGLEWIGDINPNRGGTTYNQKFKGRVTITVDKSTSTAYMELSSLRSEDTAVYYCASYYAVGYWGQGTTVTVSSASTKGPSVFPLAPSSKSTSGGTAALGCLVKDYFPEPVTVSWNSGALTSGVHTFPAVLQSSGLYSLSSVVTVPSSSLGTQTYICNVNHKPSNTKVDKKVEPKSCDKTHTCPPCPAPELLGGPSVFLFPPKPKDTLMISRTPEVTCVVVDVSHEDPEVKFNWYVDGVEVHNAKTKPREEQYNSTYRVVSVLTVLHQDWLNGKEYKCKVSNKALPAPIEKTISKAKGQPREPQVYTLPPSREEMTKNQVSLTCLVKGFYPSDIAVEWESNGQPENNYKTTPPVLDSDGSFFLYSKLTVDKSRWQQGNVESCSVMHEALHNHYTQKSLSLSPGK

SEQ ID NO: 2975 - protein, 444 aa, Artificial Sequence
  Description of Artificial Sequence: Synthetic polypeptide
EVQLVQSGAEVKKPGSSVKVSCKASGYTFTDYYMNWVRQAPGQGLEWIGDINPNRGGTTYNKFKGRVTITVDKSTSTAYMELSSLRSEDTAVYYCASYYAVGYWGQGTTVTVSSASTKGPSVFPLAPSSKSTSGGTAALGCLVKDYFPEPVTVSWNSGALTSGVHTFPAVLQSSGLYSLSSVVTVPSSSLGTQTYICNVNHKPSNTKVDKKVEPKSCDKTHTCPPCPAPELLGGPSVFLFPPKPKDTLMISRTPEVTCVVVDVSHEDPEVKFNWYVDGVEVHNAKTKPREEQYGSTYRVVSVLTVLHQDWLNGKEYKCKVSNKALPAPIEKTISKAKGQPREPQVYTLPPSREEMTKNQVSLTCLVKGFYPSDIAVEWESNGQPENNYKTTPPVLDSDGSFFLYSKLTVDKSRWQQGNVFSCSVMHEALHNHYTQKSLSLSPGK

SEQ ID NO: 2976 - protein, 117 aa, Artificial Sequence
  Description of Artificial Sequence: Synthetic polypeptide
EVQLVESGEDLVKPGGSLKLSCVASGFAFSSYGMSWVRQTPDMRLEWVATISSSGSRTYFPDSVKGRLTISRDNDKNILYLQMSSLRSEDTAMYYCTITWDGAMDYWGRGISVTVSS

SEQ ID NO: 2977 - protein, 112 aa, Artificial Sequence
  Description of Artificial Sequence: Synthetic polypeptide
DVLMTQTPLSLPVSLGDQASISCKSSQSIVHSNGNTYLEWYLQKPGQSPKLLVYKVSNRFSGVPDRFSGSGSGTDFTLKISRVEAEDLGTYYCFQGSLVPWAFGGGTKLEIK

SEQ ID NO: 2978 - protein, 110 aa, Artificial Sequence
  Description of Artificial Sequence: Synthetic polypeptide
APEFLGGPSVFLFPPKPKDTLMISRTPEVTCVVVDVSQEDPEVQFNWYVDGVEVHNAKTKPREEQFNSTYRVVSVLTVLHQDWLNGKEYKCKVSNKGLPSSIEKTISKAK

SEQ ID NO: 2979 - protein, 106 aa, Artificial Sequence
  Description of Artificial Sequence: Synthetic polypeptide
GQPREPQVYTLPPSQEEMTKNQVSLTCLVKGFYPSDIAVEWESNGQPENNYKTTPPVLDSDGSFFLYSRLTVDKSRWQEGNVFSCSVMHEALHNHYTQKSLSLSLG

SEQ ID NO: 2980 - protein, 441 aa, Artificial Sequence; identical to SEQ ID NO: 2968
  Description of Artificial Sequence: Synthetic polypeptide

SEQ ID NO: 2981 - protein, 442 aa, Artificial Sequence
  Description of Artificial Sequence: Synthetic polypeptide
EVQLVQSGAEVKKPGSSVKVSCKASGYTFTDYYMNWVRQAPGQGLEWIGDINPNRGGTTYNQKFKGRVTITVDKSTSTAYMELSSLRSEDTAVYYCASYYAVGYWGQGTTVTVSSASTKGPSVFPLAPCSRSTSESTAALGCLVKDYFPEPVTVSWNSGALTSGVHTFPAVLQSSGLYSLSSVVTVPSSSLGTKTYTCNVDHKPSNTKVDKRVESKYGPPCPPCPAPEFLGGPSVFLFPPKPKDTLMISRTPEVTCVVVDVSQEDPEVQFNWYVDGVEVHNAKTKPREEQFNSTYRVVSVLTVLHQDWLNGKEYKCKVSNKGLPSSIEKTISKAKGQPREPQVYTLPPSQEEMTKNQVSLTCLVKGFYPSDIAVEWESNGQPENNYKTTPPVLDSDGSFFLYSRLTVDKSRWQEGNVFSCSVMHEALHNHYTQKSLSLSLGK

SEQ ID NO: 2982 - protein, 445 aa, Artificial Sequence
  Description of Artificial Sequence: Synthetic polypeptide
EVQLVQSGAEVKKPGSSVKVSCKASGYTFTDYYMNWVRQAPGQGLEWIGDINPNRGGTTYNQKFKGRVTITVDKSTSTAYMELSSLRSEDTAVYYCASYYAVGYWGQGTTVTVSSASTKGPSVFPLAPSSKSTSGGTAALGCLVKDYFPEPVTVSWNSGALTSGVHTFPAVLQSSGLYSLSSVVTVPSSSLGTQTYICNVNHKPSNTKVDKKVEPKSCDKTHTCPPCPAPELLGGPSVFLFPPKPKDTLMISRTPEVTCVVVDVSHEDPEVKFNWYVDGVEVHNAKTKPREEQYNSTYRVVSVLTVLHQDWLNGKEYKCKVSNKALPAPIEKTISKAKGQPREPQVYTLPPSREEMTKNQVSLTCLVKGFYPSDIAVEWESNGQPENNYKTTPPVLDSDGSFFLYSKLTVDKSRWQQGNVFSCSVMHEALHNHYTQKSLSLSPGK

SEQ ID NO: 2983 - protein, 445 aa, Artificial Sequence
  Description of Artificial Sequence: Synthetic polypeptide
EVQLVQSGAEVKKPGSSVKVSCKASGYTFTDYYMNWVRQAPGQGLEWIGDINPNRGGTTYNQKFKGRVTITVDKSTSTAYMELSSLRSEDTAVYYCASYYAVGYWGQGTTVTVSSASTKGPSVFPLAPSSKSTSGGTAALGCLVKDYFPEPVTVSWNSGALTSGVHTFPAVLQSSGLYSLSSVVTVPSSSLGTQTYICNVNHKPSNTKVDKKVEPKSCDKTHTCPPCPAPELLGGPSVFLFPPKPKDTLMISRTPEVTCVVVDVSHEDPEVKFNWYVDGVEVHNAKTKPREEQYGSTYRVVSVLTVLHQDWLNGKEYKCKVSNKALPAPIEKTISKAKGQPREPQVYTLPPSREEMTKNQVSLTCLVKGFYPSDIAVEWESNGQPENNYKTTPPVLDSDGSFFLYSKLTVDKSRWQQGNVFSCSVMHEALHNHYTQKSLSLSPGK

SEQ ID NO: 2984 - protein, 442 aa, Artificial Sequence; identical to SEQ ID NO: 2981
  Description of Artificial Sequence: Synthetic polypeptide

SEQ ID NO: 2985 - protein, 408 aa, Artificial Sequence
  Description of Artificial Sequence: Synthetic polypeptide
RQAPGQGLEWIGDINPNRGGTTYNQKFKGRVTITVDKSTSTAYMELSSLRSEDTAVYYCASYYAVGYWGQGTTVTVSSASTKGPSVFPLAPSSKSTSGGTAALGCLVKDYFPEPVTVSWNSGALTSGVHTFPAVLQSSGLYSLSSVVTVPSSSLGTQTYICNVNHKPSNTKVDKKVEPKSCDKTHTCPPCPAPELLGGPSVFLFPPKPKDTLMISRTPEVTCVVVDVSHEDPEVKFNWYVDGVEVHNAKTKPREEQYNSTYRVVSVLTVLHQDWLNGKEYKCKVSNKALPAPIEKTISKAKGQPREPQVYTLPPSREEMTKNQVSLTCLVKGFYPSDIAVEWESNGQPENNYKTTPPVLDSDGSFFLYSKLTVDKSRWQQGNVFSCSVMHEALHNHYTQKSLSLSPGK

SEQ ID NO: 2986 - protein, 445 aa, Artificial Sequence; identical to SEQ ID NO: 2983
  Description of Artificial Sequence: Synthetic polypeptide

SEQ ID NO: 2987 - protein, 122 aa, Artificial Sequence
  Description of Artificial Sequence: Synthetic polypeptide
NQVQLQQSGAELMQPGASVKISCKSTGYTFSNFWIEWVKQRPGHGLEWIGEILPGSDNTNYNEKFKGKATFTADTSSNTAYMQLSSLTSEDSAVYYCARKNRNYYGNYVVWGQGTLVTVSAC

SEQ ID NO: 2988 - protein, 122 aa, Artificial Sequence
  Description of Artificial Sequence: Synthetic polypeptide
NQVQLQQSGAELMQPGASVKISCKSTGYTFSNFWIEWVKQRPGHGLEWIGEILPGSDNTNYNEKFKGKATFTADTSSNTAYMQLSSLTSEDSAVYYCARKNRNYYGNYVVWGAGTTLTVSSC

SEQ ID NO: 2989 - protein, 126 aa, Artificial Sequence
  Description of Artificial Sequence: Synthetic polypeptide
NQVQLQQPGAELVKPGASVKLSCKASGYTFTSYWMHWVKQRPGQGLEWIGEIYPSNGRTNYNEKFKSKATLTVDKSSSTAYMQLSSLTSEDSAVYYCARKYYYGNSYRSWYFDVWGAGTTLTVSSC

SEQ ID NO: 2990 - protein, 130 aa, Artificial Sequence
  Description of Artificial Sequence: Synthetic polypeptide
NQVQLQESGPGLVKPSQTLSLTCTVSGGSISSGGYYWSWIRQHPGKGLEWIGYIYYSGSTNYNPSLKSRVTISVDTSKNQFSLKLSSVTAADTAVYYCTRDRDYDSTGDYYSYYGMDVWGQGTTVTVSSC

SEQ ID NO: 2991 - protein, 119 aa, Artificial Sequence
  Description of Artificial Sequence: Synthetic polypeptide
NQVQLQESGPGLVRPSETLSLTCTVSGGSISTYYWNWIRQPAGKGLEWIGRIYTSGSTNYNPSLKSRVTMSVDTSKNQFSLKLSSVTAADTAVYYCARDGGYSNPFDWGQGTLVTVSSC

SEQ ID NO: 2992 - protein, 129 aa, Artificial Sequence
  Description of Artificial Sequence: Synthetic polypeptide
NQVQLQESGPGLVKPSQTLSLTCTVSGGSISSGGYYWSWIRQHPEKGLEWIGYIFYSGRTYYNPSLKSRVTISVDTSKNQFSLKLNSVTAADTAVYYCARERIAAAGADYYYNGLDVWGQGTTVTVSSC

SEQ ID NO: 2993 - protein, 129 aa, Artificial Sequence
  Description of Artificial Sequence: Synthetic polypeptide
NQVQLQESGPGLVKPSQTLSLTCTVSGGSISSGYYYWSWIRQHPGKGLEWIGYIYYSGSTYYNPSLKSRLTISVDTSKNQFSLKLSSVTAADTAVYYCARERIAAAGTDYYYNGLAVWGQGTTVTVSSC

SEQ ID NO: 2994 - protein, 98 aa, Artificial Sequence
  Description of Artificial Sequence: Synthetic polypeptide
ASTKGPSVFPLAPCSRSTSESTAALGCLVKDYFPEPVTVSWNSGALTSGVHTFPAVLQSSGLYSLSSVVTVPSSSLGTKTYTCNVDHKPSNTKVDKRV

SEQ ID NO: 2995 - protein, 582 aa, Artificial Sequence [sequence omitted]

SEQ ID NO: 2996 - protein, 582 aa, Artificial Sequence [sequence omitted]

SEQ ID NO: 2997 - protein, 582 aa, Artificial Sequence [sequence omitted]

SEQ ID NO: 2998 - protein, 582 aa, Artificial Sequence
  Description of Artificial Sequence: Synthetic polypeptide
MECSWVMLFLLSGTAGVHCQVQLQQSGPELVKPGALVKISCKASGYTFTNYDIHWVKQRPGQGLEWIGWIYPGDGSTKYNEKFKGKATLTADKSSSTAYMHLSSLTSEKSAVYFCAREWAYWGQGTLVTVSAASTKGPSVFPLAPSSKSTSGGTAALGCLVKDYFPEPVTVSWNSGALTSGVHTFPAVLQSSGLYSLSSVVTVPSSSLGTQTYICNVNHKPSNTKVDKKVEPKSCDKTHTCPPCPAPELLGGPSVFLFPPKPKDTLMISRTPEVTCVVVDVSHEDPEVKFNWYVDGVEVHNAKTKPREEQYNSTYRVVRVLTVLHQDWLNGKEYKCKVSNKALPAPIEKTISKAKGQPREPQVYTLPPSRDELTKNQVSLTCLVKGFYPSDIAVEWESNGQPENNYKTTPPVLDSDGSFFLYSKLTVDKSRWQQGNVFSCSVMHEALHNHYTQKSLSLSPGKSSMHSDPARRGELSVCDSISEWVTAADKKTAVDMSGGTVTVLEKVPVSKGQLKQYFYETKCNPMGYTKEGCRGIDKRHWNSQCRTTQSYVRALTMDSKKRIGWRFIRIDTSCVCTLTIKR

SEQ ID NO: 2999 - protein, 460 aa, Artificial Sequence
  Description of Artificial Sequence: Synthetic polypeptide
MGWSCIILFLVATATGVHSQVQLVQSGAEVKKPGASVKVSCKASGYTFTSYWMHWVRQAPGQGLEWMGNINPSNGGTNYNEKFKSRVTMTRDTSTSTVYMELSSLRSEDTAVYYCELGQGYWGQGTLVTVSSASTKGPSVFPLAPSSKSTSGGTAALGCLVKDYFPEPVTVSWNSGALTSGVHTFPAVLQSSGLYSLSSWTVPSSSLGTQTYICNVNHKPSNTKVDKKVEPKSCDKTHTCPPCPAPELAGAPSVFLFPPKPKDTLMISRTPEVTCVWDVSHEDPEVKFNWYVDGVEVHNAKTKPREEQYNSTYRVVSVLTVLHQDWLNGKEYKCKVSNKALPAPIEKTISKAKGQPREPQVYTLPPSRDELTKNQVSLTCLVKGFYPSDIAVEWESNGQPENNYKTTPPVLDSDGSFFLYSKLTVDKSRWQQGNVFSCSVMHEALHNHYTQKSLSLSPGK

SEQ ID NO: 3000 - protein, 458 aa, Artificial Sequence
  Description of Artificial Sequence: Synthetic polypeptide
MGWSCIILFLVATATGVHSQVQLVQSGAEWKPGASVKLSCKASGYTFTSYWMHWVKQAPGQGLEWIGNINPSNGGTNYNEKFKSRATLTRDTSTSTAYMELSSLRSEDTAVYYCELGQGYWGQGTLVTVSSASTKGPSVFPLAPSSKSTSGGTAALGCLVKDYFPEPVTVSWNSGALTSGVHTFPAVLQSSGLYSLSSWTVPSSSLGTQTYICNVNHKPSNTKVDKKVEPKSCDKTHTCPPCPAPELAGAPSVFLFPPKPKDTLMISRTPEVTCVWDVSHEDPEVKFNWYVDGVEVHNAKTKPREEQYNSTYRWSVLTVLHQDWLNGKEYKCKVSNKALPAPIEKTISKAKGQPREPQVYTLPPSRDELTKNQVSLTCLVKGFYPSDIAVEWESNGQPENNYKTTPPVLDSDGSFFLYSKLTVDKSRWQQGNVFSCSVMHEALHNHYTQKSLSLSPGK

SEQ ID NO: 3001 - protein, 459 aa, Artificial Sequence
  Description of Artificial Sequence: Synthetic polypeptide
MGWSCIILFLVATATGVHSQVQLVQSGAEWKPGASVKLSCKASGYTFTSYWMHWVKQRPGQGLEWIGNINPSNGGTNYNEKFKSKATLTVDTSSSTAYMELSSLRSEDSAVYYCELGQGYWGQGTLVTVSSASTKGPSVFPLAPSSKSTSGGTAALGCLVKDYFPEPVTVSWNSGALTSGVHTFPAVLQSSGLYSLSSWTVPSSSLGTQTYICNVNHKPSNTKVDKKVEPKSCDKTHTCPPCPAPELAGAPSVFLFPPKPKDTLMISRTPEVTCVWDVSHEDPEVKFNWYVDGVEVHNAKTKPREEQYNSTYRVVSVLTVLHQDWLNGKEYKCKVSNKALPAPIEKTISKAKGQPREPQVYTLPPSRDELTKNQVSLTCLVKGFYPSDIAVEWESNGQPENNYKTTPPVLDSDGSFFLYSKLTVDKSRWQQGNVFSCSVMHEALHNHYTQKSLSLSPGK

SEQ ID NO: 3002 - protein, 459 aa, Artificial Sequence
  Description of Artificial Sequence: Synthetic polypeptide
MGWSCIILFLVATATGVHSQVQLVQSGAEVKKPGASVKVSCKASGYTFTSYWMHWVKQRPGQGLEWIGNINPSNGGTNYNEKFKSKATLTVDKSTSTAYMELSSLRSEDTAVYYCELGQGYWGQGTLVTVSSASTKGPSVFPLAPSSKSTSGGTAALGCLVKDYFPEPVTVSWNSGALTSGVHTFPAVLQSSGLYSLSSWTVPSSSLGTQTYICNVNHKPSNTKVDKKVEPKSCDKTHTCPPCPAPELAGAPSVFLFPPKPKDTLMISRTPEVTCVWDVSHEDPEVKFNWYVDGVEVHNAKTKPREEQYNSTYRWSVLTVLHQDWLNGKEYKCKVSNKALPAPIEKTISKAKGQPREPQVYTLPPSRDELTKNQVSLTCLVKGFYPSDIAVEWESNGQPENNYKTTPPVLDSDGSFFLYSKLTVDKSRWQQGNVFSCSVMHEALHNHYTQKSLSLSPGK

SEQ ID NO: 3003 - protein, 458 aa, Artificial Sequence
  Description of Artificial Sequence: Synthetic polypeptide
MGWSCIILFLVATATGVHSQVQLVQSGAEWKPGASVKLSCKASGYTFTSYWMHWVKQRPGQGLEWIGNINPSNGGTNYNEKFKSKATLTVDKSTSTAYMELSSLRSEDTAVYYCELGQGYWGQGTLVTVSSASTKGPSVFPLAPSSKSTSGGTAALGCLVKDYFPEPVTVSWNSGALTSGVHTFPAVLQSSGLYSLSSWTVPSSSLGTQTYICNVNHKPSNTKVDKKVEPKSCDKTHTCPPCPAPELAGAPSVFLFPPKPKDTLMISRTPEVTCVWDVSHEDPEVKFNWYVDGVEVHNAKTKPREEQYNSTYRWSVLTVLHQDWLNGKEYKCKVSNKALPAPIEKTISKAKGQPREPQVYTLPPSRDELTKNQVSLTCLVKGFYPSDIAVEWESNGQPENNYKTTPPVLDSDGSFFLYSKLTVDKSRWQQGNVFSCSVMHEALHNHYTQKSLSLSPGK

SEQ ID NO: 3004 - protein, 458 aa, Artificial Sequence
  Description of Artificial Sequence: Synthetic polypeptide
MGWSCIILFLVATATGVHSQVQLVQSGAEWKPGASVKLSCKASGYTFTSYWMHWVKQRPGQGLEWIGNINPSNGGTNYNEKFKSKATLTVDKSSSTAYMELSSLRSEDSAVYYCELGQGYWGQGTLVTVSSASTKGPSVFPLAPSSKSTSGGTAALGCLVKDYFPEPVTVSWNSGALTSGVHTFPAVLQSSGLYSLSSWTVPSSSLGTQTYICNVNHKPSNTKVDKKVEPKSCDKTHTCPPCPAPELAGAPSVFLFPPKPKDTLMISRTPEVTCVWDVSHEDPEVKFNWYVDGVEVHNAKTKPREEQYNSTYRWSVLTVLHQDWLNGKEYKCKVSNKALPAPIEKTISKAKGQPREPQVYTLPPSRDELTKNQVSLTCLVKGFYPSDIAVEWESNGQPENNYKTTPPVLDSDGSFFLYSKLTVDKSRWQQGNVFSCSVMHEALHNHYTQKSLSLSPGK

SEQ ID NO: 3005 - protein, 460 aa, Artificial Sequence
  Description of Artificial Sequence: Synthetic polypeptide
MGWSCIILFLVATATGVHSQVQLVQSGAEVKKPGASVKVSCKASGYTFTSYWMHWVRQRPGQGLEWIGNINPSNGGTNYNEKFKSRATMTRDTSTSTAYMELSSLRSEDTAVYYCELGQGYWGQGTLVTVSSASTKGPSVFPLAPSSKSTSGGTAALGCLVKDYFPEPVTVSWNSGALTSGVHTFPAVLQSSGLYSLSSWTVPSSSLGTQTYICNVNHKPSNTKVDKKVEPKSCDKTHTCPPCPAPELAGAPSVFLFPPKPKDTLMISRTPEVTCVWDVSHEDPEVKFNWYVDGVEVHNAKTKPREEQYNSTYRVVSVLTVLHQDWLNGKEYKCKVSNKALPAPIEKTISKAKGQPREPQVYTLPPSRDELTKNQVSLTCLVKGFYPSDIAVEWESNGQPENNYKTTPPVLDSDGSFFLYSKLTVDKSRWQQGNVFSCSVMHEALHNHYTQKSLSLSPGK

SEQ ID NO: 3006 - protein, 459 aa, Artificial Sequence
  Description of Artificial Sequence: Synthetic polypeptide
MGWSCIILFLVATATGVHSQVQLVQSGAEVKKPGASVKVSCKASGYTFTSYWMHWVRQAPGQGLEWIGNINPSNGGTNYNEKFKSKATMTRDTSTSTAYMELSSLRSEDTAVYYCELGQGYWGQGTLVTVSSASTKGPSVFPLAPSSKSTSGGTAALGCLVKDYFPEPVTVSWNSGALTSGVHTFPAVLQSSGLYSLSSWTVPSSSLGTQTYICNVNHKPSNTKVDKKVEPKSCDKTHTCPPCPAPELAGAPSVFLFPPKPKDTLMISRTPEVTCVWDVSHEDPEVKFNWYVDGVEVHNAKTKPREEQYNSTYRWSVLTVLHQDWLNGKEYKCKVSNKALPAPIEKTISKAKGQPREPQVYTLPPSRDELTKNQVSLTCLVKGFYPSDIAVEWESNGQPENNYKTTPPVLDSDGSFFLYSKLTVDKSRWQQGNVFSCSVMHEALHNHYTQKSLSLSPGK

SEQ ID NO: 3007 - protein, 460 aa, Artificial Sequence
  Description of Artificial Sequence: Synthetic polypeptide
MGWSCIILFLVATATGVHSQVQLVQSGAEVKKPGASVKVSCKASGYTFTSYWMHWVRQRPGQGLEWIGNINPSNGGTNYNEKFKSKATMTRDTSTSTAYMELSSLRSEDTAVYYCELGQGYWGQGTLVTVSSASTKGPSVFPLAPSSKSTSGGTAALGCLVKDYFPEPVTVSWNSGALTSGVHTFPAVLQSSGLYSLSSWTVPSSSLGTQTYICNVNHKPSNTKVDKKVEPKSCDKTHTCPPCPAPELAGAPSVFLFPPKPKDTLMISRTPEVTCVWDVSHEDPEVKFNWYVDGVEVHNAKTKPREEQYNSTYRVVSVLTVLHQDWLNGKEYKCKVSNKALPAPIEKTISKAKGQPREPQVYTLPPSRDELTKNQVSLTCLVKGFYPSDIAVEWESNGQPENNYKTTPPVLDSDGSFFLYSKLTVDKSRWQQGNVFSCSVMHEALHNHYTQKSLSLSPGK

SEQ ID NO: 3008 - protein, 460 aa, Artificial Sequence
  Description of Artificial Sequence: Synthetic polypeptide
MGWSCIILFLVATATGVHSQVQLVQSGAEVKKPGASVKVSCKASGYTFTSYWMHWVKQRPGQGLEWIGNINPSNGGTNYNEKFKSKATMTRDTSTSTAYMELSSLRSEDTAVYYCELGQGYWGQGTLVTVSSASTKGPSVFPLAPSSKSTSGGTAALGCLVKDYFPEPVTVSWNSGALTSGVHTFPAVLQSSGLYSLSSWTVPSSSLGTQTYICNVNHKPSNTKVDKKVEPKSCDKTHTCPPCPAPELAGAPSVFLFPPKPKDTLMISRTPEVTCVWDVSHEDPEVKFNWYVDGVEVHNAKTKPREEQYNSTYRVVSVLTVLHQDWLNGKEYKCKVSNKALPAPIEKTISKAKGQPREPQVYTLPPSRDELTKNQVSLTCLVKGFYPSDIAVEWESNGQPENNYKTTPPVLDSDGSFFLYSKLTVDKSRWQQGNVFSCSVMHEALHNHYTQKSLSLSPGK

SEQ ID NO: 3009 - protein, 459 aa, Artificial Sequence
  Description of Artificial Sequence: Synthetic polypeptide
MGWSCIILFLVATATGVHSQVQLVQSGAEVKKPGASVKVSCKASGYTFTSYWMHWVKQRPGQGLEWIGNINPSNGGTNYNEKFKSKATMTVDTSTSTAYMELSSLRSEDTAVYYCELGQGYWGQGTLVTVSSASTKGPSVFPLAPSSKSTSGGTAALGCLVKDYFPEPVTVSWNSGALTSGVHTFPAVLQSSGLYSLSSWTVPSSSLGTQTYICNVNHKPSNTKVDKKVEPKSCDKTHTCPPCPAPELAGAPSVFLFPPKPKDTLMISRTPEVTCVWDVSHEDPEVKFNWYVDGVEVHNAKTKPREEQYNSTYRWSVLTVLHQDWLNGKEYKCKVSNKALPAPIEKTISKAKGQPREPQVYTLPPSRDELTKNQVSLTCLVKGFYPSDIAVEWESNGQPENNYKTTPPVLDSDGSFFLYSKLTVDKSRWQQGNVFSCSVMHEALHNHYTQKSLSLSPGK

SEQ ID NO: 3010 - protein, 459 aa, Artificial Sequence
  Description of Artificial Sequence: Synthetic polypeptide
MGWSCIILFLVATATGVHSQVQLVQSGAEVKKPGASVKVSCKASGYTFTSYWMHWVKQRPGQGLEWIGNINPSNGGTNYNEKFKSKATLTVDTSTSTAYMELSSLRSEDTAVYYCELGQGYWGQGTLVTVSSASTKGPSVFPLAPSSKSTSGGTAALGCLVKDYFPEPVTVSWNSGALTSGVHTFPAVLQSSGLYSLSSWTVPSSSLGTQTYICNVNHKPSNTKVDKKVEPKSCDKTHTCPPCPAPELAGAPSVFLFPPKPKDTLMISRTPEVTCVWDVSHEDPEVKFNWYVDGVEVHNAKTKPREEQYNSTYRWSVLTVLHQDWLNGKEYKCKVSNKALPAPIEKTISKAKGQPREPQVYTLPPSRDELTKNQVSLTCLVKGFYPSDIAVEWESNGQPENNYKTTPPVLDSDGSFFLYSKLTVDKSRWQQGNVFSCSVMHEALHNHYTQKSLSLSPGK

SEQ ID NO: 3011 - protein, 460 aa, Artificial Sequence
  Description of Artificial Sequence: Synthetic polypeptide
MGWSCIILFLVATATGVHSQVQLVQSGAEVKKPGASVKVSCKASGYTFTSYWMHWVRQRPGQGLEWMGNINPSNGGTNYNEKFKSRVTMTRDTSTSTAYMELSSLRSEDTAVYYCELGQGYWGQGTLVTVSSASTKGPSVFPLAPSSKSTSGGTAALGCLVKDYFPEPVTVSWNSGALTSGVHTFPAVLQSSGLYSLSSWTVPSSSLGTQTYICNVNHKPSNTKVDKKVEPKSCDKTHTCPPCPAPELAGAPSVFLFPPKPKDTLMISRTPEVTCVWDVSHEDPEVKFNWYVDGVEVHNAKTKPREEQYNSTYRVVSVLTVLHQDWLNGKEYKCKVSNKALPAPIEKTISKAKGQPREPQVYTLPPSRDELTKNQVSLTCLVKGFYPSDIAVEWESNGQPENNYKTTPPVLDSDGSFFLYSKLTVDKSRWQQGNVFSCSVMHEALHNHYTQKSLSLSPGK

SEQ ID NO: 3012 - protein, 460 aa, Artificial Sequence
  Description of Artificial Sequence: Synthetic polypeptide
MGWSCIILFLVATATGVHSQVQLVQSGAEVKKPGASVKVSCKASGYTFTSYWMHWVRQAPGQGLEWMGNINPSNGGTNYNEKFKSRVTMTRDTSTSTAYMELSSLRSEDTAVYYCELGQGYWGQGTLVTVSSASTKGPSVFPLAPSSKSTSGGTAALGCLVKDYFPEPVTVSWNSGALTSGVHTFPAVLQSSGLYSLSSWTVPSSSLGTQTYICNVNHKPSNTKVDKKVEPKSCDKTHTCPPCPAPELAGAPSVFLFPPKPKDTLMISRTPEVTCVWDVSHEDPEVKFNWYVDGVEVHNAKTKPREEQYNSTYRVVSVLTVLHQDWLNGKEYKCKVSNKALPAPIEKTISKAKGQPREPQVYTLPPSRDELTKNQVSLTCLVKGFYPSDIAVEWESNGQPENNYKTTPPVLDSDGSFFLYSKLTVDKSRWQQGNVFSCSVMHEALHNHYTQKSLSLSPGK

SEQ ID NO: 3013 - protein, 460 aa, Artificial Sequence
  Description of Artificial Sequence: Synthetic polypeptide
MGWSCIILFLVATATGVHSQVQLVQSGAEVKKPGASVKVSCKASGYTFTSYWMHWVRQAPGQGLEWIGNINPSNGGTNYNEKFKSRATMTRDTSTSTAYMELSSLRSEDTAVYYCELGQGYWGQGTLVTVSSASTKGPSVFPLAPSSKSTSGGTAALGCLVKDYFPEPVTVSWNSGALTSGVHTFPAVLQSSGLYSLSSWTVPSSSLGTQTYICNVNHKPSNTKVDKKVEPKSCDKTHTCPPCPAPELAGAPSVFLFPPKPKDTLMISRTPEVTCVWDVSHEDPEVKFNWYVDGVEVHNAKTKPREEQYNSTYRVVSVLTVLHQDWLNGKEYKCKVSNKALPAPIEKTISKAKGQPREPQVYTLPPSRDELTKNQVSLTCLVKGFYPSDIAVEWESNGQPENNYKTTPPVLDSDGSFFLYSKLTVDKSRWQQGNVFSCSVMHEALHNHYTQKSLSLSPGK

SEQ ID NO: 3014 - protein, 459 aa, Artificial Sequence
  Description of Artificial Sequence: Synthetic polypeptide
MGWSCIILFLVATATGVHSQVQLVQSGAEVKKPGASVKVSCKASGYTFTSYWMHWVRQAPGQGLEWIGNINPSNGGTNYNEKFKSRATLTVDKSTSTAYMELSSLRSEDTAVYYCELGQGYWGQGTLVTVSSASTKGPSVFPLAPSSKSTSGGTAALGCLVKDYFPEPVTVSWNSGALTSGVHTFPAVLQSSGLYSLSSWTVPSSSLGTQTYICNVNHKPSNTKVDKKVEPKSCDKTHTCPPCPAPELAGAPSVFLFPPKPKDTLMISRTPEVTCVWDVSHEDPEVKFNWYVDGVEVHNAKTKPREEQYNSTYRWSVLTVLHQDWLNGKEYKCKVSNKALPAPIEKTISKAKGQPREPQVYTLPPSRDELTKNQVSLTCLVKGFYPSDIAVEWESNGQPENNYKTTPPVLDSDGSFFLYSKLTVDKSRWQQGNVFSCSVMHEALHNHYTQKSLSLSPGK

SEQ ID NO: 3015 - protein, 441 aa, Artificial Sequence
  Description of Artificial Sequence: Synthetic polypeptide
EVQLVESGGGLVQPGGSLRLSCAASGFTFSNYWMSWVRQAPGKGLEWVATIKQDGSQKNYVDSVKGRFTISRDNAKNSLYLRLNSLRAEDTAVYYCATELFDLWGRGSLVTVSSASTKGPSVFPLAPCSRSTSESTAALGCLVKDYFPEPVTVSWNSGALTSGVHTFPAVLQSSGLYSLSSVVTVPSSSLGTKTYTCNVDHKPSNTKVDKRVESKYGPPCPSCPAPEFLGGPSVFLFPPKPKDTLMISRTPEVTCVVVDVSQEDPEVQFNWYVDGVEVHNAKTKPREEQFNSTYRVVSVLTVLHQDWLNGKEYKCKVSNKGLPSSIEKTISKAKGQPREPQVYTLPPSQEEMTKNQVSLTCLVKGFYPSDIAVEWESNGQPENNYKTTPPVLDSDGSFFLYSRLTVDKSRWQEGNVFSCSVMHEALHNHYTQKSLSLSLGK

SEQ ID NO: 3016 - protein, 451 aa, Artificial Sequence
  Description of Artificial Sequence: Synthetic polypeptide
EVQLVESGGGLVQPGGSLKLSCAASGFNFNISAIHWVRQASGKGLEWVGRIRSKSHNYATLYAASLKGRFTLSRDDSRNTAYLQMSSLQTEDMAVYYCTVLSANYDTFDYWGQGTLVTVSSAKTTAPSVYPLAPVCGDTTGSSVTLGCLVKGYFPEPVTLTWNSGSLSSGVHTFPAVLQSDLYTLSSSVTVTSSTWPSQSITCNVAHPASSTKVDKKIEPRGPTIKPCPPCKCPAPNLLGGPSVFIFPPKIKDVLMISLSPIVTCVVVDVSEDDPDVQISWFVNNVEVHTAQTQTHREDYNSTLRVVSALPIQHQDWMSGKEFKCKVNNKDLPAPIERTISKPKGSVRAPQVYVLPPPEEEMTKKQVTLTCMVTDFMPEDIYVEWTNNGKTELNYKNTEPVLDSDGSYFMYSKLRVEKKNWVERNSYSCSVVHEGLHNHHTTKSFSRTPGK

SEQ ID NO: 3017 - protein, 451 aa, Artificial Sequence
  Description of Artificial Sequence: Synthetic polypeptide
EVQLVESGGGLVQPGGSLKLSCAASGFNFQISAIHWVRQASGKGLEWVGRIRSKSHNYATLYAASLKGRFTLSRDDSRNTAYLQMSSLQTEDMAVYYCTVLSANYDTFDYWGQGTLVTVSSAKTTAPSVYPLAPVCGDTTGSSVTLGCLVKGYFPEPVTLTWNSGSLSSGVHTFPAVLQSDLYTLSSSVTVTSSTWPSQSITCNVAHPASSTKVDKKIEPRGPTIKPCPPCKCPAPNLLGGPSVFIFPPKIKDVLMISLSPIVTCVVVDVSEDDPDVQISWFVNNVEVHTAQTQTHREDYNSTLRVVSALPIQHQDWMSGKEFKCKVNNKDLPAPIERTISKPKGSVRAPQVYVLPPPEEEMTKKQVTLTCMVTDFMPEDIYVEWTNNGKTELNYKNTEPVLDSDGSYFMYSKLRVEKKNWVERNSYSCSVVHEGLHNHHTTKSFSRTPGK

SEQ ID NO: 3018 - protein, 113 aa, Artificial Sequence
  Description of Artificial Sequence: Synthetic polypeptide
QVQLVQSGAEVKKPGASVKVSCKASGYTFTSYWMHWVRQAPGQGLEWMGNINPSNGGTNYNEKFKSRVTMTRDTSTSTVYMELSSLRSEDTAVYYCELGQGYWGQGTLVTVSS

SEQ ID NO: 3019 - protein, 112 aa, Artificial Sequence
  Description of Artificial Sequence: Synthetic polypeptide
QVQLVQSGAEWKPGASVKLSCKASGYTFTSYWMHWVKQAPGQGLEWIGNINPSNGGTNYNEKFKSRATLTRDTSTSTAYMELSSLRSEDTAVYYCELGQGYWGQGTLVTVSS

SEQ ID NO: 3020 - protein, 112 aa, Artificial Sequence
  Description of Artificial Sequence: Synthetic polypeptide
QVQLVQSGAEWKPGASVKLSCKASGYTFTSYWMHWVKQRPGQGLEWIGNINPSNGGTNYNEKFKSKATLTVDTSSSTAYMELSSLRSEDSAVYYCELGQGYWGQGTLVTVSS

SEQ ID NO: 3021 - protein, 113 aa, Artificial Sequence
  Description of Artificial Sequence: Synthetic polypeptide
QVQLVQSGAEVKKPGASVKVSCKASGYTFTSYWMHWVKQRPGQGLEWIGNINPSNGGTNYNEKFKSKATLTVDKSTSTAYMELSSLRSEDTAVYYCELGQGYWGQGTLVTVSS

SEQ ID NO: 3022 - protein, 113 aa, Artificial Sequence
  Description of Artificial Sequence: Synthetic polypeptide
QVQLVQSGAEVVKPGASVKLSCKASGYTFTSYWMHWVKQRPGQGLEWIGNINPSNGGTNYNEKFKSKATLTVDKSTSTAYMELSSLRSEDTAVYYCELGQGYWGQGTLVTVSS

SEQ ID NO: 3023 - protein, 112 aa, Artificial Sequence
  Description of Artificial Sequence: Synthetic polypeptide
QVQLVQSGAEWKPGASVKLSCKASGYTFTSYWMHWVKQRPGQGLEWIGNINPSNGGTNYNEKFKSKATLTVDKSSSTAYMELSSLRSEDSAVYYCELGQGYWGQGTLVTVSS

SEQ ID NO: 3024 - protein, 113 aa, Artificial Sequence
  Description of Artificial Sequence: Synthetic polypeptide
QVQLVQSGAEVKKPGASVKVSCKASGYTFTSYWMHWVRQRPGQGLEWIGNINPSNGGTNYNEKFKSRATMTRDTSTSTAYMELSSLRSEDTAVYYCELGQGYWGQGTLVTVSS

SEQ ID NO: 3025 - protein, 113 aa, Artificial Sequence
  Description of Artificial Sequence: Synthetic polypeptide
QVQLVQSGAEVKKPGASVKVSCKASGYTFTSYWMHWVRQAPGQGLEWIGNINPSNGGTNYNEKFKSKATMTRDTSTSTAYMELSSLRSEDTAVYYCELGQGYWGQGTLVTVSS

SEQ ID NO: 3026 - protein, 113 aa, Artificial Sequence
  Description of Artificial Sequence: Synthetic polypeptide
QVQLVQSGAEVKKPGASVKVSCKASGYTFTSYWMHWVRQRPGQGLEWIGNINPSNGGTNYNEKFKSKATMTRDTSTSTAYMELSSLRSEDTAVYYCELGQGYWGQGTLVTVSS

SEQ ID NO: 3027 - protein, 113 aa, Artificial Sequence
  Description of Artificial Sequence: Synthetic polypeptide
QVQLVQSGAEVKKPGASVKVSCKASGYTFTSYWMHWVKQRPGQGLEWIGNINPSNGGTNYNEKFKSKATMTRDTSTSTAYMELSSLRSEDTAVYYCELGQGYWGQGTLVTVSS

SEQ ID NO: 3028 - protein, 113 aa, Artificial Sequence
  Description of Artificial Sequence: Synthetic polypeptide
QVQLVQSGAEVKKPGASVKVSCKASGYTFTSYWMHWVKQRPGQGLEWIGNINPSNGGTNYNEKFKSKATMTVDTSTSTAYMELSSLRSEDTAVYYCELGQGYWGQGTLVTVSS

SEQ ID NO: 3029 - protein, 113 aa, Artificial Sequence
  Description of Artificial Sequence: Synthetic polypeptide
QVQLVQSGAEVKKPGASVKVSCKASGYTFTSYWMHWVKQRPGQGLEWIGNINPSNGGTNYNEKFKSKATLTVDTSTSTAYMELSSLRSEDTAVYYCELGQGYWGQGTLVTVSS

SEQ ID NO: 3030 - protein, 113 aa, Artificial Sequence
  Description of Artificial Sequence: Synthetic polypeptide
QVQLVQSGAEVKKPGASVKVSCKASGYTFTSYWMHWVRQRPGQGLEWMGNINPSNGGTNYNEKFKSRVTMTRDTSTSTAYMELSSLRSEDTAVYYCELGQGYWGQGTLVTVSS

SEQ ID NO: 3031 - protein, 113 aa, Artificial Sequence
  Description of Artificial Sequence: Synthetic polypeptide
QVQLVQSGAEVKKPGASVKVSCKASGYTFTSYWMHWVRQAPGQGLEWMGNINPSNGGTNYNEKFKSRVTMTRDTSTSTAYMELSSLRSEDTAVYYCELGQGYWGQGTLVTVSS

SEQ ID NO: 3032 - protein, 113 aa, Artificial Sequence
  Description of Artificial Sequence: Synthetic polypeptide
QVQLVQSGAEVKKPGASVKVSCKASGYTFTSYWMHWVRQAPGQGLEWIGNINPSNGGTNYNEKFKSRATMTRDTSTSTAYMELSSLRSEDTAVYYCELGQGYWGQGTLVTVSS

SEQ ID NO: 3033 - protein, 113 aa, Artificial Sequence
  Description of Artificial Sequence: Synthetic polypeptide
QVQLVQSGAEVKKPGASVKVSCKASGYTFTSYWMHWVRQAPGQGLEWIGNINPSNGGTNYNEKFKSRATLTVDKSTSTAYMELSSLRSEDTAVYYCELGQGYWGQGTLVTVSS

SEQ ID NO: 3034 - protein, 120 aa, Artificial Sequence
  Description of Artificial Sequence: Synthetic polypeptide
EVQLQQSGPELVKPGASVKMSCKASGYTFTDYYMKWVKQSHGKSLEWIGDINPNNGDTFYNQKFKGKATLTVDKSSSTAYMQLNSLTSEDSAVYYCARGVYDGYYAMDYWGQGTSVTVSS

SEQ ID NO: 3035 - protein, 98 aa, Artificial Sequence
  Description of Artificial Sequence: Synthetic polypeptide
LSLVCKASGFTFSSNAMGWVRQAPGKGLEWVAGIDDDGSGTRYAPAVKGRATISRDNGQSTLRLQLNNLRAEDTGIYYCTKCAYSSGCDYEAGYIDAW

SEQ ID NO: 3036 - protein, 125 aa, Artificial Sequence
  Description of Artificial Sequence: Synthetic polypeptide
AVTLDESGGGLQTPGGALSLVCKASGFTFSSNAMGWVRQAPGKGLEWVAGIDDDGSSTRYAPAVKGRATISRDNGQSTVRLQLNNLRAEDTGIYYCTKCAYSSGCDYEAGYIDAWGHGTEVIVSS

SEQ ID NO: 3037 - protein, 126 aa, Artificial Sequence
  Description of Artificial Sequence: Synthetic polypeptide
QVQLVQSGSELKKPGASVKVSCKASGYTFTNYGMNWVRQAPGQGLEWMGWINTYTGEPTYADDFTGRFVFSLDTSVSTAYLQISSLKAEDTAVYYCARNPINYYGINYEGYVMDYWGQGTLVTVSS

SEQ ID NO: 3038 - protein, 126 aa, Artificial Sequence
  Description of Artificial Sequence: Synthetic polypeptide
QVQLVQSGSELKKPGASVKVSCKASGYTFTNYGMNWVRQAPGQGLEWMGWINTYTGEPTYADDFTGRFVFSLDTSVSTAYLQISSLKAEDTAVYFCARNPINYYGINYEGYVMDYWGQGTLVTVSS

SEQ ID NO: 3039 - protein, 126 aa, Artificial Sequence
  Description of Artificial Sequence: Synthetic polypeptide
QVQLVQSGSELKKPGASVKVSCKASGYTFTNYGMNWVRQAPGQGLEWMGWINTYTGEPTYADDFTGRFVFSLDTSVSTAYLQISSLKAEDTATYFCARNPINYYGINYEGYVMDYWGQGTLVTVSS

SEQ ID NO: 3040 - protein, 118 aa, Artificial Sequence
  Description of Artificial Sequence: Synthetic polypeptide
QVQLQESGPGLLKPSETLSLTCTVSGGSVSLYYWSWIRQSPGKEPEWIGYIYSSGSTDYNPSLRSRVTISLDTSNNRFSLNLRSVTAADTAVYWCARSASIRGWFDPWGQGTLVTVSS

SEQ ID NO: 3041 - protein, 133 aa, Artificial Sequence
  Description of Artificial Sequence: Synthetic polypeptide
VQLLESGGGLVQPGGSLRLSCAASGFTFSTYAMSWVRQAPGEGLEWVSDINVGGVTTYYADSVKGRFTISRDNSKNTLYLQMNSLRVEDTAMYYCVRRSGPDRNSSPADFWGQGSLVIVSSGSASAPTLFPLV

SEQ ID NO: 3042 - protein, 109 aa, Artificial Sequence
  Description of Artificial Sequence: Synthetic polypeptide
SGPVLVKPGASVKISCKASGYSFTGYYMFWVKQSPEKSLEWIGEINPSTGGATYNLKFKAKATLTVDKSSNTAYMQLKSLTSEDSAVYYCARLDALDYWGQGTSVTVSS

SEQ ID NO: 3043 - protein, 113 aa, Artificial Sequence; identical to SEQ ID NO: 3031
  Description of Artificial Sequence: Synthetic polypeptide

SEQ ID NO: 3044 - protein, 113 aa, Artificial Sequence; identical to SEQ ID NO: 3032
  Description of Artificial Sequence: Synthetic polypeptide

SEQ ID NO: 3045 - protein, 113 aa, Artificial Sequence; identical to SEQ ID NO: 3033
  Description of Artificial Sequence: Synthetic polypeptide

SEQ ID NO: 3046 - protein, 113 aa, Artificial Sequence
  Description of Artificial Sequence: Synthetic polypeptide
QVQLVQSGAEVVKPGASVKLSCKASGYTFTSYWMHWVKQAPGQGLEWIGNINPSNGGTNYNEKFKSRATLTRDTSTSTAYMELSSLRSEDTAVYYCELGQGYWGQGTLVTVSS

SEQ ID NO: 3047 - protein, 113 aa, Artificial Sequence
  Description of Artificial Sequence: Synthetic polypeptide
QVQLVQSGAEVVKPGASVKLSCKASGYTFTSYWMHWVKQRPGQGLEWIGNINPSNGGTNYNEKFKSKATLTVDTSSSTAYMELSSLRSEDSAVYYCELGQGYWGQGTLVTVSS

SEQ ID NO: 3048 - protein, 113 aa, Artificial Sequence; identical to SEQ ID NO: 3021
  Description of Artificial Sequence: Synthetic polypeptide

SEQ ID NO: 3049 - protein, 113 aa, Artificial Sequence; identical to SEQ ID NO: 3022
  Description of Artificial Sequence: Synthetic polypeptide

SEQ ID NO: 3050 - protein, 113 aa, Artificial Sequence
  Description of Artificial Sequence: Synthetic polypeptide
QVQLVQSGAEVVKPGASVKLSCKASGYTFTSYWMHWVKQRPGQGLEWIGNINPSNGGTNYNEKFKSKATLTVDKSSSTAYMELSSLRSEDSAVYYCELGQGYWGQGTLVTVSS

SEQ ID NO: 3051 - protein, 113 aa, Artificial Sequence; identical to SEQ ID NO: 3018
  Description of Artificial Sequence: Synthetic polypeptide

SEQ ID NO: 3052 - protein, 113 aa, Artificial Sequence; identical to SEQ ID NO: 3024
  Description of Artificial Sequence: Synthetic polypeptide

SEQ ID NO: 3053 - protein, 113 aa, Artificial Sequence; identical to SEQ ID NO: 3025
  Description of Artificial Sequence: Synthetic polypeptide

SEQ ID NO: 3054 - protein, 113 aa, Artificial Sequence; identical to SEQ ID NO: 3026
  Description of Artificial Sequence: Synthetic polypeptide

SEQ ID NO: 3055 - protein, 113 aa, Artificial Sequence; identical to SEQ ID NO: 3027
  Description of Artificial Sequence: Synthetic polypeptide

SEQ ID NO: 3056 - protein, 113 aa, Artificial Sequence; identical to SEQ ID NO: 3028
  Description of Artificial Sequence: Synthetic polypeptide

SEQ ID NO: 3057 - protein, 113 aa, Artificial Sequence; identical to SEQ ID NO: 3029
  Description of Artificial Sequence: Synthetic polypeptide

SEQ ID NO: 3058 - protein, 113 aa, Artificial Sequence; identical to SEQ ID NO: 3030
  Description of Artificial Sequence: Synthetic polypeptide

SEQ ID NO: 3059 - protein, 113 aa, Artificial Sequence
  Description of Artificial Sequence: Synthetic polypeptide
QVQLQQPGTELVKPGASVKLSCKASGYTFTSYWMHWVKQRPGQGLEWIGNINPSNGGTNYNEKFKSKATLTVDKSSSTAYMQLSSLTSEDSAVYYCELGQGYWGQGTTLTVSS

SEQ ID NO: 3060 - protein, 115 aa, Artificial Sequence
  Description of Artificial Sequence: Synthetic polypeptide
EVQLVESGGGLVKPGGSLKLSCAASGFTFSCYAMSWVRQTPEKRLEWVASISDGGSYTYYPDNVKGRFTISRDNAKNNLYLQMSHLKSEDTAMYYCAKELLFDYWGQGTTLTVSS

SEQ ID NO: 3061 - protein, 113 aa, Artificial Sequence
  Description of Artificial Sequence: Synthetic polypeptide
QVQLQQSGAELVKPGASVKISCKASGYAFSSYWMNWVKQRPGKGLEWIGQIYPGDGDTNYNGKFKGKATLTADKSSSTAYMQLSSLTSEDSAVYFCAVRFDYWGQGTTLTVSS

SEQ ID NO: 3062 - protein, 119 aa, Artificial Sequence
  Description of Artificial Sequence: Synthetic polypeptide
QVQLQQPGIEVVKPGASVKLSCKASGYTFISNWMHWLRQRPGQGLEWIGEIDPSDTYTDYNQKFKGKATLTVDKSSTTAYMLLSSLTSEDSAVYFCARGGMIVYVLDSWGQGTSVTVSS

SEQ ID NO: 3063 - protein, 119 aa, Artificial Sequence
  Description of Artificial Sequence: Synthetic polypeptide
QVQLQQPGAELVKPGASVKLSCKASGYTFITYWMHWMKQRPGQGLEWIGEIDPSDSYTDYNQKFKGKATLTVDKSSSTAYMQLSSLTSEDSAVYYCARGSNVLYVLDYWGQGTSVTVSS

SEQ ID NO: 3064 - protein, 460 aa, Artificial Sequence
  Description of Artificial Sequence: Synthetic polypeptide
MAWVWTLPFLMAAAQSVQAEVQLVESGGGLVQPGGSLRLSCAASGFTFSNYWMSWVRQAPGKGLEWVATIKQDGSQKNYVDSVKGRFTISRDNAKNSLYLRLNSLRAEDTAVYYCATELFDLWGRGSLVTVSSASTKGPSVFPLAPCSRSTSESTAALGCLVKDYFPEPVTVSWNSGALTSGVHTFPAVLQSSGLYSLSSVVTVPSSSLGTKTYTCNVDHKPSNTKVDKRVESKYGPPCPSCPAPEFLGGPSVFLFPPKPKDTLMISRTPEVTCVVVDVSQEDPEVQFNWYVDGVEVHNAKTKPREEQFNSTYRVVSVLTVLHQDWLNGKEYKCKVSNKGLPSSIEKTISKAKGQPREPQVYTLPPSQEEMTKNQVSLTCLVKGFYPSDIAVEWESNGQPENNYKTTPPVLDSDGSFFLYSRLTVDKSRWQEGNVFSCSVMHEALHNHYTQKSLSLSLGK

SEQ ID NO: 3065 - protein, 246 aa, Artificial Sequence
  Description of Artificial Sequence: Synthetic polypeptide
MEFGLSWVFLVAILEGVQCEVQLVESGGGLVQPGGSLRLSCAASGFTFSNYWMSWVRQAPGKGLEWVATIKQDGSQKNYVDSVKGRFTISRDNAKNSLYLRLNSLRAEDTAVYYCATELFDLWGRGSLVTVSSASTKGPSVFPLAPSSKSTSGGTAALGCLVKDYFPEPVTVSWNSGALTSGVHTFPAVLQSSGLYSLSSVVTVPSSSLGTQTYICNVNHKPSNTKVDKRVEPKSCDKTHTCPPCP

SEQ ID NO: 3066 - protein, 135 aa, Artificial Sequence
  Description of Artificial Sequence: Synthetic polypeptide
MEWSWVFLFLLSGTAGVLSEVQLQQSGPELVKPGSSVKISCKASRNTFTDYNLDWVKQSHGKTLEWIGNVYPNNGVTGYNQKFRGKATLTVDKSSSTAYMELHSLTSEDSAVYYCALYYYDVSYWGQGTLVTVSA

SEQ ID NO: 3067 - protein, 136 aa, Artificial Sequence
  Description of Artificial Sequence: Synthetic polypeptide
METGLRWLLLVAVLKGVQCQSVEESGGHLVTPGTPLTLTCTVSGIDLSTYAMGWVRQAPGKGLEWIGVITKSGNTYYASWAKGRFAISKTSTTVDLKITSPTTEDTATYFCGRYGIGVSYYDIWGPGTLVTVSSGQ

SEQ ID NO: 3068 - protein, 136 aa, Artificial Sequence; identical to SEQ ID NO: 3067
  Description of Artificial Sequence: Synthetic polypeptide

SEQ ID NO: 3069 - protein, 115 aa, Artificial Sequence
  Description of Artificial Sequence: Synthetic polypeptide
EVQLVESGGGLVQPGGSLRLSCAASGFTFSNYGMNWVRQAPGKGLEWVSMIYYDSSEKHYADSVKGRFTISRDNAKNSLYLQMNSLRDEDTAVYYCARGTTPDYWGQGTMVTVSS

SEQ ID NO: 3070 - protein, 115 aa, Artificial Sequence
  Description of Artificial Sequence: Synthetic polypeptide
EVQLVESGGGLVQPGGSLRLSCAASGFTFSNYGMNWVRQAPGKGLEWVSMIYYDSSEKHYADSVKGRFTISRDNAKNSLYLQMNSLRDEDTAVYYCARGTTPDYWGQGTLVTVSS

SEQ ID NO: 3071 - protein, 115 aa, Artificial Sequence
  Description of Artificial Sequence: Synthetic polypeptide
EVQLVESGGGLVQPGGSLRLSCAASGFTFSNYGMNWVRQAPGKGLEWVSMIYYDSSEKHYADSVKGRFTISRDNAKNSLYLQMNSLRDEDTAVYYCARGTTPDYWGQGTTVTVSS

SEQ ID NO: 3072 - protein, 115 aa, Artificial Sequence
  Description of Artificial Sequence: Synthetic polypeptide
QVQLVESGGGVVQPGRSLRLSCAASGFTFSNYGMNWVRQAPGKGLEWVAMIYYDSSEKHYADSVKGRFTISRDNSKNTLYLQMNSLRAEDTAVYYCARGTTPDYWGQGTMVTVSS

SEQ ID NO: 3073 - protein, 115 aa, Artificial Sequence
  Description of Artificial Sequence: Synthetic polypeptide
QVQLVESGGGVVQPGRSLRLSCAASGFTFSNYGMNWVRQAPGKGLEWVAMIYYDSSEKHYADSVKGRFTISRDNSKNTLYLQMNSLRAEDTAVYYCARGTTPDYWGQGTLVTVSS

SEQ ID NO: 3074 - protein, 115 aa, Artificial Sequence
  Description of Artificial Sequence: Synthetic polypeptide
QVQLVESGGGVVQPGRSLRLSCAASGFTFSNYGMNWVRQAPGKGLEWVAMIYYDSSEKHYADSVKGRFTISRDNSKNTLYLQMNSLRAEDTAVYYCARGTTPDYWGQGTTVTVSS

SEQ ID NO: 3075 - protein, 115 aa, Artificial Sequence
  Description of Artificial Sequence: Synthetic polypeptide
EVQLLESGGGLVQPGGSLRLSCAASGFTFSNYGMNWVRQAPGKGLEWVSMIYYDSSEKHYADSVKGRFTISRDNSKNTLYLQMNSLRAEDTAVYYCAKGTTPDYWGQGTMVTVSS

SEQ ID NO: 3076 - protein, 115 aa, Artificial Sequence
  Description of Artificial Sequence: Synthetic polypeptide
EVQLLESGGGLVQPGGSLRLSCAASGFTFSNYGMNWVRQAPGKGLEWVSMIYYDSSEKHYADSVKGRFTISRDNSKNTLYLQMNSLRAEDTAVYYCAKGTTPDYWGQGTLVTVSS

SEQ ID NO: 3077 - protein, 115 aa, Artificial Sequence
  Description of Artificial Sequence: Synthetic polypeptide
EVQLLESGGGLVQPGGSLRLSCAASGFTFSNYGMNWVRQAPGKGLEWVSMIYYDSSEKHYADSVKGRFTISRDNSKNTLYLQMNSLRAEDTAVYYCAKGTTPDYWGQGTTVTVSS

SEQ ID NO: 3078 - protein, 115 aa, Artificial Sequence
  Description of Artificial Sequence: Synthetic polypeptide
EVQLVESGGGVVQPGRSLRLSCAASGFTFSNYGMNWVRQAPGKGLEWVAMIYYDSSEKHYADSVKGRFTISRDNSKNTLYLQMNSLRAEDTAVYYCARGTTPDYWGQGTMVTVSS

SEQ ID NO: 3079 - protein, 113 aa, Artificial Sequence
  Description of Artificial Sequence: Synthetic polypeptide
DVVLTQSPLSLPVTLGQPASISCRSSQSLEYSDGYTFLEWFLQKPGQSPQLLIYEVSNRFSGVPDRFSGSGSGTDFTLKISRVEAEDVGVYYCFQATHDPLTFGQGTKLEIKR

SEQ ID NO: 3080 - protein, 113 aa, Artificial Sequence; identical to SEQ ID NO: 3079
  Description of Artificial Sequence: Synthetic polypeptide

SEQ ID NO: 3081 - protein, 120 aa, Artificial Sequence
  Description of Artificial Sequence: Synthetic polypeptide
EVQLVQSGAEVKKPGASVKVSCKASGYTFTSHGISWVRQAPGQGLDWMGWISPYSGNTNYAQKLQGRVTMTTDTSTSTAYMELSSLRSEDTAVYYCARVGSGPYYYMDVWGQGTLVTVSS

SEQ ID NO: 3082 - protein, 121 aa, Artificial Sequence
  Description of Artificial Sequence: Synthetic polypeptide
EVQLVQSGSEVKKPGASVKLSCKTSGYTFTNSAIHWVRQAPGQRLEWMGWINAGNGNTKYSQKFQGRVTITRDTSASTAYMELSSLRSEDTAVYYCAWAYCGGDCYSLDYWGQGTLVTVSS

SEQ ID NO: 3083 - protein, 126 aa, Artificial Sequence
  Description of Artificial Sequence: Synthetic polypeptide
EVQLLESGGDLVRPGGSLRLTCEGSGFNFFTQTIHWVRQAPGKGLEWVASISSDSNYIYHADSLKGRFTVSRDNAQDSVFLQMNSLRVEDTAVYYCARDILLEPLAPHYYYGLDVWGQGTTVTVSS

SEQ ID NO: 3084 - protein, 117 aa, Artificial Sequence
  Description of Artificial Sequence: Synthetic polypeptide
EVQLQESGPGLVKPSETLSLTCTVSGGSISGYYWSWIRQSPGKGLEWIGEIFHTGRTYYNPSLRSRLTISVDTSKNQFSLKLSSLTAADTAVYYCARDSAFGSFDYWGQGTLVTVSS

SEQ ID NO: 3085 - protein, 120 aa, Artificial Sequence
  Description of Artificial Sequence: Synthetic polypeptide
EVQLQESGPGLVKPSETLSLTCNVSGGSISSYYWSWIRQPPGKGLEWIGNIYYSGSTNYNPSLKSRVTISVDTSKSQFSLKLSSVTAADTAVYYCARALDFWSGQYFDYWGQGTLVTVSS

SEQ ID NO: 3086 - protein, 126 aa, Artificial Sequence
  Description of Artificial Sequence: Synthetic polypeptide
EVQLVESGGGLVQPGRSLRLSCAASGFTFDDYAMHWVRQAPGKGLEWVAVISYDGSNKYYADSVKGRFTISRDNSKNTLYLQMNSLRAEDTAVYYCARERVYSSGKEGYYYGMDVWGQGTMVTVSS

SEQ ID NO: 3087 - protein, 117 aa, Artificial Sequence
  Description of Artificial Sequence: Synthetic polypeptide
EVQLVESGGGVVQPGTSLRLSCAASGFPFSSYGMHWVRQAPGKGLEWVAAISGDGILKYYTDSVKGRFTISRDNSKNTLYLQMNNLSGEDTGLYYCARNYDNSLDYWGQGTLVTVSS

SEQ ID NO: 3088 - protein, 120 aa, Artificial Sequence
  Description of Artificial Sequence: Synthetic polypeptide
EVQLVQSGAEVKKPGASVKVSCKVSGHSLSELTIHWVRQAPGKGLEWMGGFDPEDGRGTYAPNFRGRVTMTEDTSTDTAYMELSGLRSEDAAVYYCATLLGEYDSYFDLWGRGTLVTVSS

SEQ ID NO: 3089 - protein, 120 aa, Artificial Sequence
  Description of Artificial Sequence: Synthetic polypeptide
EVQLVQSGAEVKKPGASVKVSCKASGYIFTNYDIAWVRQAPGQGLEWMGWMNPDSGNTGFVQKFKGRVTATSNTDITTAYMELSSLTSEDTAVYYCARDRFGSGYDLDHWGQGTLVTVSS

SEQ ID NO: 3090 - protein, 117 aa, Artificial Sequence
  Description of Artificial Sequence: Synthetic polypeptide
EVQLVESGGGLVQPGGSLRLSCAASGFTSSSYAMTWVRQAPGKGLEWVSGISGSGESTYYADSVKGRFTISRDNSKNTLYLQMNSLRVEDTAIYYCARQGYGAHDYWGQGTLVTVSS

SEQ ID NO: 3091 - protein, 126 aa, Artificial Sequence
  Description of Artificial Sequence: Synthetic polypeptide
EVQLLESGGGLVKPGGSLRLSCAASGFTFDDYAMHWVRQAPGKGLEWVSLISWDGGSTYYADSVKGRFTISRDNSKNSLYLQMNSLRAEDTALYYCAKDIPKVGGYSYGYGALGYWGQGTPVTVSS

SEQ ID NO: 3092 - protein, 115 aa, Artificial Sequence
  Description of Artificial Sequence: Synthetic polypeptide
EVQLVQSGAEVKKPGASVKVSCKASGYTFTSYDINWVRQATGQGLEWMGWMNPNSGNTGYAQKFQGRVTMTRNTSISTAYMELSSLRSEDTAVYYCARSTSLSVWGQGTLVTVSS

SEQ ID NO: 3093 - protein, 117 aa, Artificial Sequence
  Description of Artificial Sequence: Synthetic polypeptide
EVQLQESGAGLLKPSETLSLTCAVYGGSFSGYYWSWIRQPPGKGLEWIGEINHSGSTNYNPSLKSRVTISVDTSKNQFSLKLSSVTAADTAVYYCARDDGAGVFDLWGRGTLVTVSS

SEQ ID NO: 3094 - protein, 123 aa, Artificial Sequence
  Description of Artificial Sequence: Synthetic polypeptide
EVQLVQSGAEVKEPGASVKVSCKASGYTFTDYYIQWVRQAPGHGLEWMGWINPKTGGTNYLQKFQGRVTMTRDTSTRTAYMELSSLRSDDTAFYYCVREDMNTVLATSWFDPWGQGTLVTVSS

SEQ ID NO: 3095 - protein, 120 aa, Artificial Sequence
  Description of Artificial Sequence: Synthetic polypeptide
EVQLVQSGAEVKKPGESLKISCKAFGYSFTNFWIGWVRQVPGKGLEWVGIIYPGDSDTRYSPSFQGQVTISADKSIDTAYLQWGHLKASDSAMYFCARRGFWTGSQIEYWGQGTQVTVSS

SEQ ID NO: 3096 - protein, 115 aa, Artificial Sequence
  Description of Artificial Sequence: Synthetic polypeptide
QVQLVQSGAEVKKPGASVKVSCKASGYTFVNYIIHWVRQAPGQGLEWMGIINPNGGNTSYAEKFQARVTLTSDTSTSTVYMDLSSLTSEDTAVYYCAVLSPSNPWGQGTTVTVSS

SEQ ID NO: 3097 - protein, 126 aa, Artificial Sequence
  Description of Artificial Sequence: Synthetic polypeptide
QVQLVESGGGAVQPGGSLRLSCAASGFTFSDYAMHWVRQAPGKGLQWVAVISYEGTYKYYADSVKGRFTISRDNSKNTLNLQMSSLRVEDTAVYFCVKARAFASGQRSTSTVPDYWGQGTLVTVSS

SEQ ID NO: 3098 - protein, 121 aa, Artificial Sequence
  Description of Artificial Sequence: Synthetic polypeptide
EVQLVESGGGLVQPGGSLKLSCAASGFNFNISAIHWVRQASGKGLEWVGRIRSKSHNYATLYAASLKGRFTLSRDDSRNTAYLQMSSLQTEDMAVYYCTVLSANYDTFDYWGQGTLVTVSS

SEQ ID NO: 3099 - protein, 120 aa, Artificial Sequence
  Description of Artificial Sequence: Synthetic polypeptide
QVQLQQSGPELVKPGTSVKMPCKASGYIFTDYVISWVKQRTGQGLEWIGEIFPRSGSTYYNEKFKGKATLTADKSSNTAYMQLSSVTSEDSAVYFCARDYYGTSFAMDYWGQGTSVTVSS

SEQ ID NO: 3100 - protein, 120 aa, Artificial Sequence
  Description of Artificial Sequence: Synthetic polypeptide
QVQLVQSGAEVKKPGSSVKVSCKASGGTFSSYAISWVRQAPGQGLEWMGGIIPILGIANYAQKFQGRVTITADKSTSTAYMELSSLRSEDTAVYYCARENHCYYYGMDVWGQGTTVTVSS

SEQ ID NO: 3101 - protein, 120 aa, Artificial Sequence
  Description of Artificial Sequence: Synthetic polypeptide
QVQLVQSGPEVKKPGSSVKVPCKASGYIFTDYVISWVRQATGQGLEWMGEIFPRSGSTNYAQKFQGRVTITADKSTSTAYMELSSLRSEDTAVYYCARDYYGTSFAMDYWGQGTTVTVSS

SEQ ID NO: 3102 - protein, 120 aa, Artificial Sequence
  Description of Artificial Sequence: Synthetic polypeptide
QVQLQQSGAELARPGASVKLSCKASGYTFTSYGISWVKQRTGQGLEWIGEIYPRSGNTYYNEKFKGKATLTADKSSSTAYMELRSLTSEDSAVYFCARDYYGTYYAMDYWGQGTSVTVSS

SEQ ID NO: 3103 - protein, 120 aa, Artificial Sequence
  Description of Artificial Sequence: Synthetic polypeptide
QVQLVQSGPEVVKPGSSVKMPCKASGYIFSDYAISWVRQRTGQGLEWMGEIFPRSGSTNYAQKFQGRVTITADKSTSTAYMELSSLRSEDTAVYYCARDYYGTSYGMDVWGQGTTVTVSS

SEQ ID NO: 3104 - protein, 120 aa, Artificial Sequence
  Description of Artificial Sequence: Synthetic polypeptide
QVQLVQSGPEVVKPGSSVKMPCKASGYIFSDYAISWVRQRTGQGLEWMGEIFPRSGSTYYNQKFQGRVTITADKSTNTAYMQLSSLTSEDTAVYYCARDYYGTSYGMDVWGQGTTVTVSS

SEQ ID NO: 3105 - protein, 114 aa, Artificial Sequence
  Description of Artificial Sequence: Synthetic polypeptide
EVQLVESGGGLVQPGGSLRLSCAASGFTFPNYVMTWVRQAPGKGLEWVSGISGSGGSTDYADSVKGRFTISRDNSKNTLYLQMNSLRVEDTALYYCAKGSGGIWGQGTMVTVSS

SEQ ID NO: 3106 - protein, 120 aa, Artificial Sequence
  Description of Artificial Sequence: Synthetic polypeptide
EVQLVQSGAEVKKPGESLKISCKAFGYSFTNFWIGWVRQVPGKGLEWVGIIYPGDSDTRYSPSFQGQVTISADKSIDTAYLQWGHLKASDSAMYFCARRGFWTGSQIEYWGQGTLVTVSS

SEQ ID NO: 3107 - protein, 125 aa, Artificial Sequence
  Description of Artificial Sequence: Synthetic polypeptide
EVQLVESGGGVVQPGRSLRVSCAASGFTFSSYDMHWVRQAPGKGLEWVAVIWFDGSNEFYADSVKGRFTISRDNSKNTLFLQMNSLRAEDTAVYYCARDLGASVTTSNAENFHHWGQGTLVTVSS

SEQ ID NO: 3108 - protein, 125 aa, Artificial Sequence
  Description of Artificial Sequence: Synthetic polypeptide
QVQLVESGGGVVQPGRSLRVSCAASGFTFSSYDMHWVRQAPGKGLEWVAVIWFDGSNEFYADSVKGRFTISRDNSKNTLFLQMNSLRAEDTAVYYCARDLGASVTTSNAENFHHWGQGTLVTVSS

SEQ ID NO: 3109 - protein, 121 aa, Artificial Sequence
  Description of Artificial Sequence: Synthetic polypeptide
EVQLVESGGDLVQPGGSLRLSCAASGFDFSGYSMAWVRQAPGKGLEWVSYISGTYVSGGTGTMYYLDSVKGRFFISRDDATSSLYLQMDSLRDEDTAVYYCARVYDYGEDWGQGTLVTVSS

SEQ ID NO: 3110 - protein, 124 aa, Artificial Sequence
  Description of Artificial Sequence: Synthetic polypeptide
EVQLVESGGGLVQPGGSLRLSCAGTRFTFSTYAMGWVRQAPGRGLEWVSAIGGSGDSTSYADSVKGRFTISRDNSKNTLYLQMNSLRAEDTAVYYCAKGVYDYLWGSYRLFDYWGQGTLVTVSS

SEQ ID NO: 3111 - protein, 114 aa, Artificial Sequence
  Description of Artificial Sequence: Synthetic polypeptide
EVQLVESGGGLVQPGGSLRLSCAASGFTFPNYVMTWVRQAPGKGLEWVSGISGSGGSTDYADSVKGRFTISRDNSKNTLYLQMNSLRVEDTALYYCAKGSGGIRGQGTMVTVSS

SEQ ID NO: 3112 - protein, 118 aa, Artificial Sequence
  Description of Artificial Sequence: Synthetic polypeptide
EVQLVESGGGLVQPGGSLKLSCAASGFTFSGSAMHWVRQASGKGLEWVGRIRSKANSYATAYAASVKGRFTISRDDSKNTAYLQMNSLKTEDTAVYYCTSPTVTTEVWGQGTLVTVSS

SEQ ID NO: 3113 - protein, 122 aa, Artificial Sequence
  Description of Artificial Sequence: Synthetic polypeptide
EVQLVESGGGLVQPGGSLRLSCIGSSGMTFSSYAFNWVRQTPGKGLEWVSSISRFGSTVDYTDSVRGRFTISRDDGQRSLYLQMNSLRVEDTAVYYCVRSTASGSRSPGIIWGQGTTVTVSS

SEQ ID NO: 3114 - protein, 126 aa, Artificial Sequence
  Description of Artificial Sequence: Synthetic polypeptide
EVQLVQSGAEVKKPGESLKISCKGSGYRFTTYWIGWVRQMPGKGLEWMGIIYPGDSDTRYSPSYQGQVTISADKSISTAYLQWSSLKASDTGMYYCARVAGDIGYENYYYYGMDVWGQGTTVTVSS

SEQ ID NO: 3115 - protein, 118 aa, Artificial Sequence
  Description of Artificial Sequence: Synthetic polypeptide
QVQLVESGGGVVQPGRSLRLSCAASGFTFTRYGMHWVRQAPGKGLEWVAVIWYDGTNKYYADSLQGRFTISRDTSTNTLYLQMNGLRVEDRAVYYCAREGFQGAIDYWGQGTLVTVSS

SEQ ID NO: 3116 - protein, 120 aa, Artificial Sequence
  Description of Artificial Sequence: Synthetic polypeptide
EVQLVESGGGLVQPGGSLKLSCAASGFSFSDSAFHWARQASGKGLEWVGRIRSKGNNYATAYAASVKGRFTVSRDDSKNTTYLQMNSLKTDDTAIYYCTRQGPSYGGINWGLGTLVTVSS

SEQ ID NO: 3117 - protein, 115 aa, Artificial Sequence
  Description of Artificial Sequence: Synthetic polypeptide
EVQLVESGGGFVRPGGSITLSCATSGFTFTKAWMTWVRQAPVKGLEWIGHIKTRIEGATTDYAAPVEGRFTISRDDSKNMVYLQMNSLKTEDSGIYYCSTDFDYWGQGTLVTVSS

SEQ ID NO: 3118 - protein, 121 aa, Artificial Sequence
  Description of Artificial Sequence: Synthetic polypeptide
EVQLVQSGAEVKKPGDSLRISCKASGYNFPNYWIGWVRQMPGKGLEWMGIIYPGDSDIRYSPSFQGHVTISSDKSITTAYLQWTSLKVADSAMYYCARVERPDKGGWFGPWGQGTLVTVSS

SEQ ID NO: 3119 - protein, 114 aa, Artificial Sequence
  Description of Artificial Sequence: Synthetic polypeptide
EVQLVESGGGLVQPGGSLRLSCAASGFTFSAYGMNWVRQAPGKGLEWVAHITGSGTPIFYADSVKGRFTISRDNAKSSLYLQMNSLRNDDTALYFCVRGTVDYWGQGTLVTVSS

SEQ ID NO: 3120 - protein, 124 aa, Artificial Sequence
  Description of Artificial Sequence: Synthetic polypeptide
EVQLVQSGAEVKKPGESLKISCKASGYSFISYWVGWVRQMPGKGLEWMGIIYPGDSDTRYSPSFEGQVSISADKSISTAYLQWTSLKASDTAMYYCARHWGPAAVTDSPWFGPWGQGTLVTVSS

SEQ ID NO: 3121 - protein, 117 aa, Artificial Sequence
  Description of Artificial Sequence: Synthetic polypeptide
EVQLVESGAEVKKPGASVKVSCKASGYIFTAFFMHWVRQAPGQGLEWMGWINPDSGATKYAHNFQGRVTMTRDTSISTAFMELSGLKSDDTGVYYCATGMAVTGNFWGQGTLVTVSS

SEQ ID NO: 3122 - protein, 117 aa, Artificial Sequence
  Description of Artificial Sequence: Synthetic polypeptide
QVQLVQSGAEVKKPGASVKVSCKASGYIFTAFFMHWVRQAPGQGLEWMGWINPDSGATKYAHNFQGRVTMTRDTSISTAFMELSGLKSDDTGVYYCATGMAVTGNFWGQGTLVTVSS

SEQ ID NO: 3123 - protein, 115 aa, Artificial Sequence
  Description of Artificial Sequence: Synthetic polypeptide
EVQLQQSGPELVKPGASVKISCKASGYTFTDYYMNWVKQSHGKSLEWIGDINPNRGGTTYNQKFKGKATLTVDKSSSTAYMELRSLTSEDSAVYYCASYYAVGYWGQGTTLTVSS

SEQ ID NO: 3124 - protein, 115 aa, Artificial Sequence
  Description of Artificial Sequence: Synthetic polypeptide
EVQLQQSGPELVKPGTSVKISCKASGYTFTDYYMNWVKQSHGKSLEWIGDINPNRGGTTYNQKFKGKATLTVDKSSSTAYMELRSLTSEDSAVYYCASYYAVGYWGQGTTLTVSS

SEQ ID NO: 3125 - protein, 115 aa, Artificial Sequence
  Description of Artificial Sequence: Synthetic polypeptide
EVQLQQSGPELVKPGASVKISCKASGYTFTDYYMNWVKQSHGKSLEWIGDINPNRGGTTYNQKFKGKATLTVDTSSSTAYMELRSLTSEDSAVYYCASYYAVGYWGQGTTLTVSS

SEQ ID NO: 3126 - protein, 120 aa, Artificial Sequence
  Description of Artificial Sequence: Synthetic polypeptide
EVQLVESGGGLVKPGGSLKLSCAPSGFTFSDYGMHWVRQAPEKGLEWVAYISSGSSTIYYGDTVKGRFTISRDNAKNTLFLQMTSLRSEDTAMYYCARRGQLRLRLFAYWGQGTLVTVSA

SEQ ID NO: 3127 - protein, 119 aa, Artificial Sequence
  Description of Artificial Sequence: Synthetic polypeptide
EVKLMESGGGLVHPGASLRLYCAASGFTFTDYYMSWVRQPPGKAPEWLALIRNKANGYTTEYTASVKGRFTISRDNSQNILYLQMNTLRAEDSATYYCVKALGRYFDVWGTGTTVTVSS

SEQ ID NO: 3128 - protein, 117 aa, Artificial Sequence
  Description of Artificial Sequence: Synthetic polypeptide
QVQLQQPGAELLKPGASVKLSCKASGYTFTSYWMHWVKQRPGRGLEWIGRIDPNSDRTKYNEKFKRKATLTVDKSSSTAYMQLSSLTSEDSAVYYCARDDYAWFAYWGQGTLVTVSA

SEQ ID NO: 3129 - protein, 119 aa, Artificial Sequence
  Description of Artificial Sequence: Synthetic polypeptide
QVTLKESGPGILQSSQTLSLTCSFSGFSLSTSGMGVSWIRQPSGKGLEWLAHIYWDDDKRYNASLKSRLTISKDTSRNQVFLKITCVDTADTATYYCARLLRPYALDYWGQGTSVTVSS

SEQ ID NO: 3130 - protein, 115 aa, Artificial Sequence
  Description of Artificial Sequence: Synthetic polypeptide
EVQLQQSGPELVKPGASVKISCKASGYTFTDYYMNWVKQSHGKSLEWIGDINPNNGGTSYNQKFKGKATLTVDKSSSTAYMELRSLTSEDSAVYYCVREGRFAYWGHGTLVTVSA

SEQ ID NO: 3131 - protein, 115 aa, Artificial Sequence
  Description of Artificial Sequence: Synthetic polypeptide
QVQLKQSGAELVRPGASVKLSCKASGYTFTDYYINWVKQRPGQGLEWIARIYPGRGNIYYNEKFKGKATLTAEKSSSTAYMQLSSLTSEDSAVYFCARFWDVTYWGQGTLVTVSA

SEQ ID NO: 3132 - protein, 115 aa, Artificial Sequence
  Description of Artificial Sequence: Synthetic polypeptide
EVQLQQSGPELVKPGASVKISCKASGFTFTDYYMNWVKQSHGKSLEWIGDINPNNGGTSYHQKFKGKATLTVDKSSSTAYMELRSLTSEDSAVYYCVREGRFAYWGQGTLVTVSA

SEQ ID NO: 3133 - protein, 115 aa, Artificial Sequence
  Description of Artificial Sequence: Synthetic polypeptide
QVQLVQSGAEVKKPGSSVKVSCKASGYTFTDYYMNWVRQAPGQGLEWIGDINPNRGGTTYNQKFKGRVTITVDKSTSTAYMELSSLRSEDTAVYYCASYYAVGYWGQGTTVTVSS

SEQ ID NO: 3134 - protein, 115 aa, Artificial Sequence
  Description of Artificial Sequence: Synthetic polypeptide
EVQLVQSGAEVKKPGSSVKVSCKASGYTFTDYYMNWVRQAPGQGLEWIGDINPNRGGTTYNQKFKGRVTITVDKSTSTAYMELSSLRSEDTAVYYCASYYAVGYWGQGTTVTVSS

SEQ ID NO: 3135 - protein, 115 aa, Artificial Sequence; identical to SEQ ID NO: 3134
  Description of Artificial Sequence: Synthetic polypeptide

SEQ ID NO: 3136 - protein, 138 aa, Artificial Sequence
  Description of Artificial Sequence: Synthetic polypeptide
VQLQESGGGLVQPGGSRKLSCAASGFTFSNFGMHWVRQAPDKGLEWVAYITSGSSSIYYADTVKGRFTISRDNPKNTLFLQMTSLRSEDTAMYYCARSVPYGYGLFDYWGRGTTLTVSSAKTTPPSVYPLAPGSAAQT

SEQ ID NO: 3137 - protein, 132 aa, Artificial Sequence
  Description of Artificial Sequence: Synthetic polypeptide
VQLQESGGGLVQPGGSRKLSCAASGFTFSNFGMHWVRQAPDKGLEWVAYITSGSSSIYYADTVKGRFTISRDNPKNTLFLQMTSLRSEDTAMYYCARSVPYGYGLFDYWGRGTTLTVSSAKTTPPSVYPLAP

SEQ ID NO: 3138 - protein, 182 aa, Artificial Sequence
  Description of Artificial Sequence: Synthetic polypeptide
DFGLSWVFLALILKGIQCEVQLVESGGDLVKPGGSLKLSCAASGFNFRSYGMSWVRQTPDKRLEWVATISSGGNYTYYPDSVKGRFTISRDNAKNILYLQMSSLNSEDTALYYCTYSFYGAFDYWGQGTTLTVSSAKTTPPSVYPLAPGSAAQTNSMVTLGCLVKGYFPEPVTVTWNSGSLS

SEQ ID NO: 3139 - protein, 117 aa, Artificial Sequence
  Description of Artificial Sequence: Synthetic polypeptide
EVHLVESGGALVKPGGSLRLSCAASGFSFSKYGMSWVRQAPGKGLEWVATISSSGSRTYYPDSVKGRFTISRDNAKNTLYLQMSSLKSEDTAMYYCSISWDGAMDYWGQGTSVTVSS

SEQ ID NO: 3140 - protein, 117 aa, Artificial Sequence
  Description of Artificial Sequence: Synthetic polypeptide
EVHLVESGGALVKPGGSLRLSCAASGFSFSKYGMSWVRQAPGKGLEWVATISSSGSRTYYPDSVKGRFTISRDNAKNTLYLQMNSLRAEDTAMYYCSISWDGAMDYWGQGTTVTVSS

SEQ ID NO: 3141 - protein, 117 aa, Artificial Sequence
  Description of Artificial Sequence: Synthetic polypeptide
EVQLVESGGALVKPGGSLRLSCAASGFSFSKYGMSWVRQAPGKGLEWVATISSSGSRTYYPDSVKGRFTISRDNAKNTLYLQMNSLRAEDTAMYYCSISWDGAMDYWGQGTTVTVSS

SEQ ID NO: 3142 - protein, 117 aa, Artificial Sequence
  Description of Artificial Sequence: Synthetic polypeptide
EVQLVESGGALVKPGGSLRLSCAASGFSFSKYGMSWVRQAPGKGLEWVATISSSGSRTYYPDSVKGRFTISRDNAKNTLYLQMNSLRAEDTAMYYCAISWDGAMDYWGQGTTVTVSS

SEQ ID NO: 3143 - protein, 119 aa, Artificial Sequence
  Description of Artificial Sequence: Synthetic polypeptide
QVQLQQSGTELMKPGASVKISCKATGYTFSSSWMGWVKQRPGHGLEWIGDILPGSGGTNYNERFKGKASFTAETSSNTAYMQLSSLTSEDSAVYYCVRSYYDYDRFANWGQGTLVTVSA

SEQ ID NO: 3144 - protein, 118 aa, Artificial Sequence
  Description of Artificial Sequence: Synthetic polypeptide
EVKLVESGGDLVKPGGSLKLSCAASGFTFSSYAMSWVRQNPEKRLEWVASISKGGNTYYPNSVKGRFTISRDNARNILYLQMSSLRSEDTALYYCARGWGDYGWFAYWGQVTLVTVSA

SEQ ID NO: 3145 - protein, 119 aa, Artificial Sequence
  Description of Artificial Sequence: Synthetic polypeptide
QIQLVQSGPELKKPGETVKISCKASGYTFTDYSMNWVKQAPGQGLKWVGWINTETGEPAYADDFKGRFAFSLETSASTAYLQINNLKNEDTATYFCATDFFDFWGQGTSLTVSSAKTTP

SEQ ID NO: 3146 - protein, 121 aa, Artificial Sequence
  Description of Artificial Sequence: Synthetic polypeptide
EVQLVESGGDLVRPGGSLKLSCAASGFTFRTYGMSWVRQTADKRLEWVATISSGGTYTYYADNVRERFTISRDNARDTLYLQMSRLESDDTAMYYCTRRYGYDGGGSFDVWGAGTRVTVSS

SEQ ID NO: 3147 - protein, 108 aa, Artificial Sequence
  Description of Artificial Sequence: Synthetic polypeptide
QSVEESGGRLVTPGTPLTLTCTVSGLSLSSNAINWVRQAPGKGLEWIGYISTSGNTYYASWAKGRFTISKTSTTVDLKITSPTTEDTATYFCGRGDLWGPGTLVTVSS

SEQ ID NO: 3148 - protein, 114 aa, Artificial Sequence
  Description of Artificial Sequence: Synthetic polypeptide
QSVEESGGRLVTPGTPLTLTCTVSGIDLSSYTMNWVRQAPGKGLDWIGFINSGGYTSYASWTRGRFTISKTSTTVDLRITSPTTEDTATYFCARYGGGSGFDLWGPGTLVTVSS

SEQ ID NO: 3149 - protein, 109 aa, Artificial Sequence
  Description of Artificial Sequence: Synthetic polypeptide
QSVEESGGRLVTPGTPLTLTCKVSGFSLSSYDMNWVRQAPGKGLEWVGAISTGGNTYYASWAKGRFTISKTSTTVTLTITSPTTADTATYFCARGSSIWGPGTLVTVSL

SEQ ID NO: 3150 - protein, 108 aa, Artificial Sequence
  Description of Artificial Sequence: Synthetic polypeptide
QSVEESGGRLVTPGTPLTLTCTVSGLSLSSNAINWVRQAPGKGLEWIGYIAVSGNTYYASWAKGRFTISKASTTVDLKMTSPTAEDTGTYFCGKSNIWGPGTLVTVSL

SEQ ID NO: 3151 - protein, 108 aa, Artificial Sequence
  Description of Artificial Sequence: Synthetic polypeptide
QSVEESGGRLVTPGTPLTLTCTVSGFSLSSNAINWVRQAPGKGLEWIGYIAVSGNTYYASWAKGRFTISKASTTVDLKMTSPTAEDTGTYFCGKSNIWGPGTLVTVSL

SEQ ID NO: 3152 - protein, 109 aa, Artificial Sequence
  Description of Artificial Sequence: Synthetic polypeptide
QSVEESGGRLVTPGTPLTLTCTVSGIDLSSYSITWVRQAPGKGLEYIGFIGTGGSTYYASWAKGRFTISRTSTTVDLKITSPTTEDTATYFCARGGDLWGPGTLVTVSS

SEQ ID NO: 3153 - DNA, 714 bp, Artificial Sequence
  Description of Artificial Sequence: Synthetic polynucleotide
atgaagttgcctgttaggctgttggtgctgatgttctggattcctgcttccagcagtgatgttgtgatgacccaaactccactctccctgcctgtcagtcttggagatcaagcctccatctcttgcagatctagtcagagccttgtacacagtaatggaaacacctatttacattggtacctgcagaagccaggccagtctccaaagctcctgatctacaaagtttccaaccgattttctggggtcccagacaggttcagtggcagtggatcagggacagatttcacactcaagatcagcagagtggaggctgaggatctgggagtttatttctgctctcaaagtacacatgttccgctcacgttcggtgctgggaccaagctggagctgaaacgggctgatgctgcaccaactgtatccatcttcccaccatccagtgagcagttaacatctggaggtgcctcagtcgtgtgcttcttgaacaacttctaccccaaagacatcaatgtcaagtggaagattgatggcagtgaacgacaaaatggcgtcctgaacagttggactgatcaggacagcaaagacagcacctacagcatgagcagcaccctcacgttgaccaaggacgagtatgaacgacataacagctatacctgtgaggccactcacaagacatcaacttcacccattgtcaagagcttcaacaggaatgagtgt

SEQ ID NO: 3154 - DNA, 714 bp, Artificial Sequence
  Description of Artificial Sequence: Synthetic polynucleotide
atgagtcctgcccagttcctgtttctgttagtgctctggattcgggaaaccaacggtgatgttgtgatgacccagactccactcactttgtcggttaccattggacaaccagcctccatctcttgcaagtcaagtcagagcctcttagatagtgatggaaagacatatttgaattggttgttacagaggccaggccagtctccaaagcgcctaatctatctggtgtctaaactggactctggagtccctgacagattcactggcagtggatcagggacagatttcacactgaaaattagcagagtggaggctgaggatttgggagtttattattgctggcaaggtacacattttcctcggacgttcggtggaggcaccaagctggaaatcaaacgggctgatgctgcaccaactgtatccatcttcccaccatccagtgagcagttaacatctggaggtgcctcagtcgtgtgcttcttgaacaacttctaccccaaagacatcaatgtcaagtggaagattgatggcagtgaacgacaaaatggcgtcctgaacagttggactgatcaggacagcaaagacagcacctacagcatgagcagcaccctcacgttgaccaaggacgagtatgaacgacataacagctatacctgtgaggccactcacaagacatcaacttcacccattgtcaagagcttcaacaggaatgagtgt

SEQ ID NO: 3155 - DNA, 714 bp, Artificial Sequence
  Description of Artificial Sequence: Synthetic polynucleotide
atgaagttgcctgttaggctgttggtgctgatgttctggattcctgcttccagcagtgatgttttgatgacccaaactccactctccctgcctgtcagtcttggagatcaagcctccatctcttgcaaatctagtcagagcattgtacatagtaatggaaacacctatttagaatggtacctgcagaaaccaggccagtctccaaagctcctggtctacaaagtttccaatcgattttctggggtcccagacaggttcagtggcagtggatcagggacagatttcacactcaagatcagcagagtggaggctgaggatctgggaacttattactgctttcaaggttcacttgttccttgggcgttcggtggaggcaccaagctggaaatcaaacgggctgatgctgcaccaactgtatccatcttcccaccatccagtgagcagttaacatctggaggtgcctcagtcgtgtgcttcttgaacaacttctaccccaaagacatcaatgtcaagtggaagattgatggcagtgaacgacaaaatggcgtcctgaacagttggactgatcaggacagcaaagacagcacctacagcatgagcagcaccctcacgttgaccaaggacgagtatgaacgacataacagctatacctgtgaggccactcacaagacatcaacttcacccattgtcaagagcttcaacaggaatgagtgt

SEQ ID NO: 3156 - protein, 226 aa, Artificial Sequence
  Description of Artificial Sequence: Synthetic polypeptide
AAQPAMAQSVEESGGRLVTPGTPLTLTCTVSGFSLSAYEVSWVRQAPGKGLEWIGIIYANGNTVYASWAKGRFTISKTSTKVDLRIPSPTTEDTATYFCARDIYTTTTNLWGPGTLVTVSSGQPKAPSVFPLAPCCGDTHSSTVTLGCLVKGYLPEPVTVTWNSGTLTNGVRTFPSVRQSSGLYSLSSVVSVTSSSQPVTCNVAHPATNTKVDKTVAPSTCSKTSC

SEQ ID NO: 3157 - protein, 251 aa, Artificial Sequence
  Description of Artificial Sequence: Synthetic polypeptide
AAQPAMAQLVEESGGRLVTPGTPLTLTCTVSGFSLSSYAMSWVRQAPGKGLEWIGVISSSGNTYYASWAKGRFTISKTSTTVDLKMTSLTTEDTATYFCARGVVSGRIDTGLTLWGPGTLVTVSSVSLSSPTLYPLVSCEGALTDGNLVAMGCLARDFLPSSITFSWSFKNNSEISSRTVRTFPVVKRGDKYMATSQVLVPSKDVLQGTEEYLVCKVQHDNSNRDLRVSFPGEPRGLPRDGEVDSELPTSV

SEQ ID NO: 3158 - protein, 220 aa, Artificial Sequence; identical to SEQ ID NO: 2952
  Description of Artificial Sequence: Synthetic polypeptide

SEQ ID NO: 3159 - protein, 217 aa, Artificial Sequence
  Description of Artificial Sequence: Synthetic polypeptide
AQAAELDMTQTPASVSEPVGGTVTIKCQASQSISSYLAWYQQKPGQRPRLLIYETSTLASGVPSRFKGSGSGTEFTLTISDLECADAATYYCQSTYENPTYVSFGGGTEVGVKGDPVAPTVLIFPPSADLVATGTVTIVCVANKYFPDVTVTWEVDGTTQTTGIENSKTPQNSADCTYNLSSTLTLTSTQYNSHKEYTCKVTQGTTSVVQSFNRGDC

SEQ ID NO: 3160 - protein, 218 aa, Artificial Sequence
  Description of Artificial Sequence: Synthetic polypeptide
AQAAELVMTQTPSSVSAAVGGTVTISCQSSESVYNNNYLSWYQQKPGQPPKRLIDSASTLDSGVPSRFKGSGSGAQFTLTISDLECDDAATYYCAGAYVNWMRIFGGGTEVVVKGDPVAPTVLIFPPSADLVATGTVTIVCVANKYFPDVTVTWEVDGTTQTTGIENSKTPQNSADCTYNLSSTLTLTSTQYNSHKEYTCKVTQGTTSVVQSFNRGDC

SEQ ID NO: 3161 - protein, 238 aa, Artificial Sequence
  Description of Artificial Sequence: Synthetic polypeptide
MGWSCIILFLVATATGVHSDIVMTQSPLSLPVTLGQPASISCRSSKSLLYKDGKTYLNWFQQRPGQSPQLLIYLMSTRASGVPDRFSGGGSGTDFTLKISRVEAEDVGVYYCQQLVEYPLTFGQGTKLEIKRTVAAPSVFIFPPSDEQLKSGTASVVCLLNNFYPREAKVQWKVDNALQSGNSQESVTEQDSKDSTYSLSSTLTLSKADYEKHKVYACEVTHQGLSSPVTKSFNRGEC

SEQ ID NO: 3162 - protein, 238 aa, Artificial Sequence
  Description of Artificial Sequence: Synthetic polypeptide
MGWSCIILFLVATATGVHSDIVMTQSPLSNPVTLGQPVSISCRSSKSLLYKDGKTYLNWFLQRPGQSPQLLIYLMSTRASGVPDRFSGGGSGTDFTLKISRVEAEDVGVYYCQQLVEYPLTFGQGTKLEIKRTVAAPSVFIFPPSDEQLKSGTASVVCLLNNFYPREAKVQWKVDNALQSGNSQESVTEQDSKDSTYSLSSTLTLSKADYEKHKVYACEVTHQGLSSPVTKSFNRGEC

SEQ ID NO: 3163 - protein, 238 aa, Artificial Sequence
  Description of Artificial Sequence: Synthetic polypeptide
MGWSCIILFLVATATGVHSDIVMTQDPLSNPVTLGQPVSISCRSSKSLLYKDGKTYLNWFLQRPGQSPQLLIYLMSTRASGVSDRFSGSGSGTDFTLKISRVEAEDVGVYYCQQLVEYPLTFGQGTKLEIKRTVAAPSVFIFPPSDEQLKSGTASVVCLLNNFYPREAKVQWKVDNALQSGNSQESVTEQDSKDSTYSLSSTLTLSKADYEKHKVYACEVTHQGLSSPVTKSFNRGEC

SEQ ID NO: 3164 - protein, 144 aa, Artificial Sequence
  Description of Artificial Sequence: Synthetic polypeptide
MKLPVRLLVLMFWIPASSSDVVMTQTPLSLPVSLGDQASISCRSSQSLVHSNGNTYLHWYLQKPGQSPKLLIYKVSNRFSGVPDRFSGSGSGTDFTLKISRVDAEDLGVYFCSQSTHVPFTFGGGTKLEIKRADAAPTVSISHH

SEQ ID NO: 3165 - protein, 116 aa, Artificial Sequence
  Description of Artificial Sequence: Synthetic polypeptide
VQLQESGAELVMPGASVKMSCKASGYTFTDYWMHWVKQRPGQGLEWIGAIDPSDSYSSYNQNFKGKATLTVDGSSSTAYMQLSSLTSEDSAVYYCARRITEAGAWFAYWGQGTTVT

SEQ ID NO: 3166 - protein, 238 aa, Artificial Sequence
  Description of Artificial Sequence: Synthetic polypeptide
MDTRAPTQLLGLLLLLPGATFAQVLTQTPSPVSAAVGGTVTINCQSSQSLYNKNWLSWYQKKPGQPPKLLIYKASTLESGVSSRFKGSGSGTQFTLTISGVQCDDAATYYCQGEFSCSSADCTAFGGGTEVVVKGDPVAPTVLIFPPAADQVATGTVTIVCVANKYFPDVTVTWEVDGTTQTTGIENSKTPQNSADCTYNLSSTLTLTSTQYNSHKEYTCKVTQGTTSVVQSFNRGDC

SEQ ID NO: 3167 - protein, 239 aa, Artificial Sequence
  Description of Artificial Sequence: Synthetic polypeptide
MDTRAPTQLLGLLLLWLPGATFAQVLTQTPSPVSAAVGGTVTINCQSSQSLYNKNWLSWYQKKPGQPPKLLIYKASTLESGVSSRFKGSGSGTQFTLTISGVQCDDAATYYCQGEFSCSSADCTAFGGGTEVVVKGDPVAPTVLIFPPAADQVATGTVTIVCVANKYFPDVTVTWEVDGTTQTTGIENSKTPQNSADCTYNLSSTLTLTSTQYNSHKEYTCKVTQGTTSVVQSFNRGDC

SEQ ID NO: 3168 - protein, 123 aa, Artificial Sequence
  Description of Artificial Sequence: Synthetic polypeptide
DIVMTQTPLSLPVSLGDQASISCRSSQSLESSSGYPHLNWYLQKPGQSPQLLIYRVSNRFSGVLDRFSGSGSGTDFTLQISRVEAEDLGVYFCLQITHVPWTFGGGTKLEIKRADAAPTVSAA

SEQ ID NO: 3169 - protein, 218 aa, Artificial Sequence
  Description of Artificial Sequence: Synthetic polypeptide
DIVMTQTPLSLPVTPGEPASISCRSSQRLVHSHGKTYLHWYLQKPGQSPQLLIYKVSNRFSGVPDRFSGSGSGTDFTLKISRVEAEDVGWFCSQTAHFPYTFGGGTKVEIKRTVAAPSVFIFPPSDEQLKSGTASVVCLLNNFYPREAKVQWKVDNALQSGNSQESVTEQDSKDSTYSLSSTLTLSKADYEKHKVYACEVTHQGLSSPVTKSFNRGEC

SEQ ID NO: 3170 - protein, 218 aa, Artificial Sequence
  Description of Artificial Sequence: Synthetic polypeptide
DIVMTQTPLSLPVTPGEPASISCRSSQSLVHSHGKTYLHWYLQKPGQSPQLLIYKVSNRFSGVPDRFSGSGSGTDFTLKISRVEAEDVGWFCSQTAHFPYTFGGGTKVEIKRTVAAPSVFIFPPSDEQLKSGTASVVCLLNNFYPREAKVQWKVDNALQSGNSQESVTEGDSKDSTYSLSSTLTLSKADYEKHKVYACEVTHQGLSSPVTKSFNRGEC

SEQ ID NO: 3171 - protein, 112 aa, Artificial Sequence
  Description of Artificial Sequence: Synthetic polypeptide
DVLMTQTPLSLAVNLGDQASLSCRSSQTILHSNGNTYLEWYLQKPGQSPRLLIYKVSKRFSGVPDRFSGSGSGTDFTLKISRVEADDLGIYYCFQGSLVPWAFGGGTKLEIK

SEQ ID NO: 3172 - protein, 112 aa, Artificial Sequence; identical to SEQ ID NO: 2977
  Description of Artificial Sequence: Synthetic polypeptide

SEQ ID NO: 3173 - protein, 107 aa, Artificial Sequence [sequence omitted]

SEQ ID NO: 3174 - protein, 219 aa, Artificial Sequence
  Description of Artificial Sequence: Synthetic polypeptide
DIVMTQTPLSLPVTPGEPASISCRSSQRLVHSHGKTYLHWYLQKPGQSPQLLIYKVSNRFSGVPDRFSGSGSGTDFTLKISRVEAEDVGVYFCSQTAHFPYTFGGGTKVEIKRTVAAPSVFIFPPSDEQLKSGTASVVCLLNNFYPREAKVQWKVDNALQSGNSQESVTEQDSKDSTYSLSSTLTLSKADYEKHKVYACEVTHQGLSSPVTKSFNRGEC

SEQ ID NO: 3175 - protein, 219 aa, Artificial Sequence
  Description of Artificial Sequence: Synthetic polypeptide
DIVMTQTPLSLPVTPGEPASISCRSSQSLVHSHGKTYLHWYLQKPGQSPQLLIYKVSNRFSGVPDRFSGSGSGTDFTLKISRVEAEDVGVYFCSQTAHFPYTFGGGTKVEIKRTVAAPSVFIFPPSDEQLKSGTASVVCLLNNFYPREAKVQWKVDNALQSGNSQESVTEQDSKDSTYSLSSTLTLSKADYEKHKVYACEVTHQGLSSPVTKSFNRGEC

SEQ ID NO: 3176 - protein, 441 aa, Artificial Sequence; identical to SEQ ID NO: 2968
  Description of Artificial Sequence: Synthetic polypeptide

SEQ ID NO: 3177 - protein, 112 aa, Artificial Sequence
  Description of Artificial Sequence: Synthetic polypeptide
NDIVMTQSPASLAVSLGQRATISYRASKSVSTSGYSYMHWNQQKPGQPPRLLIYLVSNLESGVPARFSGSGSGTDFTLNIHPVEEEDAATYYCQHIRELTRSARGQSWKKRC

SEQ ID NO: 3178 - protein, 109 aa, Artificial Sequence
  Description of Artificial Sequence: Synthetic polypeptide
NQIVLTQSPAIMSASPGEKVTITCSASSSVSYMYWFQQKPGTSPKLWIYSTSNLASGVPARFSGSGSGTSYSLTISRMEAEDAATYYCQQRSSYPLTFGAGTKLELKRC

SEQ ID NO: 3179 - protein, 114 aa, Artificial Sequence
  Description of Artificial Sequence: Synthetic polypeptide
NDIVLTQSPASLAVSLGQRATISCRASESVDNYGISFMNWFQQKPGQPPKLLIYAASNQGSGVPARFSGSGSGTDFSLNIHPMEEDDTAMYFCQQSKEVPRTFGGGTKLEMKRC

SEQ ID NO: 3180 - protein, 110 aa, Artificial Sequence
  Description of Artificial Sequence: Synthetic polypeptide
NDIQMTQSPSSLSASVGDRVTITCRASQGIRNDLGWYQQKPGKAPKRLIYAASSLQSGVPSRFSGSGSGTEFTLTISSLQPEDFATFYCLQHNSLPLTFGGGTKVEIKRC

SEQ ID NO: 3181 - protein, 116 aa, Artificial Sequence
  Description of Artificial Sequence: Synthetic polypeptide
NDIQMTQSPDSLAVSLGERATINCKSSQSVSYSSNNKNYLAWYQQKPGQPPKLLIYWASTRESGVPDRISGSGSGTDFTLTISSLQAEDVAVYYCQQHYNTPLTFGGGTKVEIKRC

SEQ ID NO: 3182 - protein, 112 aa, Artificial Sequence
  Description of Artificial Sequence: Synthetic polypeptide
NEIVLTQSPGTLSLSPGERATLSCRASQSVSSNYLTWYQQKPGQAPRLLIYGASSRATGIPDRFSGSGSGTDFTLTISRLEPEDFAVYYCQQYGRSPPITFGQGTRLEIKRC

SEQ ID NO: 3183 - protein, 112 aa, Artificial Sequence
  Description of Artificial Sequence: Synthetic polypeptide
NGIVLTQSPGTLSLSPGERATFSCRASQSGSSTYLAWYQQKPGQAPRLLIYGASSRATGIPDRFSGSGSGTDFTLTISRLEPEDFAVYYCQQYGRSPPITFGQGTRLEIKRC

SEQ ID NO: 3184 - protein, 234 aa, Artificial Sequence
  Description of Artificial Sequence: Synthetic polypeptide
METDTLLLWLLLLMFPGTRCDIQMTQSPSSLSASLGERVSLTCRASQDIGGNLYWLQQGPDGTIKRLIYATSSLDSGVPKRFSGSRSGSDYSLTISSLESEDFVDYYCLQYSSSPWTFGGATKMEIKRTVAAPSVFIFPPSDEQLKSGTASVVCLLNNFYPREAKVQWKVDNALQSGNSQESVTEQDSKDSTYSLSSTLTLSKADYEKHKVYACEVTHQGLSSPVTKSFNRGEC

SEQ ID NO: 3185 - protein, 234 aa, Artificial Sequence; identical to SEQ ID NO: 3184
  Description of Artificial Sequence: Synthetic polypeptide

SEQ ID NO: 3186 - protein, 238 aa, Artificial Sequence
  Description of Artificial Sequence: Synthetic polypeptide
MGWSCIILFLVATATGVHSDIVITQSPLSLPVTLGQPASISCRSSKSLLYKDGKTYLNWFQQRPGQSPQLLIYLMSTRASGVPDRFSGGGSGTDFTLKISRVEAEDVGVYYCQQLVEYPLTFGQGTKLEIKRTVAAPSVFIFPPSDEQLKSGTASVVCLLNNFYPREAKVQWKVDNALQSGNSQESVTEQDSKDSTYSLSSTLTLSKADYEKHKVYACEVTHQGLSSPVTKSFNRGEC

SEQ ID NO: 3187 - protein, 237 aa, Artificial Sequence
  Description of Artificial Sequence: Synthetic polypeptide
MGWSCIILFLVATATGVHSDIVMTQSPLSLPVTLGQPASISCRSSKSLLYKDGKTYLNWFQQRPGQSPQLLIYLMSTRASGVPDRFSGGGSGTDFTLKISRVEAEDVGVYYCQQLVEYPLTFGQGTKLEIKRTVAAPSVFIFPPSDEQLKSGTASWCLLNNFYPREAKVQWKVDNALQSGNSQESVTEQDSKDSTYSLSSTLTLSKADYEKHKVYACEVTHQGLSSPVTKSFNRGEC

SEQ ID NO: 3188 - protein, 238 aa, Artificial Sequence
  Description of Artificial Sequence: Synthetic polypeptide
MGWSCIILFLVATATGVHSDIVMTQSPLSLPVTLGQPASISCRSSKSLLYKDGKTYLNWFLQRPGQSPQLLIYLMSTRASGVPDRFSGGGSGTDFTLKISRVEAEDVGVYYCQQLVEYPLTFGQGTKLEIKRTVAAPSVFIFPPSDEQLKSGTASVVCLLNNFYPREAKVQWKVDNALQSGNSQESVTEQDSKDSTYSLSSTLTLSKADYEKHKVYACEVTHQGLSSPVTKSFNRGEC

SEQ ID NO: 3189 - protein, 237 aa, Artificial Sequence
  Description of Artificial Sequence: Synthetic polypeptide
MGWSCIILFLVATATGVHSDIVMTQSPLSLPVTLGQPASISCRSSKSLLYKDGKTYLNWFLQRPGQSPQLLIYLMSTRASGVSDRFSGGGSGTDFTLKISRVEAEDVGVYYCQQLVEYPLTFGQGTKLEIKRTVAAPSVFIFPPSDEQLKSGTASWCLLNNFYPREAKVQWKVDNALQSGNSQESVTEQDSKDSTYSLSSTLTLSKADYEKHKVYACEVTHQGLSSPVTKSFNRGEC

SEQ ID NO: 3190 - protein, 237 aa, Artificial Sequence
  Description of Artificial Sequence: Synthetic polypeptide
MGWSCIILFLVATATGVHSDIVMTQSPLSNPVTLGQPVSISCRSSKSLLYKDGKTYLNWFLQRPGQSPQLLIYLMSTRASGVPDRFSGGGSGTDFTLKISRVEAEDVGVYYCQQLVEYPLTFGQGTKLEIKRTVAAPSVFIFPPSDEQLKSGTASWCLLNNFYPREAKVQWKVDNALQSGNSQESVTEQDSKDSTYSLSSTLTLSKADYEKHKVYACEVTHQGLSSPVTKSFNRGEC

SEQ ID NO: 3191 - protein, 237 aa, Artificial Sequence
  Description of Artificial Sequence: Synthetic polypeptide
MGWSCIILFLVATATGVHSDIVMTQDPLSLPVTLGQPASISCRSSKSLLYKDGKTYLNWFQQRPGQSPQLLIYLMSTRASGVSDRFSGSGSGTDFTLKISRVEAEDVGVYYCQQLVEYPLTFGQGTKLEIKRTVAAPSVFIFPPSDEQLKSGTASWCLLNNFYPREAKVQWKVDNALQSGNSQESVTEQDSKDSTYSLSSTLTLSKADYEKHKVYACEVTHQGLSSPVTKSFNRGEC

SEQ ID NO: 3192 - protein, 238 aa, Artificial Sequence; identical to SEQ ID NO: 3163
  Description of Artificial Sequence: Synthetic polypeptide

SEQ ID NO: 3193 - protein, 238 aa, Artificial Sequence
  Description of Artificial Sequence: Synthetic polypeptide
MGWSCIILFLVATATGVHSDIVMTQSPLSLPVTPGEPASISCRSSKSLLYKDGKTYLNWFLQRPGQSPQLLIYLMSTRASGVPDRFSGSGSGTDFTLKISRVEAEDVGVYYCQQLVEYPLTFGGGTKVEIKRTVAAPSVFIFPPSDEQLKSGTASVVCLLNNFYPREAKVQWKVDNALQSGNSQESVTEQDSKDSTYSLSSTLTLSKADYEKHKVYACEVTHQGLSSPVTKSFNRGEC

SEQ ID NO: 3194 - protein, 214 aa, Artificial Sequence
  Description of Artificial Sequence: Synthetic polypeptide
EIVLTQSPATLSLSPGERATLSCRASQSVSSYLAWYQQKPGQAPRLLIYDASNRATGIPARFSGSGSGTDFTLTISSLEPEDFAVYYCQQRSNWPITFGQGTKLEIKRTVAAPSVFIFPPSDEQLKSGTASVVCLLNNFYPREAKVQWKVDNALQSGNSQESVTEQDSKDSTYSLSSTLTLSKADYEKHKVYACEVTHQGLSSPVTKSFNRGEC

SEQ ID NO: 3195 - protein, 213 aa, Artificial Sequence
  Description of Artificial Sequence: Synthetic polypeptide
SYELTQPPSVSVSPGQTARISCFGDTLPKQYTYWYQQKPGQAPVLVIYKDTERPSGIPERFSGSSSGTTVTLTISGVQAEDEADYYCLSADNSATWVFGGGTKVTVLGQPKSSPSVTLFPPSSEELETNKATLVCTITDFYPGVVTVDWKVDGTPVTQGMETTQPSKQSNNKYMASSYLTLTARAWERHSSYSCQVTHEGHTVEKSLSRADCS

SEQ ID NO: 3196 - protein, 112 aa, Artificial Sequence
  Description of Artificial Sequence: Synthetic polypeptide
DIVITQSPLSLPVTLGQPASISCRSSKSLLYKDGKTYLNWFQQRPGQSPQLLIYLMSTRASGVPDRFSGGGSGTDFTLKISRVEAEDVGVYYCQQLVEYPLTFGQGTKLEIK

SEQ ID NO: 3197 - protein, 112 aa, Artificial Sequence
  Description of Artificial Sequence: Synthetic polypeptide
DIVMTQSPLSLPVTLGQPASISCRSSKSLLYKDGKTYLNWFQQRPGQSPQLLIYLMSTRASGVPDRFSGGGSGTDFTLKISRVEAEDVGVYYCQQLVEYPLTFGQGTKLEIK

SEQ ID NO: 3198 - protein, 112 aa, Artificial Sequence
  Description of Artificial Sequence: Synthetic polypeptide
DIVMTQSPLSLPVTLGQPASISCRSSKSLLYKDGKTYLNWFLQRPGQSPQLLIYLMSTRASGVPDRFSGGGSGTDFTLKISRVEAEDVGVYYCQQLVEYPLTFGQGTKLEIK

SEQ ID NO: 3199 - protein, 112 aa, Artificial Sequence
  Description of Artificial Sequence: Synthetic polypeptide
DIVMTQSPLSLPVTLGQPASISCRSSKSLLYKDGKTYLNWFLQRPGQSPQLLIYLMSTRASGVSDRFSGGGSGTDFTLKISRVEAEDVGVYYCQQLVEYPLTFGQGTKLEIK

SEQ ID NO: 3200 - protein, 112 aa, Artificial Sequence [sequence omitted]

SEQ ID NO: 3201 - protein, 112 aa, Artificial Sequence
  Description of Artificial Sequence: Synthetic polypeptide
DIVMTQDPLSLPVTLGQPASISCRSSKSLLYKDGKTYLNWFQQRPGQSPQLLIYLMSTRASGVSDRFSGSGSGTDFTLKISRVEAEDVGVYYCQQLVEYPLTFGQGTKLEIK

SEQ ID NO: 3202 - protein, 112 aa, Artificial Sequence
  Description of Artificial Sequence: Synthetic polypeptide
DIVMTQDPLSNPVTLGQPVSISCRSSKSLLYKDGKTYLNWFLQRPGQSPQLLIYLMSTRASGVSDRFSGSGSGTDFTLKISRVEAEDVGVYYCQQLVEYPLTFGQGTKLEIK

SEQ ID NO: 3203 - protein, 112 aa, Artificial Sequence
  Description of Artificial Sequence: Synthetic polypeptide
DIVMTQSPLSLPVTPGEPASISCRSSKSLLYKDGKTYLNWFLQRPGQSPQLLIYLMSTRASGVPDRFSGSGSGTDFTLKISRVEAEDVGVYYCQQLVEYPLTFGGGTKVEIK

SEQ ID NO: 3204 - protein, 111 aa, Artificial Sequence
  Description of Artificial Sequence: Synthetic polypeptide
DIVMTQAAPSVPVTPGESVSISCRSSKSLLHSNGNTYLYWFLQRPGQSPQLLIYRMSNLASGVPDRFSGSGSGTAFTLRISRVEAEDVGVYYCMQHLEYPLTFGAGTKLEL

SEQ ID NO: 3205 - protein, 116 aa, Artificial Sequence
  Description of Artificial Sequence: Synthetic polypeptide
AALTQPASVSANPGETVKITCSGGGSYAGSYYYGWYHGSYYYGWYQQKAPGSAPVTVIYDNTNRPSNIPSRFSGSLSGSTNTLTITGVRAEDEAVYFCGSADNSGAAFGAGTTLTV

SEQ ID NO: 3206 - protein, 111 aa, Artificial Sequence
  Description of Artificial Sequence: Synthetic polypeptide
AVTQPASVSANPGETVRITCSGGGSYAGTYYYGYRYGWYQQKSPGSAPVTVIYYNDKRPSDIPSRFSGSLSGSTNTLTITGVRADDEAVYFCGSYDNSGAAFGAGTTLTVL

SEQ ID NO: 3207 - protein, 115 aa, Artificial Sequence
  Description of Artificial Sequence: Synthetic polypeptide
DIVMTQSPDSLAVSLGERATINCKSSHSVLYSSNQKNYLAWYQQKPGQPPKLLIYWASTRESGVPDRFSGSGSGTDFTLTISSLQAEDVAVYYCHQYLSSLTFGQGTKLEIKRTV

SEQ ID NO: 3208 - protein, 115 aa, Artificial Sequence
  Description of Artificial Sequence: Synthetic polypeptide
DIVMTQSPDSLAVSLGERATINCKSSHSVLYSSNQKNYLAWYQQKPGQPPKLLIYWASTRESGVPDRFSGSGSGTDFTLTIINLQAEDVAVYYCHQYLSSLTFGQGTKLEIKRTV

SEQ ID NO: 3209 - protein, 115 aa, Artificial Sequence
  Description of Artificial Sequence: Synthetic polypeptide
DIVMTQSPDSLAVSLGERATINCKSSHSVLYSSNQKNYLAWYQQKPGQPPKLLIYWASTRESGVPDRFSGSGSGTDFTLTISSLHTEDVAVYYCHQYLSSLTFGQGTKLEIKRTV

SEQ ID NO: 3210 - protein, 115 aa, Artificial Sequence
  Description of Artificial Sequence: Synthetic polypeptide
DIVMTQSPDSLAVSLGERATINCKSSHSVLYSSNQKNYLAWYQQKPGQPPKLLIYWASTRESGVPDRFSGSGSGTDFTLTIINLHTEDVAVYYCHQYLSSLTFGQGTKLEIKRTV

SEQ ID NO: 3211 - protein, 105 aa, Artificial Sequence
  Description of Artificial Sequence: Synthetic polypeptide
DIQMTQSPSSLSASVGDRVTITCRASQSISSYLNWYQQKPGKAPKVLIYAASTLRSGVPSRFSGSGSGTDFTLSVSSLQPEDFATYYCQQSYHTPWTFGQGTKVE

SEQ ID NO: 3212 - protein, 105 aa, Artificial Sequence
  Description of Artificial Sequence: Synthetic polypeptide
DIQMTQSPSSLSASVGDRVTITCRASQGIGNYLAWYQQKPGKVPKLLIYTTSILQSGVPSRFSGSGSGTDFTLTISSLQPEDFATYYCQKYNSAPRTFGQGTRVD

SEQ ID NO: 3213 - protein, 110 aa, Artificial Sequence
  Description of Artificial Sequence: Synthetic polypeptide
TQTPLSLPVSLGDQASISCRSSQSLVHSNGNTYLHWYLQKPGQSPKLLIYRVSNRFSGVPDASGFSGSRSGTDFTLKISRVGAGDLGVYFCSQSTHVPFTFGSGTKLEIK

SEQ ID NO: 3214 - protein, 112 aa, Artificial Sequence; identical to SEQ ID NO: 3203
  Description of Artificial Sequence: Synthetic polypeptide

SEQ ID NO: 3215 - protein, 112 aa, Artificial Sequence; identical to SEQ ID NO: 3197
  Description of Artificial Sequence: Synthetic polypeptide

SEQ ID NO: 3216 - protein, 112 aa, Artificial Sequence; identical to SEQ ID NO: 3198
  Description of Artificial Sequence: Synthetic polypeptide

SEQ ID NO: 3217 - protein, 112 aa, Artificial Sequence; identical to SEQ ID NO: 3199
  Description of Artificial Sequence: Synthetic polypeptide

SEQ ID NO: 3218 - protein, 112 aa, Artificial Sequence [sequence omitted]

SEQ ID NO: 3219 - protein, 112 aa, Artificial Sequence; identical to SEQ ID NO: 3201
  Description of Artificial Sequence: Synthetic polypeptide

SEQ ID NO: 3220 - protein, 112 aa, Artificial Sequence; identical to SEQ ID NO: 3202
  Description of Artificial Sequence: Synthetic polypeptide

SEQ ID NO: 3221 - protein, 112 aa, Artificial Sequence; identical to SEQ ID NO: 3196
  Description of Artificial Sequence: Synthetic polypeptide

SEQ ID NO: 3222 - protein, 112 aa, Artificial Sequence
  Description of Artificial Sequence: Synthetic polypeptide
DIVITQDELSNPVTSGESVSISCRSSKSLLYKDGKTYLNWFLQRPGQSPQLLIYLMSTRASGVSDRFSGSGSGTDFTLEISRVKAEDVGVYYCQQLVEYPLTFGAGTKLELK

SEQ ID NO: 3223 - protein, 112 aa, Artificial Sequence
  Description of Artificial Sequence: Synthetic polypeptide
DVVMTQTPLSLPVSLGDQASISCRSSQSLVHSNGNTYLHWYLQKPGQSPKLLIYKVSNRFSGVPDRFSGSGSGTDFTLKISRVEAEDLGVYFCSQSTHVPLTFGAGTKLELK

SEQ ID NO: 3224 - protein, 114 aa, Artificial Sequence
  Description of Artificial Sequence: Synthetic polypeptide
DIVMYQSPSSLAMSVGQKVIMNCKSSQSLLSSNNQKNYLAWYQQKPGQSPKLLVYFASTRDSGVPDRFIGSGSGTDFTLTISSVQAEDLADYFCQQHYTTPLTFGAGTKLELKR

SEQ ID NO: 3225 - protein, 113 aa, Artificial Sequence
  Description of Artificial Sequence: Synthetic polypeptide
DIVMTQSPSSLAMSVGQKVTMSCKSSQSLLNSRNQKNYLAWYQQKPGQSPKLLLYFASTRESGVPDRFIGSGSGTDFTLTISSVQAEDLADYFCQQHYTTPLTFGAGTKELKR

SEQ ID NO: 3226 - protein, 234 aa, Artificial Sequence
  Description of Artificial Sequence: Synthetic polypeptide
MSVLTQVLALLLLWLTGTRCEIVLTQSPATLSLSPGERATLSCRASQSVSSYLAWYQQKPGQAPRLLIYDASNRATGIPARFSGSGSGTDFTLTISSLEPEDFAVYYCQQRSNWPITFGQGTKLEIKRTVAAPSVFIFPPSDEQLKSGTASVVCLLNNFYPREAKVQWKVDNALQSGNSQESVTEQDSKDSTYSLSSTLTLSKADYEKHKVYACEVTHQGLSSPVTKSFNRGEC

SEQ ID NO: 3227 - protein, 246 aa, Artificial Sequence
  Description of Artificial Sequence: Synthetic polypeptide
MEAPAQLLFLLLLWLPDTTGEIVLTQSPATLSLSPGERATCDRLLSCRASQSVSSYLAWYQQKPCDRLGQAPRLLIYDASNRATGIPARFSGSGSGTDFTLTISSLEPCDRLEDFAVYYCQQRSNWPITFGQGTRLEIKRTVAAPSVFIFPPSDEQLKSGTASVVCLLNNFYPREAKVQWKVDNALQSGNSQESVTEQDSKDSTYSLSSTLTLSKADYEKHKVYACEVTHQGLSSPVTKSFNRGEC

SEQ ID NO: 3228 - protein, 132 aa, Artificial Sequence
  Description of Artificial Sequence: Synthetic polypeptide
MDTRAPTQLLGLLLLLPGATFAQVLTQTPSPVSAAVGGTVTINCQSSQSLYNKNWLSYQKKPGQPPKLLIYKASTLESGVSSRFKGSGSGTQFTLTISGVQCDDAATYYCQGEFSCSSADCTAFGGGTEVVV

SEQ ID NO: 3229 - protein, 134 aa, Artificial Sequence
  Description of Artificial Sequence: Synthetic polypeptide
MDTRAPTQLLGLLLLWLPGATFAQVLTQTPSPVSAAVGGTVTINCQSSQSLYNKNWLSWYQKKPGQPPKLLIYKASTLESGVSSRFKGSGSGTQFTLTISGVQCDDAATYYCQGEFSCSSADCTAFGGGTEVVV

SEQ ID NO: 3230 - protein, 113 aa, Artificial Sequence
  Description of Artificial Sequence: Synthetic polypeptide
DIVMTQTPLSLSVTPGQPASISCRSSQSLEYSDGYTFLEWYLQKPGQSPQLLIYEVSNRFSGVPDRFSGSGSGTDFTLKISRVEAEDVGVYYCFQATHDPLTFGQGTKLEIKR

SEQ ID NO: 3231 - protein, 113 aa, Artificial Sequence
  Description of Artificial Sequence: Synthetic polypeptide
DVVMTQSPLSLPVTLGQPASISCRSSQSLEYSDGYTFLEWFQQRPGQSPRRLIYEVSNRFSGVPDRFSGSGSGTDFTLKISRVEAEDVGVYYCFQATHDPLTFGQGTKLEIKR

SEQ ID NO: 3232 - protein, 113 aa, Artificial Sequence
  Description of Artificial Sequence: Synthetic polypeptide
DVVMTQSPLSLPVTLGQPASISCRSSQSLEYSDGYTFLEWYLQKPGQSPQLLIYEVSNRFSGVPDRFSGSGSGTDFTLKISRVEAEDVGVYYCFQATHDPLTFGQGTKLEIKR

SEQ ID NO: 3233 - protein, 115 aa, Artificial Sequence
  Description of Artificial Sequence: Synthetic polypeptide
EVQLVESGGGVVQPGRSLRLSCAASGFTFSNYGMNWIRQAPGKGLEWIGMIYYDSSEKHYADSVKGRFTISRDNSKNTLYLQMNSLRAEDTAVYYCAKGTTPDYWGQGTMVTVSS

SEQ ID NO: 3234 - protein, 115 aa, Artificial Sequence
  Description of Artificial Sequence: Synthetic polypeptide
EVQLVESGGGLVQPGGSLRLSCAASGFTFSNYGMNWVRQAPGKGLEWVSMIYYDSSEKHYADSVKGRFTISRDNSKNTLYLQMNSLRAEDTAVYYCAKGTTPDYWGQGTMVTVSS

SEQ ID NO: 3235 - protein, 115 aa, Artificial Sequence
  Description of Artificial Sequence: Synthetic polypeptide
EVQLVESGGGLVQPGGSLRLSCAASGFTFSNYGMNWIRQAPGKGLEWIGMIYYDSSEKHYADSVKGRFTISRDNSKNTLYLQMNSLRAEDTAVYYCAKGTTPDYWGQGTMVTVSS

SEQ ID NO: 3236 - protein, 113 aa, Artificial Sequence
  Description of Artificial Sequence: Synthetic polypeptide
DVVLTQSPLSLPVTLGQPASISCRSSQSLEYSDGYTFLEWFQQRPGQSPRLLIYEVSNRFSGVPDRFSGSGSGTDFTLKISRVEAEDVGVYYCFQATHDPLTFGQGTKLEIKR

SEQ ID NO: 3237 - protein, 113 aa, Artificial Sequence
  Description of Artificial Sequence: Synthetic polypeptide
DVVLTQSPLSLPVTLGQPASISCRSSQSLEYSDGYTFLEWFQQRPGQSPRRLIYEVSNRFSGVPDRFSGSGSGTDFTLKISRVEAEDVGVYYCFQATHDPLTFGQGTKLEIKR

SEQ ID NO: 3238 - protein, 109 aa, Artificial Sequence
  Description of Artificial Sequence: Synthetic polypeptide
SYELTQPPSVSVSPGQTARITCSGNQLGHKFASWYQQKPGQSPVVVIYEDKKRPSGIPERFSGSNSGNTATLTISGTQAMDEADYYCQVWDVITDHYVFGTGTKVTVLG

SEQ ID NO: 3239 - protein, 108 aa, Artificial Sequence
  Description of Artificial Sequence: Synthetic polypeptide
DIQVTQSPSSLAASVGDRVTITCQASQDISNYLNWYQQRPGKAPKLLIYDASNLETGVPPRFSGDGSGTHFSFTITNVQPEDVGTYYCQQYDSLPLTFGQGTRLEIKR

SEQ ID NO: 3240 - protein, 108 aa, Artificial Sequence
  Description of Artificial Sequence: Synthetic polypeptide
DIQVTQSPSSLSASVGDRVTITCRASQPISTYVNWYQQKPGKAPKLLIYDASTLEIGVPSRISGSGSGTDFTFTISSLQPEDIATYYCQQYDNFPLTFGGGTKVDIKR

SEQ ID NO: 3241 - protein, 108 aa, Artificial Sequence
  Description of Artificial Sequence: Synthetic polypeptide
DIRVTQSPSSLSASVGDRVTITCQANEDISIYLNWYQQRPGKAPKLLIYDASNLETGVPSRFSGSGSGTDFTFTISSLQPEDFATYYCQQYHTYPFTFGGGTKVDIKR

SEQ ID NO: 3242 - protein, 106 aa, Artificial Sequence
  Description of Artificial Sequence: Synthetic polypeptide
SYELTQPPSVSVSPGQTASITCSGDKLGDKYACWYQQKPGQSPVLVIYQDSKRPSGIPKRFSGSNSGDTATLTISGTQAMDEADYYCQAWDSSTGVFGPGTKVTVL

SEQ ID NO: 3243 - protein, 108 aa, Artificial Sequence
  Description of Artificial Sequence: Synthetic polypeptide
DIVMTQTPSSLSASVGDRVTITCQASQDISDYLNWYQQKPGKAPKLLIYDASTLESGVPSRFSGSGSGTDFTLTISGLQPEDFATYYCQQSYSIPPTFGPGTRLEIKR

SEQ ID NO: 3244 - protein, 111 aa, Artificial Sequence
  Description of Artificial Sequence: Synthetic polypeptide
QSGLTQPPSVSAAPGQRVTISCTGSGSNIGAGYGVHWYQQLPATAPKILIYGDYNRPSGVPDRFSGSRSGTSASLTITGLQAEDEADYYCQSYDNSLRGVLFGGGTKLTVL

SEQ ID NO: 3245 - protein, 111 aa, Artificial Sequence
  Description of Artificial Sequence: Synthetic polypeptide
QPVLTQSPSVSASLGASVKVTCTLSSGHSAYAIAWHQQQPEKGPRYLMKVNSDGSHNKGDGVPDRFSGSSSGAERYLIISGLQSEDEADYYCQTWGPGIRVFGGGTKLTVL

SEQ ID NO: 3246 - protein, 107 aa, Artificial Sequence
  Description of Artificial Sequence: Synthetic polypeptide
DVVMTQSPDFQSVTPEDKVTITCRASQSIGSCLHWYQQKPDQSPKLLIKYASQSISGVPSRFSGSGSGTDFTLTINSLEAEDAATYYCHQSSSLPYTFGQGTKLEIK

SEQ ID NO: 3247 - protein, 108 aa, Artificial Sequence
  Description of Artificial Sequence: Synthetic polypeptide
SYELTQPPSVSVAPGQTARITCGGNNIGSKSVHWYQQKPGQAPVLVVYDDSDRPSGIPERFSGSNSGNTATLTISRVEAGDEADYYCQVWGSSSDHYVFGTGTKVTVL

SEQ ID NO: 3248 - protein, 109 aa, Artificial Sequence
  Description of Artificial Sequence: Synthetic polypeptide
QSALTQPRSVSGSPGQSVTISCTGTSSSVGDSIYVSWYQQHPGKAPKLMLYDVTKRPSGVPDRFSGSKSGNTASLTISGLQAEDEADYYCCSYAGTDTLFGGGTKVTVL

SEQ ID NO: 3249 - protein, 110 aa, Artificial Sequence
  Description of Artificial Sequence: Synthetic polypeptide
QSVLTQPPSASGTPGQRVTISCSGASSNVGSNRVNWYQQFPGMAPKLLIYSNNQRPSGVPDRFSGSKSGTSASLAISGLQSEDEADYYCAAWDDSLNGYVFGTGTKVTVL

SEQ ID NO: 3250 - protein, 108 aa, Artificial Sequence
  Description of Artificial Sequence: Synthetic polypeptide
SYELTQPPSVSVAPGQTARITCGGNNIGDISVHWYQQKSGQAPMLVVHDDSDRPSGIPERFSGSNSGSSATLTISRVEAGDEADYHCQVWDSGSGHHVFGTGTKVTVL

SEQ ID NO: 3251 - protein, 108 aa, Artificial Sequence
  Description of Artificial Sequence: Synthetic polypeptide
DIQLTQSPSSLSASVGDGVTITCQASQDISNYLNWYQQKPGKAPKLLIYDASNLETGVPSRFSGSGSGTFFTLTINNLQPEDFATYYCQQSGNTPWTFGQGTKVEINR

SEQ ID NO: 3252 - protein, 107 aa, Artificial Sequence
  Description of Artificial Sequence: Synthetic polypeptide
SYELTQPPSVSVSPGQTARISCFGDTLPKQYTYWYQQKPGQAPVLVIYKDTERPSGIPERFSGSSSGTTVTLTISGVQAEDEADYYCLSADNSATWVFGGGTKVTVL

SEQ ID NO: 3253 - protein, 108 aa, Artificial Sequence
  Description of Artificial Sequence: Synthetic polypeptide
SYELTQPPSVSVSPGQTAGITCSGDALPKQFVYWYQKKPGQAPVLLIYKDTERPSRIPERFSGSTSGTTVALTINGVQAEDEADYYCQSADRSGALWVFGGGTKLTVL

SEQ ID NO: 3254 - protein, 108 aa, Artificial Sequence
  Description of Artificial Sequence: Synthetic polypeptide
SYELTQPPSVSVSPGQTARITCSGDALPKKYAYWYQQKSGQAPVLVIYEDNKRPSGIPERFSGSSSGTVATLTISGAQVDDEADYYCYSTDISGDLRVFGGGTKLTVL

SEQ ID NO: 3255 - protein, 112 aa, Artificial Sequence
  Description of Artificial Sequence: Synthetic polypeptide
DIVMSQSPSSLAVSAGEKVTMSCKSSQSLLNSRTRKNYLAWYQQKPGQSPKLLIYWASTRESGVPDRFTGSGSGTDFTLTISSVQAEDLAVYYCKQSFYLRTFGGGTKLDIK

SEQ ID NO: 3256 - protein, 112 aa, Artificial Sequence
  Description of Artificial Sequence: Synthetic polypeptide
DIVMTQSPDSLAVSLGERATINCKSSQSVLYSSNNKNYLAWYQQKPGQPPKLLIYWASTRESGVPDRFSGSGSGTDFTLTISSLQAEDVAVYYCQQYYSTLTFGGGTKVEIK

SEQ ID NO: 3257 - protein, 112 aa, Artificial Sequence
  Description of Artificial Sequence: Synthetic polypeptide
DIVMTQSPDSLAVSLGERATINCKSSQSLLNSRTRKNYLAWYQQKPGQSPKLLIYWASTRESGVPDRFSGSGSGTDFTLTISSLQAEDVAVYYCKQSFYLRTFGGGTKVEIK

SEQ ID NO: 3258 - protein, 112 aa, Artificial Sequence
  Description of Artificial Sequence: Synthetic polypeptide
DIVMSQSPSSLAVSAGEKVTMSCKSSQSLLNSRTRKNYLAWYQQKPGQSPKLLIYWASTRESGVPDRFTGSGSGTDFTLTISSVQAEDLAVYYCKQSYNLRTFGGGTKLEIK

SEQ ID NO: 3259 - protein, 112 aa, Artificial Sequence
  Description of Artificial Sequence: Synthetic polypeptide
DIVMTQSPDSLAVSLGERATINCKSSQSVLNSRNNKNYLAWYQQKPGQPPKLLIYWASTRESGVPDRFSGSGSGTDFTLTISSLQAEDVAVYYCKQSFYLRTFGGGTKVEIK

SEQ ID NO: 3260 - protein, 112 aa, Artificial Sequence
  Description of Artificial Sequence: Synthetic polypeptide
DIVMTQSPDSLAVSLGERATISCKSSQSVLNSRNNKNYLAWYQQKPGQSPKLLIYWASTRESGVPDRFSGSGSGTDFTLTISSLQAEDVAVYYCKQSFYLRTFGGGTKVEIK

SEQ ID NO: 3261 - protein, 111 aa, Artificial Sequence
  Description of Artificial Sequence: Synthetic polypeptide
QSALTQPPSASGSPGHSVTISCTGTSSDVGQYSFVSWYQQYPGKAPKIIIYDVSKRSSGVPDRFFGSKSANTASLTVSGVQEEDEADYFCSSYGGSKYPWVFGGGTKLTVL

SEQ ID NO: 3262 - protein, 111 aa, Artificial Sequence
  Description of Artificial Sequence: Synthetic polypeptide
QSALTQPPSASGSPGHSVTISCTGTSSDVGQYSFVSWYQQYPGKAPKVIIYDVSKRSSGVPDRFFGSKSANTASLTVSGVQEEDEADYFCSSYGGSKYPWVFGGGTKLTVL

SEQ ID NO: 3263 - protein, 111 aa, Artificial Sequence
  Description of Artificial Sequence: Synthetic polypeptide
QSALTQPPSASGSPGHSVTISCTGTSSDVGNYSFVSWYQQYPGKAPKVIIYDVSKRSSGVPDRFFGSKSANTASLTVSGVQEEDEADYFCSSYGGSKYPWVFGGGTKLTVL

SEQ ID NO: 3264 - protein, 108 aa, Artificial Sequence
  Description of Artificial Sequence: Synthetic polypeptide
SYELTQPPSVSVSPGQTARITCSGDALPKRYVYWYQQKSGQAPVLVIYEDSKRPSGIPETFSGSSSGTMATLTISGAQVEDEADYYCYSTDSNGHHWVFGGGTKLTVL

SEQ ID NO: 3265 - protein, 113 aa, Artificial Sequence
  Description of Artificial Sequence: Synthetic polypeptide
DIVMTQSPDSLAVSLGERATINCKSSRSVLYSSNSKNYLAWYQQKPGQPPKLLIYWASTRESGVPDRFSGSGSGTEFTLTISSLQAEDVAVYYCQQYYGTPRTFGQGTKVEIK

SEQ ID NO: 3266 - protein, 108 aa, Artificial Sequence
  Description of Artificial Sequence: Synthetic polypeptide
SYVLTQPPSVSVAPGQTARFTCGGNNIASKSVHWYQQKPGQAPVLVVYDDSDRPSRIPERFSGSNSGNTATLTISRVEAGDEADYYCQVWDSTSDHVVFGGGTKLTVL

SEQ ID NO: 3267 - protein, 110 aa, Artificial Sequence
  Description of Artificial Sequence: Synthetic polypeptide
QSALTQPRSVSGSPGQSVTISCTGTSSDVGGYNYVSWHQQHPGKAPKLLIYDVTKRPSGVPDRFSGSKSGNTAALTISGLQAEDEADYYCHSYVGSYTLVFGGGTKLTVL

SEQ ID NO: 3268 - protein, 113 aa, Artificial Sequence
  Description of Artificial Sequence: Synthetic polypeptide
DIVMTQSPDSLAVSLGERATINCKSSQSVLYSSNNKDYLAWYQQKPGQPPKLLIYWASTRESGVSDRFSGSGSGTDFTLTISSLQAEDVAVYYCQQYYSTPITFGQGTRLEIK

SEQ ID NO: 3269 - protein, 107 aa, Artificial Sequence
  Description of Artificial Sequence: Synthetic polypeptide
DIQMTQSPSSLSASVGDRVTITCRASQGIVNNLAWFQQKPGKAPKSLIYAASSLQGGVPSKFSGSASGTDFSLTISNLQPEDFATYFCQQYNSYPWTFGQGTKVEIK

SEQ ID NO: 3270 - protein, 113 aa, Artificial Sequence
  Description of Artificial Sequence: Synthetic polypeptide
DIVMTQSPDSLAVSLGERATINCKSSQSVLYGSNNKNYLAWYQQKLGQSPKLLIYWASARESGVPDRFGGSGSGTDFTLTISSLQAEDVAVYYCQQYYSTPWTFGQGTKVEIK

SEQ ID NO: 3271 - protein, 113 aa, Artificial Sequence
  Description of Artificial Sequence: Synthetic polypeptide
EIVMTQSPDSLAVSLGERATINCKSSQNILYSSDNKNYLAWYQQKPGQPPKLLIYWASTRESGVPDRFSGSGSGTDFTLTISSLQAEDVAVYYCQQYYSIPRTFGQGTKVEIK

SEQ ID NO: 3272 - protein, 113 aa, Artificial Sequence
  Description of Artificial Sequence: Synthetic polypeptide
DIVMTQSPDSLAVSLGERATINCKSSQNILYSSDNKNYLAWYQQKPGQPPKLLIYWASTRESGVPDRFSGSGSGTDFTLTISSLQAEDVAVYYCQQYYSIPRTFGQGTKVEIK

SEQ ID NO: 3273 - protein, 113 aa, Artificial Sequence
  Description of Artificial Sequence: Synthetic polypeptide
DIVMTQSPDSLAVSLGERATINCKSSQTILYSSNNKNYLAWYQQKPGQPPKLLIYWASTRESGVPDRFSGSGSGTDFTLTISSLRAEDVAVYYCQQYYSSPQTFGQGTKVEIK

SEQ ID NO: 3274 - protein, 113 aa, Artificial Sequence
  Description of Artificial Sequence: Synthetic polypeptide
DVVMTQSPLSLPVTLGQPASISCTSSQSLLYSDGNTYLNWFQQRPGQSPRRLMYKVSKRDPGVPDRFSGSGSGTDFTLSISRVEAEDVGVYYCMQGSLWPRYTFGQGTKVEIK

SEQ ID NO: 3275 - protein, 113 aa, Artificial Sequence
  Description of Artificial Sequence: Synthetic polypeptide
DIVMTQSPDSLAVSLGERATINCKSSQTLLYTSNNQNYLAWYQHKPGQPPKVLIYWASTREYGVPDRFSGSGSGTDFTLTISSLQPEDVAVYYCQQYYNSPYTFGQGTKLEIK

SEQ ID NO: 3276 - protein, 110 aa, Artificial Sequence
  Description of Artificial Sequence: Synthetic polypeptide
QAGLTQPPSVSKDLRQTATLTCSGNSNNVGNQGAAWLQQFPGHPPKLLFYENINRPSGISERFSASRSGNTASLTITGLQPEDEADYYCSAWDGHLNAWVFGGGTKLTVL

SEQ ID NO: 3277 - protein, 113 aa, Artificial Sequence
  Description of Artificial Sequence: Synthetic polypeptide
DIVMTQSPDSLAVSLGERATINCKSSQTVLYTSNNKNYLAWYQQKPGQPPKLLIYWASTRESGVPDRFSGSGSGTDFTLTISSLQAEDVAVYYCQHYYSTPFTFGPGTKVDIK

SEQ ID NO: 3278 - protein, 108 aa, Artificial Sequence
  Description of Artificial Sequence: Synthetic polypeptide
LPVLTQPPSVSVSPGQTARITCSGDVLAETYARWFQQKPGQAPVLVMYRDRERPAGIPERFSGSSSGNTVTLTISGAQAEDEAVYHCHSVADNNLDWVFGGGTKLTVL

SEQ ID NO: 3279 - protein, 108 aa, Artificial Sequence
  Description of Artificial Sequence: Synthetic polypeptide
SYELTQPPSVSVSPGQTARITCSGDVLAETYARWFQQKPGQAPVLVMYRDRERPAGIPERFSGSSSGNTVTLTISGAQAEDEAVYHCHSVADNNLDWVFGGGTKLTVL

SEQ ID NO: 3280 - protein, 112 aa, Artificial Sequence
  Description of Artificial Sequence: Synthetic polypeptide
DVLMTQSPLSLPVTLGQPASISCKSSQSIVHSNGNTYLEWYLQKPGQSPQLLVYKVSNRFSGVPDRFSGSGSGTDFTLKISRVEAEDVGTYYCFQGSLVPWAFGGGTKVEIK

SEQ ID NO: 3281 - protein, 112 aa, Artificial Sequence
  Description of Artificial Sequence: Synthetic polypeptide
DVVMTQSPLSLPVTLGQPASISCKSSQSIVHSNGNTYLEWYLQKPGQSPQLLVYKVSNRFSGVPDRFSGSGSGTDFTLKISRVEAEDVGTYYCFQGSLVPWAFGGGTKVEIK

SEQ ID NO: 3282 - protein, 112 aa, Artificial Sequence
  Description of Artificial Sequence: Synthetic polypeptide
DVVMTQSPLSLPVTLGQPASISCKSSQSIVHSNGNTYLEWYLQKPGQSPQLLVYKVSNRFSGVPDRFSGSGSGTDFTLKISRVEAEDVGVYYCFQGSLVPWAFGGGTKVEIK

SEQ ID NO: 3283 - protein, 112 aa, Artificial Sequence
  Description of Artificial Sequence: Synthetic polypeptide
DVVMTQSPLSLPVTLGQPASISCKSSQSIVHSNGNTYLEWYLQKPGQSPQLLIYKVSNRFSGVPDRFSGSGSGTDFTLKISRVEAEDVGVYYCFQGSLVPWAFGGGTKVEIK

SEQ ID NO: 3284 - protein, 112 aa, Artificial Sequence
  Description of Artificial Sequence: Synthetic polypeptide
DIVMTQAAPSVPVTPGESVSISCRSSESLLHSNGNTYLYWFLQRPGQSPQLLIYRMSNLASGVPDRFSGSGSGTAFTLRISRVEAEDVGVYYCMQYLEYPLTFGAGTKLELK

SEQ ID NO: 3285 - protein, 107 aa, Artificial Sequence
  Description of Artificial Sequence: Synthetic polypeptide
DIKMTQSPSSMYASLGERVTITCKASQDINRYLNWFQQKPGKSPKTLIYRANRLLDGVPSRFSGSGSGQDYSLTISSLDYEDMGIYYCLQYDEFPLTFGDGTKLELK

SEQ ID NO: 3286 - protein, 113 aa, Artificial Sequence
  Description of Artificial Sequence: Synthetic polypeptide
DIVMTQSPSSLAMSVGQKVTMSCKSSQSVFNSGNQKNSLAWYQQKPGQSPKLLVYFASTRESGVPDRFIGSGSGTDFSLTISSVQAEDLADYFCQEHYTTPPTFGTGTKLELK

SEQ ID NO: 3287 - protein, 112 aa, Artificial Sequence
  Description of Artificial Sequence: Synthetic polypeptide
DVVMTQTPLSLPVSLGDQASISCRSSQRLVHSHGKTYLHWYLQKPGQSPKLLIYKVSNRFSGVPDRFSGSGSGTDFTLKISRVEAEDLGVYFCSQTAHFPYTFGGGTKLEIK

SEQ ID NO: 3288 - protein, 112 aa, Artificial Sequence
  Description of Artificial Sequence: Synthetic polypeptide
DVVMTQTPLSLPVSLGDQASISCRSSQSLVHSHGKTYLHWYLQKPGQSPKLLIYKVSNRFSGVPDRFSGSGSGTDFTLKISRVEAEDLGVYFCSQTAHFPYTFGGGTKLEIK

SEQ ID NO: 3289 - protein, 112 aa, Artificial Sequence
  Description of Artificial Sequence: Synthetic polypeptide
DVVMTQTPLSLPVSLGDQASISCRSSQSLLHSHGNTYLHWYLQKPGQSPKLLIYKVSNRFSGVPDRFSGSGSGTDFTLKISRVEAEDLGVYFCSQTAHFPYTFGGGTKLEIK

SEQ ID NO: 3290 - protein, 107 aa, Artificial Sequence
  Description of Artificial Sequence: Synthetic polypeptide
DIVMTQSHKFMSTSVGDRVSITCKASQDVSTAVAWYQQKPGQSPKLLIYSASYRYTGVPDRFTGSGSGTDFTFTISSVQAEDLAVYYCQQHYTTPLTFGAGTKLELK

SEQ ID NO: 3291 - protein, 112 aa, Artificial Sequence
  Description of Artificial Sequence: Synthetic polypeptide
DIVMSQSPSSLAVSVGEKVTMSCKSSQSLLYSSNQKNYLAWYQQKPGQSPKLLIYWASTRESGVPDRFTGSGSGTDFTLTISSVKAEDLAVYYCQQYYSYPFTFGSGTKLEI

SEQ ID NO: 3292 - protein, 112 aa, Artificial Sequence
  Description of Artificial Sequence: Synthetic polypeptide
DVLMTQTPLSLPVSLGDQASISCRSSQSIVHSNGNTYLEWYLQKPGQSPKLLIYKLSNRFSGVPDRFSGSGSGTDFTLKISRVEAEDLGVYYCFQGSHVPPTFGGGTKLEIK

SEQ ID NO: 3293 - protein, 112 aa, Artificial Sequence
  Description of Artificial Sequence: Synthetic polypeptide
NILMTQSPSSLAVSAGEKVTMSCKSSQSVLYSSNQKNYLAWYQQKPGQSPKLLIYWASTRESGVPDRFTGSGSGTDFTLTISSVQAEDLAVYYCLQYLSSLTFGAGTKLELK

SEQ ID NO: 3294 - protein, 112 aa, Artificial Sequence
  Description of Artificial Sequence: Synthetic polypeptide
  MOD_RES (3)..(3): Any amino acid
DIXMTQAAPSVPVTPGESVSISCRSSKSLLHSNGNTYLYWFLQRPGQSPQLLIYRMSNLASGVPDRFSGSGSGTAFTLRISRVEAEDVGVYYCMQHLKSPYTFGGGTKLEIK

SEQ ID NO: 3295 - protein, 112 aa, Artificial Sequence
  Description of Artificial Sequence: Synthetic polypeptide
DVLMTQTPLSLPVSLGDQASISCRSSQSIVHSNGNTYLEWFLQKPGQSPKLLIYKVSNRFSGVPDRFSGSGSGTDFTLKISRVEAEDLGVYYCFQGSHVPYTFGGGTKLEIK

SEQ ID NO: 3296 - protein, 107 aa, Artificial Sequence
  Description of Artificial Sequence: Synthetic polypeptide
DIVMTQSQKFMSTSVGDRVSVTCKASQNVGTNVAWYQQKPGQSPKALIYSASYRYSGVPDRFTGSGSGTDFTLTISNVQSEDLAEYFCQQYNSYPYTFGGGTKLEIK

SEQ ID NO: 3297 - protein, 112 aa, Artificial Sequence
  Description of Artificial Sequence: Synthetic polypeptide
DIVMTQAAPSVPVTPGESVSISCRSSKSLLHSNGNTYLYWFLQRPGQSPQLLIHRMSNLASGVPDRFSGSGSGTAFTLRISRVEAEDVGVYYCMQHLKSPYTFGGGTKLEIK

SEQ ID NO: 3298 - protein, 112 aa, Artificial Sequence
  Description of Artificial Sequence: Synthetic polypeptide
DIVMTQAAPSVPVTPGESVSISCRSSKSLLHSNGNTYLYWFLQRPGQSPQLLIYRMSNLASGVPDRFSGSGSGTAFTLRISRVEAEDVGVYYCMQHLKSPYTFGGGTKLEIK

SEQ ID NO: 3299 - protein, 112 aa, Artificial Sequence
  Description of Artificial Sequence: Synthetic polypeptide
DIVMTQTPLSLPVTPGEPASISCRSSQRLVHSHGKTYLHWYLQKPGQSPQLLIYKVSNRFSGVPDRFSGSGSGTDFTLKISRVEAEDVGVYFCSQTAHFPYTFGGGTKVEIK

SEQ ID NO: 3300 - protein, 112 aa, Artificial Sequence
  Description of Artificial Sequence: Synthetic polypeptide
DIVMTQTPLSLPVTPGEPASISCRSSQSLVHSHGKTYLHWYLQKPGQSPQLLIYKVSNRFSGVPDRFSGSGSGTDFTLKISRVEAEDVGVYFCSQTAHFPYTFGGGTKVEIK

SEQ ID NO: 3301 - protein, 130 aa, Artificial Sequence
  Description of Artificial Sequence: Synthetic polypeptide
LPVRLLVLMSWIPASSSDVLMTQIPVSLSVSLGDQASISCRSSESIVHSSGKTYLEWYLQKPGQSPKLLIYEVSNRFSGVPDRFSGSGSGTDFTLKISRVEAEDLGVYYCFQGSHVPWTFGGGTKLEIKR

SEQ ID NO: 3302 - protein, 131 aa, Artificial Sequence
  Description of Artificial Sequence: Synthetic polypeptide
KLPVRLLVLMSWIPASSSDVLMTQIPVSLSVSLGDQASISCRSSESIVHSSGKTYLEWYLQKPGQSPKLLIYEVSNRFSGVPDRFSGSGSGTDFTLKISRVEAEDLGVYYCFQGSHVPWTFGGGTKLEIKR

SEQ ID NO: 3303 - protein, 148 aa, Artificial Sequence
  Description of Artificial Sequence: Synthetic polypeptide
KLPVRLLVLMFWIPASSSDVLMTQTPLSLPVSLGDQASISCRSSQNILHSNGNTYLEWYLQKPGQSPKLLIYKVSSRFSGVPDRFSGSGSGTDFTLKITRVEAEDLGVYYCFQGSLVPWTFGGGTKLEIRRADAAPTVSIFPPSSEQL

SEQ ID NO: 3304 - protein, 121 aa, Artificial Sequence
  Description of Artificial Sequence: Synthetic polypeptide
DIVMSQSPSSLAVSVGEKVIMSCKSSQSLLYSTNQKNFLAWYQQKPGQSPKLLIYWASTRESGVPDRFTGSGSGTDFTLTISSLKAEDLAVYYCQQYYSYPYTFGGGTKLEIKRADAAPTV

SEQ ID NO: 3305 - protein, 112 aa, Artificial Sequence
  Description of Artificial Sequence: Synthetic polypeptide
EIVMTQAAPSVPVTPGESASISCRSNKSLLHSNGNTYLCWFLQRPGQSPQLLIYRMSTLAPGVPDRFSGSGSGTAFTLRISRLEAEDVGVYYCMQHIEYPLTFGAGTKLELK

SEQ ID NO: 3306 - protein, 112 aa, Artificial Sequence
  Description of Artificial Sequence: Synthetic polypeptide
QVLTQTASPVSAAVGSTVTINCQASQSVYKNNYLAWFQQKPGQPPKRLIYSASTLASGVSSRFKGSGSGTQFTLTISDVQCDDAATYYCLGSCDSSSNNCVAFGGGTEVVVK

SEQ ID NO: 3307 - protein, 107 aa, Artificial Sequence
  Description of Artificial Sequence: Synthetic polypeptide
QVLTQTASSVSAAVGGTVTINCQSSQSVYNNRLAWYQQKPGQPPKLLIYKASTLASGVPSRFKGSGSGTQFTLTISDLECDDAATYYCAGGYINIFAFGGGTEVVVK

SEQ ID NO: 3308 - protein, 112 aa, Artificial Sequence
  Description of Artificial Sequence: Synthetic polypeptide
QVLTQTASPVSAAVGSTVTINCQASQSVYKNNYLRWYQQKPGQPPKRLIYTASTLASGVSSRFKGSGSGTQFTLTISDVQCDDAATYYCLGGYDCNSADCWAFGGGTEVVVK

SEQ ID NO: 3309 - protein, 111 aa, Artificial Sequence
  Description of Artificial Sequence: Synthetic polypeptide
QVLTQTASPVSAAVGITVTISCQSSQSVRTNKLAWFQQKPGQPPKRLIYSASTLDSGVPSRFSASGSGTQFTLTISDVQCDDAATYYCLGYYDCSIADCVAFGGGTEVVVK

SEQ ID NO: 3310 - protein, 111 aa, Artificial Sequence
  Description of Artificial Sequence: Synthetic polypeptide
QVLTQTTSPVSAAVGSTVTISCQSSQSVRTNKLAWFQQKPGQPPKRLIYSASTLDFGVPSRFSASGSGTQFTLTISDVQCDDAATYYCLGYFDCSIADCVAFGGGTEVVVK

SEQ ID NO: 3311 - protein, 109 aa, Artificial Sequence
  Description of Artificial Sequence: Synthetic polypeptide
QVLTQTASSVSAAVGGTVTINCQSSQNVYNNNKLAWFQQKPGQPPKRLIYGASTLASGVSSRFKGSGSGTQFTLTISDLECDDAATYYCLGGYSGNIYTFGGGTEVVVK

SEQ ID NO: 3312 - protein, 311 aa, Artificial Sequence
  Description of Artificial Sequence: Synthetic polypeptide
MKYLLPTAAAGLLLLAAQPAMAMAEVQLQQSGAELARPGTSVNLSCKTSGYSFTGYGVSWVKQRIGQGLEWIGEIYPRSGNTYYNEKFKGKATLTADKSSNTAYMELRSLTSEDSAVYFCARWNWERDAMDYWGQGTSVTVSSAKTTPPSDYPLAGGGGSGGGGSGGGGSDIVMTQTPLSLPVSLGDQASISCRSSQSLESSSGYPHLNWYLQKPGQSPQLLIYRVSNRFSGVLDRFSGSGSGTDFTLQISRVEAEDLGVYFCLQITHVPWTFGGGTKLEIKRADAAPTVSAAEEQKLISEEDLEHHHHHH

SEQ ID NO: 3313 - protein, 424 aa, Artificial Sequence
  Description of Artificial Sequence: Synthetic polypeptide
MKKLLFAIPLVVPFYSHSAETVESCLAKPHTENSFTNVWKDDKTLDRYANYEGCLWNATGVVVCTGDETQCYGTWVPIGLAIPENEGGGSEGGGSEGGGSEGGGTKPPEYGDTPIPGYTYINPLDGTYPPGTEQNPANPNPSLEESQPLNTFMFQNNRFRNRQGALTVYTGTVTQGTDPVKTYYQYTPVSSKAMYDAYWNGKFRDCAFHSGFNEDPFVCEYQGQSSDLPQPPVNAGGGSGGGSGGGSEGGGSEGGGSEGGGSEGGGSGGGSGSGDFDYEKMANANKGAMTENADENALQSDAKGKLDSVATDYGAAIDGFIGDVSGLANGNGATGDFAGSNSQMAQVGDGDNSPLMNNFRQYLPSLPQSVECRPFVFSAGKPYEFSIDCDKINLFRGVFAFLLYVATFMYVFSTFANILRNKES

SEQ ID NO: 3314 - protein, 506 aa, Artificial Sequence
  Description of Artificial Sequence: Synthetic polypeptide
MYRMQLLSCIALSLALVTNSMAETVESCLAKPHTENSFTNVWKDDKTLDRYANYEGCLWNATGVVVCTGDETQCYGTWVPIGLAIPENEGGGSEGGGSEGGGSEGGGTKPPEYGDTPIPGYTYINPLDGTYPPGTEQNPANPNPSLEESQPLNTFMFQNNRFRNRQGALTVYTGTFTQGTDPVKTYYQYTPVSSKAMYDAYWNGKFRDCAFHSGFNEDPFVCEYQGQSSDLPQPPVNAGGGSGGGSGGGSEGGGSEGGGSEGGGSEGGGSGGGSGSGAMVRSPPCPSCPAPEFLGGPSVFLFPPKPKDTLMISRTPEVTCVVVDVSQEDPEVQFNWYVDGVEVHNAKTKPREEQFNSTYRVVSVLTVLHQDWLNGKEYKCKVSNKGLPSSIEKTISKAKGQPREPQVYTLPPSQEEMTKNQVSLTCLVKGFYPSDIAVEWESNGQPENNYKTTPPVLDSDGSFFLYSRLTVDKSRWQEGNVFSCSVMHEALHNHYTQKSLSLSPGK

SEQ ID NO: 3315 - protein, 509 aa, Artificial Sequence
  Description of Artificial Sequence: Synthetic polypeptide
MYRMQLLSCIALSLALVTNSMAETVESCLAKPHTENSFTNVWKDDKTLDRYANYEGCLWNATGVVVCTGDETQCYGTWVPIGLAIPENEGGGSEGGGSEGGGSEGGGTKPPEYGDTPIPGYTYINPLDGTYPPGTEQNPANPNPSLEESQPLNTFMFQNNRFRNRQGALTVYTGTFTQGTDPVKTYYQYTPVSSKAMYDAYWNGKFRDCAFHSGFNEDPFVCEYQGQSSDLPQPPVNAGGGSGGGSGGGSEGGGSEGGGSEGGGSEGGGSGGGSGSGAMVRSDKTHTCPPCPAPELLGGPSVFLFPPKPKDTLMISRTPEVTCVVVDVSHEDPEVKFNWYVDGVEVHNAKTKPREEQYNSTYRVVSVLTVLHQDWLNGKEYKCKVSNKALPAPIEKTISKAKGQPREPQVYTLPPSREEMTKNQVSLTCLVKGFYPSDIAVEWESNGQPENNYKTTPPVLDSDGSFFLYSKLTVDKSRWQQGNVFSCSVMHEALHNHYTQKSLSLSPGK

SEQ ID NO: 3316 - protein, 131 aa, Artificial Sequence
  Description of Artificial Sequence: Synthetic polypeptide
TKPPEYGDTPIPGYTYINPLDGTYPPGTEQNPANPNPSLEESQPLNTFMFQNNRFRNRQGALTVYTGTVTQGTDPVKTYYQYTPVSSKAMYDAYWNGKFRDCAFHSGFNEDPFVCEYQGQSSDLPQPPVNA

SEQ ID NO: 3317 - protein, 131 aa, Artificial Sequence; identical to SEQ ID NO: 3316
  Description of Artificial Sequence: Synthetic polypeptide

SEQ ID NO: 3318 - protein, 131 aa, Artificial Sequence; identical to SEQ ID NO: 3316
  Description of Artificial Sequence: Synthetic polypeptide

SEQ ID NO: 3319 - protein, 128 aa, Artificial Sequence
  Description of Artificial Sequence: Synthetic polypeptide
SPGEKTESWSIRAQVEGDIQRSVPDEEPSEQTPEEICEAKPPIDGVFNNVFKGDEGGFYINYNGCEYEATGVTVCQNDGTVCSSSAWKPTGYVPESGEPSSSPLKDGDTGGTGEGGSDTGGDTGGGDT

SEQ ID NO: 3320 - protein, 128 aa, Artificial Sequence
  Description of Artificial Sequence: Synthetic polypeptide
SPSEKTESWSIRAQVEGDMQRSVPDEEPSEQTPEEICEAKPPIDGVFNNVSKGDEGGFYINYNGCEYEATGVTVCQNDGTVCASSAWKPTGYVPESGESSSSPVKDGDTGGTGEGGSDTGGDTGGGDT

SEQ ID NO: 3321 - protein, 161 aa, Artificial Sequence
  Description of Artificial Sequence: Synthetic polypeptide
STPDTVTPGQTVNLPSDLSTLSIPANVVKSDSIGSQFSLYTNASCTMCSGYYLSNNADSIAIANITETVKADYNQPDMWFEQTDSDGNHVKILQNSYKAVSYNVESKQSDVNNPTYINYSYSVNVKQVSYDTSNVCIMNWETFQNKCDASRAVLITDTVTP

SEQ ID NO: 3322 - protein, 424 aa, Artificial Sequence
  Description of Artificial Sequence: Synthetic polypeptide
MKKLLFAIPLVVPFYSHSAETVESCLAKPHTENSFTNVWKDDKTLDRYANYEGCLWNATGVVVCTGDETQCYGTWVPIGLAIPENEGGGSEGGGSEGGGSEGGGTKPPEYGDTPIPGYTYINPLDGTYPPGTEQNPANPNPSLEESQPLNTFMFQNNRFRNRQGALTVYTGTVTQGTDPVKTYYQYTPVSSKAMYDAYWNGKFRDCAFHSGFNEDPFVCEYQGQSSDLPQPPVNAGGGSGGGSGGGSEGGGSEGGGSEGGGSEGGGSGGGSGSGDFDYEKMANANKGAMTENADENALQSDAKGKLDSVATDYGAAIDGFIGDVSGLANGNGATGDFAGSNSQMAQVGDGDNSPLMNNFRQYLPSLPQSVECRPYVFGAGKPYEFSIDCDKINLFRGVFAFLLYVATFMYVFSTFANILRNKES

SEQ ID NO: 3323 - protein, 227 aa, Artificial Sequence
  Description of Artificial Sequence: Synthetic polypeptide
MAETVESCLAKSHTENSFTNVWKDDKTLDRYANYEGCLWNATGVVVCTGDETQCYGTWVPIGLAIPENEGGGSEGGGSEGGGSEGGGTKPPEYGDTPIPGYTYINPLDGTYPPGTEQNPANPNPSLEESQPLNTFMFQNNRFRNRQGALTVYTGTVTQGTDPVKTYYQYTPVSSKAMYDAYWNGKFRDCAFHSGFNEDLFVCEYQGQSSDLPQPPVNAPSGHHHHHH

SEQ ID NO: 3324 - protein, 227 aa, Artificial Sequence; identical to SEQ ID NO: 3323
  Description of Artificial Sequence: Synthetic polypeptide

SEQ ID NO: 3325 - protein, 264 aa, Artificial Sequence
  Description of Artificial Sequence: Synthetic polypeptide
ATTDAECLSKPAFDGTLSNVWKEGDSRYANFENCIYELSGIGIGYDNDTSCNGHWTPVRAADGSGNGGDDNSSGGGSNGDSGNNSTPDTVTPGQTVNLPSDLSTLSIPANVVKSDSIGSQFSLYTNASCTMCSGYYLSNNADSIAIANITETVKADYNQPDMWFEQTDSDGNHVKILQNSYKAVSYNVESKQSDVNNPTYINYSYSVNVKQVSYDTSNVCIMNWETFQNKCDASRAVLITDTVTPSYSRNITIQSNINYQGSNG

SEQ ID NO: 3326 - protein, 424 aa, Artificial Sequence
  Description of Artificial Sequence: Synthetic polypeptide
MKKLLFAIPLVVPFYSHSAETVESCLAKPHTENSFTNVWKDDKTLDRYANYEGCLWNATGVVVCTGDETQCYGTWVPIGLAIPENEGGGSEGGGSEGGGSEGGGTKPPEYGDTPIPGYTYINPLDGTYPPGTEQNPANPNPSLEESQPLNTFMFQNNRFRNRQGALTVYTGTVTQGTDPVKTYYQYTPVSSKAMYDAYWNGKFRDCAFHSGFNEDPFVCEYQGQSSDLPQPPVNAGGGSGGGSGGGSEGGGSEGGGSEGGGSEGGGSGGGSGSGDFDYEKMANANKGAMTENADENALQSDAKGKLDSVATDYGAAIDGFIGDVSGLANGNGATGDFAGSNSQMAQVGDGDNSPLMNNFRQYLPSLPQSVECRPFVFGAGKPYEFSIDCDKINLFRGVFAFLLYVATFMYVFSTFANILRNKES

SEQ ID NO: 3327 - protein, 219 aa, Artificial Sequence
  Description of Artificial Sequence: Synthetic polypeptide
AETVESCLAKPHIENSFTNVWKDDKTLDRYANYEGCLWNATGVVVCTGDETQCYGTWVPIGLAIPENEGGGSEGGGSEGGGSEGGGTKPPEYGDTPIPGYIYINPLDGTYPPGTEQNPANPNPSLEESHPLNTFMFQNNRFRNRQGALTVYTGTVTQGTDPVKTYYQYTPVSSKAMYDAYWNGKFRDCAFHSGFNEDLFVCEYQGQSSYLPQPPVNAPS

SEQ ID NO: 3328 - protein, 528 aa, Artificial Sequence
  Description of Artificial Sequence: Synthetic polypeptide
MYRMQLLSCIALSLALVTNSMATTDAECLSKPAFDGTLSNVWKEGDSRYANFENCIYELSGIGIGYDNDTSWNGHWTPVRAADGSGNGGDDNSSGGGSNGDSGNNSTPDTVTPGQTVNLPSDLSTLSIPANVVKSDSIGSQFSLYTNASCTMCSGYYLSNNADSIAIANITETVKADYNQPDMWFEQTDSDGNHVKILQNSYKAVSYNVESKQSDVNNPTYINYSYSVNVKQVSYDTSNVCIMNWETFQNKCDASRAVLITDTVTPSYSRNITIQSNINYQGSNGSGGSGGSGGSGAMVRSDKTHTCPPCPAPELLGGPSVFLFPPKPKDTLMISRTPEVTCVVVDVSHEDPEVKFNWYVDGVEVHNAKTKPREEQYNSTYRVVSVLTVLHQDWLNGKEYKCKVSNKALPAPIEKTISKAKGQPREPQVYTLPPSREEMTKNQVSLTCLVKGFYPSDIAVEWESNGQPENNYKTTPPVLDSDGSFFLYSKLTVDKSRWQQGNVFSCSVMHEALHNHYTQKSLSLSPGK

SEQ ID NO: 3329 - protein, 422 aa, Artificial Sequence
  Description of Artificial Sequence: Synthetic polypeptide
MKKLLFAIPLVVPFYSHSAETVESCLAKPHTENSFTNVWKDDKTLDRYANYEGCLWNATGVVVCTGDETQCYGTWVPIGLAIPENEGGGSEGGGSEGGGSEGGGTKPPEYGDTPIPGYTYINPLDGTYPPGTEQNPANPNPSLEESQPLNTFMFQNNRFRNRQGALTVYTGTVTQGTDPVKTYYQYTPVSSKAMYDAYWNGKFRDCAFHSGFNEDPFVCEYQGQSSDLPQPPVNAGGGSGGGSGGGSEGGGSEGGGSEGGGSEGGGSGGGSGSGDFDYEKMANANKGAMTENADENALQSDAKGKLDSVATDYGAAIDGFIGDVSGLANGNGATGDFAGSNSQMAQVGDGDNSPLMNNFRQYLPSLPQSVECRPFSAGKPYEFSIDCDKINLFRGVFAFLLYVATFMYVFSTFANILRNKES

SEQ ID NO: 3330 - protein, 434 aa, Artificial Sequence
  Description of Artificial Sequence: Synthetic polypeptide
MKRKIIAISLFLYIPLSNADNWESITKSYYTGFAMSKTVESKDQDGKTVRKEVITQADLTTACNDAKASAQDVFNQMKLTFSGIWPDSQFRLVTGDTCVYNGSPSEKTESWSIRAQVEGDMQRSVPDEEPSEQTPEEICEAKPPIDGVFNNVSKGDEGGFYINYNGCEYEATGVTVCQNDGTVCASSAWKPTGYVPESGESSSSPVKDGDTGGTGEGGSDTGGDTGGGDTGGGSTGGDTGGSTGGGSTGGGSTGGSTGKSLTKEDVTAAIHDASPSIGDAVKDSLTEDNDQNDNQKKADEQSAKASASVSDAISDGMRGVGNFVDDLGGESSQYGIGNSEMDLSVSLAKGQLGIDLEGHGSAWESFLNDGALRPSIPSGHGCTDFVMFQGSVYQLDIGCDKLGDIKSVLSWVMYCLTFWYVFQSATSLLRKGEQ

SEQ ID NO: 3331 - protein, 434 aa, Artificial Sequence
  Description of Artificial Sequence: Synthetic polypeptide
MKRKIIAISLFLYIPLSNADNWESITKSYYTGFAISKTVESKDKDGKPVRKEVITQADLTTACNDAKASAQNVFNQIKLTLSGTWNDSQFRLVTGDTCVYNGSPGEKTESWSIRAQVEGDIQRSVPDEEPSEQTPEEICEAKPPIDGVFNNVFKGDEGGFYINYNGCEYEATGVTVCQNDGTVCSSSAWKPTGYVPESGEPSSSPLKDGDTGGTGEGGSDTGGDTGGGDTGGGSTGGDTGGSSGGGSSGGGSTGGSTGKSLTKEDVTAAIHVASPSIGDAVKDSLTEDNDQYDNQKKADEQSAKASASVSDAISDGMRGVGNFVDDFGGESSQYGTGNSEMDLSVSLAKGQLGIDREGHGSAWESFLNDGALRPSIPTGHGCTNFVMYQGSVYQIEIGCDKLNDIKSVLSWVMYCLTFWYVFQSVTSLLRKGEQ

SEQ ID NO: 3332 - protein, 434 aa, Artificial Sequence; identical to SEQ ID NO: 3330
  Description of Artificial Sequence: Synthetic polypeptide

SEQ ID NO: 3333 - protein, 460 aa, Artificial Sequence
  Description of Artificial Sequence: Synthetic polypeptide
MKKIIIALFFAPFFTHATTDAECLSKPAFDGTLSNVWKEGDSRYANFENCIYELSGIGIGYDNDTSCNGHWTPVRAADGSGNGGDDNSSGGGSNGDSGNNSTPDTVTPGQTVNLPSDLSTLSIPANVVKSDSIGSQFSLYTNASCTMCSGYYLSNNADSIAIANITETVKADYNQPDMWFEQTDSDGNHVKILQNSYKAVSYNVESKQSDVNNPTYINYSYSVNVKQVSYDTSNVCIMNWETFQNKCDASRAVLITDTVTPSYSRNITIQSNINYQGSNGSGGSGGSGGSGNDGGGTGNNGNGTGDFDYVKMANANKDALTESFDLSALQADTGASLDGSVQGTLDSLSGFSDSIGGLVGNGSAISGEFAGSSAAMNAIGEGDKSPLLDSLSFLKDGLFPALPEFKQCTPFVFAPGKEYEFIIECKYIDMFKGIFAFILYFWTFVTVYDSFSGILRKGRG

SEQ ID NO: 3334 - protein, 506 aa, Artificial Sequence
  Description of Artificial Sequence: Synthetic polypeptide
MYRMQLLSCIALSLALVTNSMAETVESCLAKPHTENSFTNVWKDDKTLDRYANYEGCLWNATGVVVCTGDETQCYGTWVPIGLAIPENEGGGSEGGGSEGGGSEGGGTKPPEYGDTPIPGYTYINPLDGTYPPGTEQNPANPNPSLEESQPLNTFMFQNNRFRNRQGALTVYTGTVTQGTDPVKTYYQYTPVSSKAMYDAYWNGKFRDCAFHSGFNEDPFVCEYQGQSSDLPQPPVNAGGGSGGGSGGGSEGGGSEGGGSEGGGSEGGGSGGGSGSGAMVRSPPCPSCPAPEFLGGPSVFLFPPKPKDTLMISRTPEVTCVVVDVSQEDPEVQFNWYVDGVEVHNAKTKPREEQFNSTYRVVSVLTVLHQDWLNGKEYKCKVSNKGLPSSIEKTISKAKGQPREPQVYTLPPSQEEMTKNQVSLTCLVKGFYPSDIAVEWESNGQPENNYKTTPPVLDSDGSFFLYSRLTVDKSRWQEGNVFSCSVMHEALHNHYTQKSLSLSPGK

SEQ ID NO: 3335 - protein, 235 aa, Artificial Sequence
  Description of Artificial Sequence: Synthetic polypeptide
MDLQVQIISFLLISASVIISRGQIVLTQSPAIMSASPGEKVTMTCSASSSVSYMHWYQQKSGTSPKRWIYDTSKLASGVPARFSGSGSGTSYSLTISSMEAEDAATYFCHQWRSNPYTFGGGTKLEIKRADAAPTVSIFPPSSEQLTSGGASVVCFLNNFYPKDINVKWKIDGSERQNGVLNSWTDQDSKDSTYSMSSTLTLTKDEYERHNSYTCEATHKTSTSPIVKSFNRGEC

SEQ ID NO: 3336 - protein, 268 aa, Artificial Sequence
  Description of Artificial Sequence: Synthetic polypeptide
MADVKLQESGAELVKPGASVKLSCKASGYTFTSYYMYWVKQRPGQGLEWIGEINPSNGGTNFNEKFKSKATLTVDKSSSTAYMQLSSLTSEDSAVYYCTRDYRYAWFAYWGQGTLVTVSAESQSFPNVFPLAGGGGSGGGGSGGGGSDVLMTQTPLSLPVSLGDQASISCRSSQSIVHSNGNTYLEWYLQKPGQSPKLLIYKVSNRFSGVPDRFSGSGSGTDFTLKISRVEAEDLGVYYCFQGSHVPYTFGGGTKLEIKRADAAPTVS

SEQ ID NO: 3337 - protein, 185 aa, Artificial Sequence
  Description of Artificial Sequence: Synthetic polypeptide
ESPLQTPTEDGSEEPGSETSDAKSTPTAEDVTAPLVDEGAPGKQAAAQPHTEIPEGTTAEEAGIGDTPSLEDEAAGHVTQARMVSKSKDGGSDDKKAKGADGKTKIATPRGAAPPGQKGQANATRIPAKTPPAPKTPPSSGEPPKSGDRSGYSSPGSPGTPGSRSRTPSLPTPPTREPKKVAVVR

SEQ ID NO: 3338 - protein, 124 aa, Artificial Sequence
  Description of Artificial Sequence: Synthetic polypeptide
  Synthetic construct
QVQLQESGGGLVQPGGSLRLSCAASEFTLDYYSIAWFRQAPGKEREGVSCISSYDGSTSYADSVKGRFTISRDNAKNTVYLQMNSLKPEDTAIYYCAAGIRDWATLREYEYDDWGQGTQVTVSS

SEQ ID NO: 3339 - protein, 124 aa, Artificial Sequence
  Description of Artificial Sequence: Synthetic polypeptide
  Synthetic construct
AVQLQESGGGLVQDGDSLRLSCAASGRTFSSYVMGWFRQAPGKEREFVAAIGWSGGSTAYADSVKGRFTISRDNARNTVYLQMNSLKPEDTAVYYCASAPTRWVPRDSRFYDRWGQGTQVTVSS

SEQ ID NO: 3340 - protein, 120 aa, Artificial Sequence
  Description of Artificial Sequence: Synthetic polypeptide
  Synthetic construct
EVQLQASGGGLVQAGGSLRLSCAASGFKITHYTMGWFRQAPGKEREFVSRITWGGDNTFYSDSVKGRFTISRDNAKNTVYLQMNSLKPEDTADYYCAAGSTSTATPLRVDYWGKGTQVSS

SEQ ID NO: 3341 - protein, 16 aa, Artificial Sequence
  Description of Artificial Sequence: Synthetic peptide
  Synthetic construct
LPTPPTREPKKVAVVR

SEQ ID NO: 3342 - protein, 18 aa, Artificial Sequence
  Description of Artificial Sequence: Synthetic peptide
  Synthetic construct
  MOD_RES (8)..(8): Phospho-Thr
  MOD_RES (12)..(12): Phospho-Ser
KKVAVVRTPPKSPSSAKC

SEQ ID NO: 3343 - protein, 18 aa, Artificial Sequence
  Description of Artificial Sequence: Synthetic peptide
  Synthetic construct
  MOD_RES (9)..(9): Any amino acid
  MOD_RES (12)..(12): Any amino acid
RSGYSSPGXPGXPGSRSR

SEQ ID NO: 3344 - protein, 18 aa, Artificial Sequence
  Description of Artificial Sequence: Synthetic peptide
  Synthetic construct
  MOD_RES (9)..(9): Any amino acid
  MOD_RES (12)..(12): Any amino acid
  MOD_RES (15)..(15): Any amino acid
RSGYSSPGXPGXPGXRSR

SEQ ID NO: 3345 - protein, 15 aa, Artificial Sequence
  Description of Artificial Sequence: Synthetic peptide
  Synthetic construct
  MOD_RES (7)..(7): Any amino acid
SIDMVDXPQLATLAD

SEQ ID NO: 3346 - protein, 120 aa, Artificial Sequence; identical to SEQ ID NO: 3099
  Description of Artificial Sequence: Synthetic polypeptide

SEQ ID NO: 3347 - protein, 450 aa, Artificial Sequence
  Description of Artificial Sequence: Synthetic polypeptide
QVQLVQSGAEVKKPGSSVKVSCKASGGTFSDYVISWVRQAPGQGLEWMGEIFPRSGSTYYNEKFKGRVTITADKSTSTAYMELSSLRSEDTAVYYCARDYYGTSFAMDYWGQGTLVTVSSASTKGPSVFPLAPSSKSTSGGTAALGCLVKDYFPEPVTVSWNSGALTSGVHTFPAVLQSSGLYSLSSVVTVPSSSLGTQTYICNVNHKPSNTKVDKKVEPKSCDKTHTCPPCPAPELLGGPSVFLFPPKPKDTLMISRTPEVTCVVVDVSHEDPEVKFNWYVDGVEVHNAKTKPREEQYNSTYRVVSVLTVLHQDWLNGKEYKCKVSNKALPAPIEKTISKAKGQPREPQVYTLPPSREEMTKNQVSLTCLVKGFYPSDIAVEWESNGQPENNYKTTPPVLDSDGSFFLYSKLTVDKSRWQQGNVFSCSVMHEALHNHYTQKSLSLSPGK

SEQ ID NO: 3348 - protein, 450 aa, Artificial Sequence
  Description of Artificial Sequence: Synthetic polypeptide
QVQLVQSGPEVKKPGSSVKVPCKASGYIFTDYVISWVKQAPGQGLEWIGEIFPRSGSTYYNEKFKGKATLTADKSTSTAYMELSSLRSEDTAVYFCARDYYGTSFAMDYWGQGTLVTVSSASTKGPSVFPLAPSSKSTSGGTAALGCLVKDYFPEPVTVSWNSGALTSGVHTFPAVLQSSGLYSLSSVVTVPSSSLGTQTYICNVNHKPSNTKVDKKVEPKSCDKTHTCPPCPAPELLGGPSVFLFPPKPKDTLMISRTPEVTCVVVDVSHEDPEVKFNWYVDGVEVHNAKTKPREEQYNSTYRVVSVLTVLHQDWLNGKEYKCKVSNKALPAPIEKTISKAKGQPREPQVYTLPPSREEMTKNQVSLTCLVKGFYPSDIAVEWESNGQPENNYKTTPPVLDSDGSFFLYSKLTVDKSRWQQGNVFSCSVMHEALHNHYTQKSLSLSPGK

SEQ ID NO: 3349 - protein, 450 aa, Artificial Sequence
  Description of Artificial Sequence: Synthetic polypeptide
QVQLVQSGPEVKKPGSSVKVPCKASGGTFSDYVISWVRQAPGQGLEWMGEIFPRSGSTYYNEKFKGRVTITADKSTSTAYMELSSLRSEDTAVYYCARDYYGTSFAMDYWGQGTLVTVSSASTKGPSVFPLAPSSKSTSGGTAALGCLVKDYFPEPVTVSWNSGALTSGVHTFPAVLQSSGLYSLSSVVTVPSSSLGTQTYICNVNHKPSNTKVDKKVEPKSCDKTHTCPPCPAPELLGGPSVFLFPPKPKDTLMISRTPEVTCVVVDVSHEDPEVKFNWYVDGVEVHNAKTKPREEQYNSTYRVVSVLTVLHQDWLNGKEYKCKVSNKALPAPIEKTISKAKGQPREPQVYTLPPSREEMTKNQVSLTCLVKGFYPSDIAVEWESNGQPENNYKTTPPVLDSDGSFFLYSKLTVDKSRWQQGNVFSCSVMHEALHNHYTQKSLSLSPGK

SEQ ID NO: 3350 - protein, 450 aa, Artificial Sequence
  Description of Artificial Sequence: Synthetic polypeptide
QVQLVQSGAEVKKPGSSVKVSCKASGYTFSDYVISWVRQAPGQGLEWMGEIFPRSGSTYYNEKFKGRVTITADKSTSTAYMELSSLRSEDTAVYYCARDYYGTSFAMDYWGQGTLVTVSSASTKGPSVFPLAPSSKSTSGGTAALGCLVKDYFPEPVTVSWNSGALTSGVHTFPAVLQSSGLYSLSSVVTVPSSSLGTQTYICNVNHKPSNTKVDKKVEPKSCDKTHTCPPCPAPELLGGPSVFLFPPKPKDTLMISRTPEVTCVVVDVSHEDPEVKFNWYVDGVEVHNAKTKPREEQYNSTYRVVSVLTVLHQDWLNGKEYKCKVSNKALPAPIEKTISKAKGQPREPQVYTLPPSREEMTKNQVSLTCLVKGFYPSDIAVEWESNGQPENNYKTTPPVLDSDGSFFLYSKLTVDKSRWQQGNVFSCSVMHEALHNHYTQKSLSLSPGK

SEQ ID NO: 3351 - protein, 450 aa, Artificial Sequence
  Description of Artificial Sequence: Synthetic polypeptide
QVQLVQSGAEVKKPGSSVKVSCKASGGIFSDYVISWVRQAPGQGLEWMGEIFPRSGSTYYNEKFKGRVTITADKSTSTAYMELSSLRSEDTAVYYCARDYYGTSFAMDYWGQGTLVTVSSASTKGPSVFPLAPSSKSTSGGTAALGCLVKDYFPEPVTVSWNSGALTSGVHTFPAVLQSSGLYSLSSVVTVPSSSLGTQTYICNVNHKPSNTKVDKKVEPKSCDKTHTCPPCPAPELLGGPSVFLFPPKPKDTLMISRTPEVTCVVVDVSHEDPEVKFNWYVDGVEVHNAKTKPREEQYNSTYRVVSVLTVLHQDWLNGKEYKCKVSNKALPAPIEKTISKAKGQPREPQVYTLPPSREEMTKNQVSLTCLVKGFYPSDIAVEWESNGQPENNYKTTPPVLDSDGSFFLYSKLTVDKSRWQQGNVFSCSVMHEALHNHYTQKSLSLSPGK

SEQ ID NO: 3352 - protein, 450 aa, Artificial Sequence
  Description of Artificial Sequence: Synthetic polypeptide
QVQLVQSGAEVKKPGSSVKVSCKASGGTFTDYVISWVRQAPGQGLEWMGEIFPRSGSTYYNEKFKGRVTITADKSTSTAYMELSSLRSEDTAVYYCARDYYGTSFAMDYWGQGTLVTVSSASTKGPSVFPLAPSSKSTSGGTAALGCLVKDYFPEPVTVSWNSGALTSGVHTFPAVLQSSGLYSLSSVVTVPSSSLGTQTYICNVNHKPSNTKVDKKVEPKSCDKTHTCPPCPAPELLGGPSVFLFPPKPKDTLMISRTPEVTCVVVDVSHEDPEVKFNWYVDGVEVHNAKTKPREEQYNSTYRVVSVLTVLHQDWLNGKEYKCKVSNKALPAPIEKTISKAKGQPREPQVYTLPPSREEMTKNQVSLTCLVKGFYPSDIAVEWESNGQPENNYKTTPPVLDSDGSFFLYSKLTVDKSRWQQGNVFSCSVMHEALHNHYTQKSLSLSPGK

SEQ ID NO: 3353 - protein, 450 aa, Artificial Sequence
  Description of Artificial Sequence: Synthetic polypeptide
QVQLVQSGAEVKKPGSSVKVSCKASGGTFSDYVISWVKQAPGQGLEWMGEIFPRSGSTYYNEKFKGRVTITADKSTSTAYMELSSLRSEDTAVYYCARDYYGTSFAMDYWGQGTLVTVSSASTKGPSVFPLAPSSKSTSGGTAALGCLVKDYFPEPVTVSWNSGALTSGVHTFPAVLQSSGLYSLSSVVTVPSSSLGTQTYICNVNHKPSNTKVDKKVEPKSCDKTHTCPPCPAPELLGGPSVFLFPPKPKDTLMISRTPEVTCVVVDVSHEDPEVKFNWYVDGVEVHNAKTKPREEQYNSTYRVVSVLTVLHQDWLNGKEYKCKVSNKALPAPIEKTISKAKGQPREPQVYTLPPSREEMTKNQVSLTCLVKGFYPSDIAVEWESNGQPENNYKTTPPVLDSDGSFFLYSKLTVDKSRWQQGNVFSCSVMHEALHNHYTQKSLSLSPGK

SEQ ID NO: 3354 - protein, 450 aa, Artificial Sequence
  Description of Artificial Sequence: Synthetic polypeptide
QVQLVQSGAEVKKPGSSVKVSCKASGGTFSDYVISWVRQAPGQGLEWIGEIFPRSGSTYYNEKFKGRVTITADKSTSTAYMELSSLRSEDTAVYYCARDYYGTSFAMDYWGQGTLVTVSSASTKGPSVFPLAPSSKSTSGGTAALGCLVKDYFPEPVTVSWNSGALTSGVHTFPAVLQSSGLYSLSSVVTVPSSSLGTQTYICNVNHKPSNTKVDKKVEPKSCDKTHTCPPCPAPELLGGPSVFLFPPKPKDTLMISRTPEVTCVVVDVSHEDPEVKFNWYVDGVEVHNAKTKPREEQYNSTYRVVSVLTVLHQDWLNGKEYKCKVSNKALPAPIEKTISKAKGQPREPQVYTLPPSREEMTKNQVSLTCLVKGFYPSDIAVEWESNGQPENNYKTTPPVLDSDGSFFLYSKLTVDKSRWQQGNVFSCSVMHEALHNHYTQKSLSLSPGK

SEQ ID NO: 3355 - protein, 450 aa, Artificial Sequence
  Description of Artificial Sequence: Synthetic polypeptide
QVQLVQSGAEVKKPGSSVKVSCKASGGTFSDYVISWVRQAPGQGLEWMGEIFPRSGSTYYNEKFKGKVTITADKSTSTAYMELSSLRSEDTAVYYCARDYYGTSFAMDYWGQGTLVTVSSASTKGPSVFPLAPSSKSTSGGTAALGCLVKDYFPEPVTVSWNSGALTSGVHTFPAVLQSSGLYSLSSVVTVPSSSLGTQTYICNVNHKPSNTKVDKKVEPKSCDKTHTCPPCPAPELLGGPSVFLFPPKPKDTLMISRTPEVTCVVVDVSHEDPEVKFNWYVDGVEVHNAKTKPREEQYNSTYRVVSVLTVLHQDWLNGKEYKCKVSNKALPAPIEKTISKAKGQPREPQVYTLPPSREEMTKNQVSLTCLVKGFYPSDIAVEWESNGQPENNYKTTPPVLDSDGSFFLYSKLTVDKSRWQQGNVFSCSVMHEALHNHYTQKSLSLSPGK

SEQ ID NO: 3356 - protein, 450 aa, Artificial Sequence
  Description of Artificial Sequence: Synthetic polypeptide
QVQLVQSGAEVKKPGSSVKVSCKASGGTFSDYVISWVRQAPGQGLEWMGEIFPRSGSTYYNEKFKGRATITADKSTSTAYMELSSLRSEDTAVYYCARDYYGTSFAMDYWGQGTLVTVSSASTKGPSVFPLAPSSKSTSGGTAALGCLVKDYFPEPVTVSWNSGALTSGVHTFPAVLQSSGLYSLSSVVTVPSSSLGTQTYICNVNHKPSNTKVDKKVEPKSCDKTHTCPPCPAPELLGGPSVFLFPPKPKDTLMISRTPEVTCVVVDVSHEDPEVKFNWYVDGVEVHNAKTKPREEQYNSTYRVVSVLTVLHQDWLNGKEYKCKVSNKALPAPIEKTISKAKGQPREPQVYTLPPSREEMTKNQVSLTCLVKGFYPSDIAVEWESNGQPENNYKTTPPVLDSDGSFFLYSKLTVDKSRWQQGNVFSCSVMHEALHNHYTQKSLSLSPGK

SEQ ID NO: 3357 - protein, 450 aa, Artificial Sequence
  Description of Artificial Sequence: Synthetic polypeptide
QVQLVQSGAEVKKPGSSVKVSCKASGGTFSDYVISWVRQAPGQGLEWMGEIFPRSGSTYYNEKFKGRVTLTADKSTSTAYMELSSLRSEDTAVYYCARDYYGTSFAMDYWGQGTLVTVSSASTKGPSVFPLAPSSKSTSGGTAALGCLVKDYFPEPVTVSWNSGALTSGVHTFPAVLQSSGLYSLSSVVTVPSSSLGTQTYICNVNHKPSNTKVDKKVEPKSCDKTHTCPPCPAPELLGGPSVFLFPPKPKDTLMISRTPEVTCVVVDVSHEDPEVKFNWYVDGVEVHNAKTKPREEQYNSTYRVVSVLTVLHQDWLNGKEYKCKVSNKALPAPIEKTISKAKGQPREPQVYTLPPSREEMTKNQVSLTCLVKGFYPSDIAVEWESNGQPENNYKTTPPVLDSDGSFFLYSKLTVDKSRWQQGNVFSCSVMHEALHNHYTQKSLSLSPGK

SEQ ID NO: 3358 - protein, 450 aa, Artificial Sequence
  Description of Artificial Sequence: Synthetic polypeptide
QVQLVQSGAEVKKPGSSVKVSCKASGGTFSDYVISWVRQAPGQGLEWMGEIFPRSGSTYYNEKFKGRVTITADKSTSTAYMELSSLRSEDTAVYFCARDYYGTSFAMDYWGQGTLVTVSSASTKGPSVFPLAPSSKSTSGGTAALGCLVKDYFPEPVTVSWNSGALTSGVHTFPAVLQSSGLYSLSSVVTVPSSSLGTQTYICNVNHKPSNTKVDKKVEPKSCDKTHTCPPCPAPELLGGPSVFLFPPKPKDTLMISRTPEVTCVVVDVSHEDPEVKFNWYVDGVEVHNAKTKPREEQYNSTYRVVSVLTVLHQDWLNGKEYKCKVSNKALPAPIEKTISKAKGQPREPQVYTLPPSREEMTKNQVSLTCLVKGFYPSDIAVEWESNGQPENNYKTTPPVLDSDGSFFLYSKLTVDKSRWQQGNVFSCSVMHEALHNHYTQKSLSLSPGK

SEQ ID NO: 3359 - protein, 450 aa, Artificial Sequence
  Description of Artificial Sequence: Synthetic polypeptide
QVQLVQSGAEVKKPGSSVKVSCKASGYIFSDYVISWVRQAPGQGLEWMGEIFPRSGSTYYNEKFKGRVTITADKSTSTAYMELSSLRSEDTAVYYCARDYYGTSFAMDYWGQGTLVTVSSASTKGPSVFPLAPSSKSTSGGTAALGCLVKDYFPEPVTVSWNSGALTSGVHTFPAVLQSSGLYSLSSVVTVPSSSLGTQTYICNVNHKPSNTKVDKKVEPKSCDKTHTCPPCPAPELLGGPSVFLFPPKPKDTLMISRTPEVTCVVVDVSHEDPEVKFNWYVDGVEVHNAKTKPREEQYNSTYRVVSVLTVLHQDWLNGKEYKCKVSNKALPAPIEKTISKAKGQPREPQVYTLPPSREEMTKNQVSLTCLVKGFYPSDIAVEWESNGQPENNYKTTPPVLDSDGSFFLYSKLTVDKSRWQQGNVFSCSVMHEALHNHYTQKSLSLSPGK

SEQ ID NO: 3360 - protein, 450 aa, Artificial Sequence
  Description of Artificial Sequence: Synthetic polypeptide
QVQLQQSGPELVKPGTSVKMPCKASGYIFTDYVISWVKQRTGQGLEWIGEIFPRSGSTYYNEKFKGKATLTADKSSNTAYMQLSSVTSEDSAVYFCARDYYGTSFAMDYWGQGTSVTVSSASTKGPSVFPLAPSSKSTSGGTAALGCLVKDYFPEPVTVSWNSGALTSGVHTFPAVLQSSGLYSLSSVVTVPSSSLGTQTYICNVNHKPSNTKVDKKVEPKSCDKTHTCPPCPAPELLGGPSVFLFPPKPKDTLMISRTPEVTCVVVDVSHEDPEVKFNWYVDGVEVHNAKTKPREEQYNSTYRVVSVLTVLHQDWLNGKEYKCKVSNKALPAPIEKTISKAKGQPREPQVYTLPPSREEMTKNQVSLTCLVKGFYPSDIAVEWESNGQPENNYKTTPPVLDSDGSFFLYSKLTVDKSRWQQGNVFSCSVMHEALHNHYTQKSLSLSPGK

SEQ ID NO: 3361 - protein, 444 aa, Mus musculus
QVQLQQSGPELVKPGTSVKMPCKASGYIFTDYVISWVKQRTGQGLEWIGEIFPRSGSTYYNEKFKGKATLTADKSSNTAYMQLSSVTSEDSAVYFCARDYYGTSFAMDYWGQGTSVTVSSAKTTPPSVYPLAPGSAAQTNSMVTLGCLVKGYFPEPVTVTWNSGSLSSGVHTFPAVLQSDLYTLSSSVTVPSSTWPSQTVTCNVAHPASSTKVDKKIVPRDCGCKPCICTVPEVSSVFIFPPKPKDVLTITLTPKVTCVVVDISKDDPEVQFSWFVDDVEVHTAQTKPREEQINSTFRSVSELPIMHQDWLNGKEFKCRVNSAAFPAPIEKTISKTKGRPKAPQVYTIPPPKEQMAKDKVSLTCMITNFFPEDITVEWQWNGQPAENYKNTQPIMDTDGSYFVYSKLNVQKSNWEAGNTFTCSVLHEGLHNHHTEKSLSHSPGK

SEQ ID NO: 3362 - protein, 447 aa, Artificial Sequence
  Description of Artificial Sequence: Synthetic polypeptide
QVQLVQSGAEVKKPGSSVKVSCKASGGTFSDYVISWVRQAPGQGLEWMGEIFPRSGSTYYNEKFKGRVTITADKSTSTAYMELSSLRSEDTAVYYCARDYYGTSFAMDYWGQGTLVTVSSASTKGPSVFPLAPCSRSTSESTAALGCLVKDYFPEPVTVSWNSGALTSGVHTFPAVLQSSGLYSLSSVVTVPSSSLGTKTYTCNVDHKPSNTKVDKRVESKYGPPCPPCPAPEFLGGPSVFLFPPKPKDTLMISRTPEVTCVVVDVSQEDPEVQFNWYVDGVEVHNAKTKPREEQFNSTYRVVSVLTVLHQDWLNGKEYKCKVSNKGLPSSIEKTISKAKGQPREPQVYTLPPSQEEMTKNQVSLTCLVKGFYPSDIAVEWESNGQPENNYKTTPPVLDSDGSFFLYSRLTVDKSRWQEGNVFSCSVMHEALHNHYTQKSLSLSLGK

SEQ ID NO: 3363 - protein, 447 aa, Artificial Sequence
  Description of Artificial Sequence: Synthetic polypeptide
QVQLVQSGPEVKKPGSSVKVPCKASGYIFTDYVISWVKQAPGQGLEWIGEIFPRSGSTYYNEKFKGKATLTADKSTSTAYMELSSLRSEDTAVYFCARDYYGTSFAMDYWGQGTLVTVSSASTKGPSVFPLAPCSRSTSESTAALGCLVKDYFPEPVTVSWNSGALTSGVHTFPAVLQSSGLYSLSSVVTVPSSSLGTKTYTCNVDHKPSNTKVDKRVESKYGPPCPPCPAPEFLGGPSVFLFPPKPKDTLMISRTPEVTCVVVDVSQEDPEVQFNWYVDGVEVHNAKTKPREEQFNSTYRVVSVLTVLHQDWLNGKEYKCKVSNKGLPSSIEKTISKAKGQPREPQVYTLPPSQEEMTKNQVSLTCLVKGFYPSDIAVEWESNGQPENNYKTTPPVLDSDGSFFLYSRLTVDKSRWQEGNVFSCSVMHEALHNHYTQKSLSLSLGK

SEQ ID NO: 3364 - protein, 447 aa, Artificial Sequence
  Description of Artificial Sequence: Synthetic polypeptide
QVQLVQSGPEVKKPGSSVKVPCKASGGTFSDYVISWVRQAPGQGLEWMGEIFPRSGSTYYNEKFKGRVTITADKSTSTAYMELSSLRSEDTAVYYCARDYYGTSFAMDYWGQGTLVTVSSASTKGPSVFPLAPCSRSTSESTAALGCLVKDYFPEPVTVSWNSGALTSGVHTFPAVLQSSGLYSLSSVVTVPSSSLGTKTYTCNVDHKPSNTKVDKRVESKYGPPCPPCPAPEFLGGPSVFLFPPKPKDTLMISRTPEVTCVVVDVSQEDPEVQFNWYVDGVEVHNAKTKPREEQFNSTYRVVSVLTVLHQDWLNGKEYKCKVSNKGLPSSIEKTISKAKGQPREPQVYTLPPSQEEMTKNQVSLTCLVKGFYPSDIAVEWESNGQPENNYKTTPPVLDSDGSFFLYSRLTVDKSRWQEGNVFSCSVMHEALHNHYTQKSLSLSLGK

SEQ ID NO: 3365 - protein, 447 aa, Artificial Sequence
  Description of Artificial Sequence: Synthetic polypeptide
QVQLVQSGAEVKKPGSSVKVSCKASGYTFSDYVISWVRQAPGQGLEWMGEIFPRSGSTYYNEKFKGRVTITADKSTSTAYMELSSLRSEDTAVYYCARDYYGTSFAMDYWGQGTLVTVSSASTKGPSVFPLAPCSRSTSESTAALGCLVKDYFPEPVTVSWNSGALTSGVHTFPAVLQSSGLYSLSSVVTVPSSSLGTKTYTCNVDHKPSNTKVDKRVESKYGPPCPPCPAPEFLGGPSVFLFPPKPKDTLMISRTPEVTCVVVDVSQEDPEVQFNWYVDGVEVHNAKTKPREEQFNSTYRVVSVLTVLHQDWLNGKEYKCKVSNKGLPSSIEKTISKAKGQPREPQVYTLPPSQEEMTKNQVSLTCLVKGFYPSDIAVEWESNGQPENNYKTTPPVLDSDGSFFLYSRLTVDKSRWQEGNVFSCSVMHEALHNHYTQKSLSLSLGK

SEQ ID NO: 3366 - protein, 447 aa, Artificial Sequence
  Description of Artificial Sequence: Synthetic polypeptide
QVQLVQSGAEVKKPGSSVKVSCKASGGIFSDYVISWVRQAPGQGLEWMGEIFPRSGSTYYNEKFKGRVTITADKSTSTAYMELSSLRSEDTAVYYCARDYYGTSFAMDYWGQGTLVTVSSASTKGPSVFPLAPCSRSTSESTAALGCLVKDYFPEPVTVSWNSGALTSGVHTFPAVLQSSGLYSLSSVVTVPSSSLGTKTYTCNVDHKPSNTKVDKRVESKYGPPCPPCPAPEFLGGPSVFLFPPKPKDTLMISRTPEVTCVVVDVSQEDPEVQFNWYVDGVEVHNAKTKPREEQFNSTYRVVSVLTVLHQDWLNGKEYKCKVSNKGLPSSIEKTISKAKGQPREPQVYTLPPSQEEMTKNQVSLTCLVKGFYPSDIAVEWESNGQPENNYKTTPPVLDSDGSFFLYSRLTVDKSRWQEGNVFSCSVMHEALHNHYTQKSLSLSLGK

SEQ ID NO: 3367 - protein, 447 aa, Artificial Sequence
  Description of Artificial Sequence: Synthetic polypeptide
QVQLVQSGAEVKKPGSSVKVSCKASGGTFTDYVISWVRQAPGQGLEWMGEIFPRSGSTYYNEKFKGRVTITADKSTSTAYMELSSLRSEDTAVYYCARDYYGTSFAMDYWGQGTLVTVSSASTKGPSVFPLAPCSRSTSESTAALGCLVKDYFPEPVTVSWNSGALTSGVHTFPAVLQSSGLYSLSSVVTVPSSSLGTKTYTCNVDHKPSNTKVDKRVESKYGPPCPPCPAPEFLGGPSVFLFPPKPKDTLMISRTPEVTCVVVDVSQEDPEVQFNWYVDGVEVHNAKTKPREEQFNSTYRVVSVLTVLHQDWLNGKEYKCKVSNKGLPSSIEKTISKAKGQPREPQVYTLPPSQEEMTKNQVSLTCLVKGFYPSDIAVEWESNGQPENNYKTTPPVLDSDGSFFLYSRLTVDKSRWQEGNVFSCSVMHEALHNHYTQKSLSLSLGK

SEQ ID NO: 3368 - protein, 447 aa, Artificial Sequence
  Description of Artificial Sequence: Synthetic polypeptide
QVQLVQSGAEVKKPGSSVKVSCKASGGTFSDYVISWVKQAPGQGLEWMGEIFPRSGSTYYNEKFKGRVTITADKSTSTAYMELSSLRSEDTAVYYCARDYYGTSFAMDYWGQGTLVTVSSASTKGPSVFPLAPCSRSTSESTAALGCLVKDYFPEPVTVSWNSGALTSGVHTFPAVLQSSGLYSLSSVVTVPSSSLGTKTYTCNVDHKPSNTKVDKRVESKYGPPCPPCPAPEFLGGPSVFLFPPKPKDTLMISRTPEVTCVVVDVSQEDPEVQFNWYVDGVEVHNAKTKPREEQFNSTYRVVSVLTVLHQDWLNGKEYKCKVSNKGLPSSIEKTISKAKGQPREPQVYTLPPSQEEMTKNQVSLTCLVKGFYPSDIAVEWESNGQPENNYKTTPPVLDSDGSFFLYSRLTVDKSRWQEGNVFSCSVMHEALHNHYTQKSLSLSLGK

SEQ ID NO: 3369 - protein, 447 aa, Artificial Sequence
  Description of Artificial Sequence: Synthetic polypeptide
QVQLVQSGAEVKKPGSSVKVSCKASGGTFSDYVISWVRQAPGQGLEWIGEIFPRSGSTYYNEKFKGRVTITADKSTSTAYMELSSLRSEDTAVYYCARDYYGTSFAMDYWGQGTLVTVSSASTKGPSVFPLAPCSRSTSESTAALGCLVKDYFPEPVTVSWNSGALTSGVHTFPAVLQSSGLYSLSSVVTVPSSSLGTKTYTCNVDHKPSNTKVDKRVESKYGPPCPPCPAPEFLGGPSVFLFPPKPKDTLMISRTPEVTCVVVDVSQEDPEVQFNWYVDGVEVHNAKTKPREEQFNSTYRVVSVLTVLHQDWLNGKEYKCKVSNKGLPSSIEKTISKAKGQPREPQVYTLPPSQEEMTKNQVSLTCLVKGFYPSDIAVEWESNGQPENNYKTTPPVLDSDGSFFLYSRLTVDKSRWQEGNVFSCSVMHEALHNHYTQKSLSLSLGK

SEQ ID NO: 3370 - protein, 447 aa, Artificial Sequence
  Description of Artificial Sequence: Synthetic polypeptide
QVQLVQSGAEVKKPGSSVKVSCKASGGTFSDYVISWVRQAPGQGLEWMGEIFPRSGSTYYNEKFKGKVTITADKSTSTAYMELSSLRSEDTAVYYCARDYYGTSFAMDYWGQGTLVTVSSASTKGPSVFPLAPCSRSTSESTAALGCLVKDYFPEPVTVSWNSGALTSGVHTFPAVLQSSGLYSLSSVVTVPSSSLGTKTYTCNVDHKPSNTKVDKRVESKYGPPCPPCPAPEFLGGPSVFLFPPKPKDTLMISRTPEVTCVVVDVSQEDPEVQFNWYVDGVEVHNAKTKPREEQFNSTYRVVSVLTVLHQDWLNGKEYKCKVSNKGLPSSIEKTISKAKGQPREPQVYTLPPSQEEMTKNQVSLTCLVKGFYPSDIAVEWESNGQPENNYKTTPPVLDSDGSFFLYSRLTVDKSRWQEGNVFSCSVMHEALHNHYTQKSLSLSLGK

SEQ ID NO: 3371 - protein, 447 aa, Artificial Sequence
  Description of Artificial Sequence: Synthetic polypeptide
QVQLVQSGAEVKKPGSSVKVSCKASGGTFSDYVISWVRQAPGQGLEWMGEIFPRSGSTYYNEKFKGRATITADKSTSTAYMELSSLRSEDTAVYYCARDYYGTSFAMDYWGQGTLVTVSSASTKGPSVFPLAPCSRSTSESTAALGCLVKDYFPEPVTVSWNSGALTSGVHTFPAVLQSSGLYSLSSVVTVPSSSLGTKTYTCNVDHKPSNTKVDKRVESKYGPPCPPCPAPEFLGGPSVFLFPPKPKDTLMISRTPEVTCVVVDVSQEDPEVQFNWYVDGVEVHNAKTKPREEQFNSTYRVVSVLTVLHQDWLNGKEYKCKVSNKGLPSSIEKTISKAKGQPREPQVYTLPPSQEEMTKNQVSLTCLVKGFYPSDIAVEWESNGQPENNYKTTPPVLDSDGSFFLYSRLTVDKSRWQEGNVFSCSVMHEALHNHYTQKSLSLSLGK

SEQ ID NO: 3372 - protein, 447 aa, Artificial Sequence
  Description of Artificial Sequence: Synthetic polypeptide
QVQLVQSGAEVKKPGSSVKVSCKASGGTFSDYVISWVRQAPGQGLEWMGEIFPRSGSTYYNEKFKGRVTLTADKSTSTAYMELSSLRSEDTAVYYCARDYYGTSFAMDYWGQGTLVTVSSASTKGPSVFPLAPCSRSTSESTAALGCLVKDYFPEPVTVSWNSGALTSGVHTFPAVLQSSGLYSLSSVVTVPSSSLGTKTYTCNVDHKPSNTKVDKRVESKYGPPCPPCPAPEFLGGPSVFLFPPKPKDTLMISRTPEVTCVVVDVSQEDPEVQFNWYVDGVEVHNAKTKPREEQFNSTYRVVSVLTVLHQDWLNGKEYKCKVSNKGLPSSIEKTISKAKGQPREPQVYTLPPSQEEMTKNQVSLTCLVKGFYPSDIAVEWESNGQPENNYKTTPPVLDSDGSFFLYSRLTVDKSRWQEGNVFSCSVMHEALHNHYTQKSLSLSLGK

SEQ ID NO: 3373 - protein, 447 aa, Artificial Sequence
  Description of Artificial Sequence: Synthetic polypeptide
QVQLVQSGAEVKKPGSSVKVSCKASGGTFSDYVISWVRQAPGQGLEWMGEIFPRSGSTYYNEKFKGRVTITADKSTSTAYMELSSLRSEDTAVYFCARDYYGTSFAMDYWGQGTLVTVSSASTKGPSVFPLAPCSRSTSESTAALGCLVKDYFPEPVTVSWNSGALTSGVHTFPAVLQSSGLYSLSSVVTVPSSSLGTKTYTCNVDHKPSNTKVDKRVESKYGPPCPPCPAPEFLGGPSVFLFPPKPKDTLMISRTPEVTCVVVDVSQEDPEVQFNWYVDGVEVHNAKTKPREEQFNSTYRVVSVLTVLHQDWLNGKEYKCKVSNKGLPSSIEKTISKAKGQPREPQVYTLPPSQEEMTKNQVSLTCLVKGFYPSDIAVEWESNGQPENNYKTTPPVLDSDGSFFLYSRLTVDKSRWQEGNVFSCSVMHEALHNHYTQKSLSLSLGK

SEQ ID NO: 3374 - protein, 447 aa, Artificial Sequence
  Description of Artificial Sequence: Synthetic polypeptide
QVQLVQSGAEVKKPGSSVKVSCKASGYIFSDYVISWVRQAPGQGLEWMGEIFPRSGSTYYNEKFKGRVTITADKSTSTAYMELSSLRSEDTAVYYCARDYYGTSFAMDYWGQGTLVTVSSASTKGPSVFPLAPCSRSTSESTAALGCLVKDYFPEPVTVSWNSGALTSGVHTFPAVLQSSGLYSLSSVVTVPSSSLGTKTYTCNVDHKPSNTKVDKRVESKYGPPCPPCPAPEFLGGPSVFLFPPKPKDTLMISRTPEVTCVVVDVSQEDPEVQFNWYVDGVEVHNAKTKPREEQFNSTYRVVSVLTVLHQDWLNGKEYKCKVSNKGLPSSIEKTISKAKGQPREPQVYTLPPSQEEMTKNQVSLTCLVKGFYPSDIAVEWESNGQPENNYKTTPPVLDSDGSFFLYSRLTVDKSRWQEGNVFSCSVMHEALHNHYTQKSLSLSLGK

SEQ ID NO: 3375 - protein, 447 aa, Artificial Sequence
  Description of Artificial Sequence: Synthetic polypeptide
QVQLQQSGPELVKPGTSVKMPCKASGYIFTDYVISWVKQRTGQGLEWIGEIFPRSGSTYYNEKFKGKATLTADKSSNTAYMQLSSVTSEDSAVYFCARDYYGTSFAMDYWGQGTSVTVSSASTKGPSVFPLAPCSRSTSESTAALGCLVKDYFPEPVTVSWNSGALTSGVHTFPAVLQSSGLYSLSSVVTVPSSSLGTKTYTCNVDHKPSNTKVDKRVESKYGPPCPPCPAPEFLGGPSVFLFPPKPKDTLMISRTPEVTCVVVDVSQEDPEVQFNWYVDGVEVHNAKTKPREEQFNSTYRVVSVLTVLHQDWLNGKEYKCKVSNKGLPSSIEKTISKAKGQPREPQVYTLPPSQEEMTKNQVSLTCLVKGFYPSDIAVEWESNGQPENNYKTTPPVLDSDGSFFLYSRLTVDKSRWQEGNVFSCSVMHEALHNHYTQKSLSLSLGK

SEQ ID NO: 3376 - DNA, 360 bp, Artificial Sequence
  Description of Artificial Sequence: Synthetic polynucleotide
caggtccaattgcagcagtctggacctgagctggtgaagcctgggacttcagtgaagatgccctgtaaggcttctggatacatattcactgactatgtcataagctgggtgaagcagagaactggacagggccttgagtggattggagagatttttcctagaagtggtagtacttactacaatgagaagttcaagggcaaggccacactgactgcagacaaatcctccaacacagcctacatgcagctcagcagcgtgacatctgaggactctgcggtctatttctgtgcaagagattactacggtacttcatttgctatggactactggggtcaaggaacctcagtcaccgtctcctca

SEQ ID NO: 3377 - DNA, 360 bp, Artificial Sequence
  Description of Artificial Sequence: Synthetic polynucleotide
caggtccagctgcagcagagcggccccgaactggtcaaacccggaacctccgtgaagatgccttgtaaagcctcaggatacattttcaccgattacgtgatctcttgggtcaaacagcgaacaggacagggactggagtggatcggggaaattttccccagatccggatctacttactataacgagaagtttaaaggcaaggccaccctgacagctgacaagagctccaatacagcttacatgcagctgtctagtgtgactagtgaagactcagcagtctatttctgcgccagggattactatgggacaagttttgccatggactattggggacagggcacttccgtgaccgtctcaagc

SEQ ID NO: 3378 - DNA, 360 bp, Artificial Sequence; identical to SEQ ID NO: 3377
  Description of Artificial Sequence: Synthetic polynucleotide

SEQ ID NO: 3379 - DNA, 360 bp, Artificial Sequence
  Description of Artificial Sequence: Synthetic polynucleotide
caggtccagctggtccagagcggagcagaagtgaagaaacccggaagtagcgtgaaggtgtcatgcaaggcaagcggcggaacatttagtgattacgtgatctcctgggtccgacaggctccaggacagggactggagtggatgggggaaattttccctagatcaggaagcacctactataacgagaagtttaaaggccgcgtgaccatcacagcagacaagtccacttctaccgcctacatggagctgagctccctgcggagcgaagacaccgccgtctactattgcgctagagattactatgggacatctttcgccatggactattggggacagggcacactggtgactgtctctagt

SEQ ID NO: 3380 - DNA, 360 bp, Artificial Sequence
  Description of Artificial Sequence: Synthetic polynucleotide
caggtccagctggtgcagtcaggccccgaagtgaagaagcccggaagtagtgtcaaggtcccatgtaaagcatcagggtatatttttactgattacgtgatcagctgggtcaaacaggcaccaggacagggactggagtggatcggggaaattttccctagatcaggaagcacatactataacgagaagtttaaaggcaaggccaccctgacagctgacaagtccacttctaccgcttacatggagctgagctccctgcggagtgaagacaccgcagtgtatttctgcgccagagattactatgggacatcctttgcaatggactattggggacagggcacactggtgactgtctctagt

SEQ ID NO: 3381 - DNA, 360 bp, Artificial Sequence
  Description of Artificial Sequence: Synthetic polynucleotide
caggtccagctggtccagagcggacccgaagtgaagaaacccggaagtagcgtgaaggtgccatgcaaggcaagcggcggaacatttagtgattacgtgatctcctgggtccgacaggctccaggacagggactggagtggatgggggaaattttccctagatcaggaagcacctactataacgagaagtttaaaggccgcgtgaccatcacagcagacaagtccacttctaccgcctacatggagctgagctccctgcggagcgaagacaccgccgtctactattgcgctagagattactatgggacatctttcgccatggactattggggacagggcacactggtgactgtctctagt

SEQ ID NO: 3382 - DNA, 360 bp, Artificial Sequence
  Description of Artificial Sequence: Synthetic polynucleotide
caggtccagctggtccagagcggagcagaagtgaagaaacccggaagtagcgtgaaggtgtcatgcaaggcaagcgggtatacatttagtgattacgtgatctcctgggtccgacaggctccaggacagggactggagtggatgggggaaattttccctagatcaggaagcacctactataacgagaagtttaaaggccgcgtgaccatcacagcagacaagtccacttctaccgcctacatggagctgagctccctgcggagcgaagacaccgccgtctactattgcgctagagattactatgggacatctttcgccatggactattggggacagggcacactggtgactgtctctagt

SEQ ID NO: 3383 - DNA, 360 bp, Artificial Sequence
  Description of Artificial Sequence: Synthetic polynucleotide
caggtccagctggtccagagcggagcagaagtgaagaaacccggaagtagcgtgaaggtgtcatgcaaggcaagcggcggaatttttagtgattacgtgatctcctgggtccgacaggctccaggacagggactggagtggatgggggaaattttccctagatcaggaagcacctactataacgagaagtttaaaggccgcgtgaccatcacagcagacaagtccacttctaccgcctacatggagctgagctccctgcggagcgaagacaccgccgtctactattgcgctagagattactatgggacatctttcgccatggactattggggacagggcacactggtgactgtctctagt

SEQ ID NO: 3384 - DNA, 360 bp, Artificial Sequence
  Description of Artificial Sequence: Synthetic polynucleotide
caggtccagctggtccagagcggagcagaagtgaagaaacccggaagtagcgtgaaggtgtcatgcaaggcaagcggcggaacatttactgattacgtgatctcctgggtccgacaggctccaggacagggactggagtggatgggggaaattttccctagatcaggaagcacctactataacgagaagtttaaaggccgcgtgaccatcacagcagacaagtccacttctaccgcctacatggagctgagctccctgcggagcgaagacaccgccgtctactattgcgctagagattactatgggacatctttcgccatggactattggggacagggcacactggtgactgtctctagt

SEQ ID NO: 3385 - DNA, 360 bp, Artificial Sequence
  Description of Artificial Sequence: Synthetic polynucleotide
caggtccagctggtccagagcggagcagaagtgaagaaacccggaagtagcgtgaaggtgtcatgcaaggcaagcggcggaacatttagtgattacgtgatctcctgggtcaaacaggctccaggacagggactggagtggatgggggaaattttccctagatcaggaagcacctactataacgagaagtttaaaggccgcgtgaccatcacagcagacaagtccacttctaccgcctacatggagctgagctccctgcggagcgaagacaccgccgtctactattgcgctagagattactatgggacatctttcgccatggactattggggacagggcacactggtgactgtctctagt

SEQ ID NO: 3386 - DNA, 360 bp, Artificial Sequence
  Description of Artificial Sequence: Synthetic polynucleotide
caggtccagctggtccagagcggagcagaagtgaagaaacccggaagtagcgtgaaggtgtcatgcaaggcaagcggcggaacatttagtgattacgtgatctcctgggtccgacaggctccaggacagggactggagtggatcggggaaattttccctagatcaggaagcacctactataacgagaagtttaaaggccgcgtgaccatcacagcagacaagtccacttctaccgcctacatggagctgagctccctgcggagcgaagacaccgccgtctactattgcgctagagattactatgggacatctttcgccatggactattggggacagggcacactggtgactgtctctagt

SEQ ID NO: 3387 - DNA, 360 bp, Artificial Sequence
  Description of Artificial Sequence: Synthetic polynucleotide
caggtccagctggtccagagcggagcagaagtgaagaaacccggaagtagcgtgaaggtgtcatgcaaggcaagcggcggaacatttagtgattacgtgatctcctgggtccgacaggctccaggacagggactggagtggatgggggaaattttccctagatcaggaagcacctactataacgagaagtttaaaggcaaggtgaccatcacagcagacaagtccacttctaccgcctacatggagctgagctccctgcggagcgaagacaccgccgtctactattgcgctagagattactatgggacatctttcgccatggactattggggacagggcacactggtgactgtctctagt

SEQ ID NO: 3388 - DNA, 360 bp, Artificial Sequence
  Description of Artificial Sequence: Synthetic polynucleotide
caggtccagctggtccagagcggagcagaagtgaagaaacccggaagtagcgtgaaggtgtcatgcaaggcaagcggcggaacatttagtgattacgtgatctcctgggtccgacaggctccaggacagggactggagtggatgggggaaattttccctagatcaggaagcacctactataacgagaagtttaaaggccgcgccaccatcacagcagacaagtccacttctaccgcctacatggagctgagctccctgcggagcgaagacaccgccgtctactattgcgctagagattactatgggacatctttcgccatggactattggggacagggcacactggtgactgtctctagt

SEQ ID NO: 3389 - DNA, 360 bp, Artificial Sequence
  Description of Artificial Sequence: Synthetic polynucleotide
caggtccagctggtccagagcggagcagaagtgaagaaacccggaagtagcgtgaaggtgtcatgcaaggcaagcggcggaacatttagtgattacgtgatctcctgggtccgacaggctccaggacagggactggagtggatgggggaaattttccctagatcaggaagcacctactataacgagaagtttaaaggccgcgtgaccctgacagcagacaagtccacttctaccgcctacatggagctgagctccctgcggagcgaagacaccgccgtctactattgcgctagagattactatgggacatctttcgccatggactattggggacagggcacactggtgactgtctctagt

SEQ ID NO: 3390 - DNA, 360 bp, Artificial Sequence
  Description of Artificial Sequence: Synthetic polynucleotide
caggtccagctggtccagagcggagcagaagtgaagaaacccggaagtagcgtgaaggtgtcatgcaaggcaagcggcggaacatttagtgattacgtgatctcctgggtccgacaggctccaggacagggactggagtggatgggggaaattttccctagatcaggaagcacctactataacgagaagtttaaaggccgcgtgaccatcacagcagacaagtccacttctaccgcctacatggagctgagctccctgcggagcgaagacaccgccgtctatttctgcgctagagattactatgggacatctttcgccatggactattggggacagggcacactggtgactgtctctagt

SEQ ID NO: 3391 - DNA, 360 bp, Artificial Sequence
  Description of Artificial Sequence: Synthetic polynucleotide
caggtccagctggtccagagcggagcagaagtgaagaaacccggaagtagcgtgaaggtgtcatgcaaggcaagcgggtatatttttagtgattacgtgatctcctgggtccgacaggctccaggacagggactggagtggatgggggaaattttccctagatcaggaagcacctactataacgagaagtttaaaggccgcgtgaccatcacagcagacaagtccacttctaccgcctacatggagctgagctccctgcggagcgaagacaccgccgtctactattgcgctagagattactatgggacatctttcgccatggactattggggacagggcacactggtgactgtctctagt

SEQ ID NO: 3392 - DNA, 1350 bp, Artificial Sequence
  Description of Artificial Sequence: Synthetic polynucleotide
caggtccagctggtccagagcggagcagaagtgaagaaacccggaagtagcgtgaaggtgtcatgcaaggcaagcggcggaacatttagtgattacgtgatctcctgggtccgacaggctccaggacagggactggagtggatgggggaaattttccctagatcaggaagcacctactataacgagaagtttaaaggccgcgtgaccatcacagcagacaagtccacttctaccgcctacatggagctgagctccctgcggagcgaagacaccgccgtctactattgcgctagagattactatgggacatctttcgccatggactattggggacagggcacactggtgactgtctctagtgcctccaccaagggcccttccgtgttccctctggccccttcctccaagtccacctccggcggcaccgccgctctgggctgcctggtgaaggactacttccctgagcctgtgaccgtgtcctggaactctggcgccctgaccagcggcgtgcacaccttccctgccgtgctgcagtcctccggcctgtactccctgtcctccgtggtgaccgtgccttcctcctccctgggcacccagacctacatctgcaacgtgaaccacaagccttccaacaccaaggtggacaagaaggtggagcctaagtcctgcgacaagacccacacgtgccctccatgcccagctcccgagctgctgggcggaccaagcgtgtttctgttccctcctaagcctaaggacaccctgatgatctcccggacccctgaggtgacgtgcgtggtggtggacgtgtcccacgaggacccagaggtgaagttcaattggtacgtggacggcgtggaggtgcacaacgccaagaccaagcctcgggaggaacagtacaactccacctaccgggtggtgtctgtgctgaccgtgctgcaccaggactggctgaacggcaaggaatacaagtgcaaagtctccaacaaggccctgcctgcccccatcgaaaagaccatctccaaggccaagggccagcctcgcgagcctcaggtgtacaccctgcctccaagcagggaggaaatgaccaagaaccaggtgtccctgacctgtctggtgaagggcttctacccttccgatatcgccgtggagtgggagtccaacggccagcctgagaacaactacaagaccacccctcctgtgctggactccgacggctccttcttcctgtactccaagctgaccgtggacaagtcccggtggcagcagggcaacgtgttctcctgctccgtgatgcacgaggccctgcacaaccactacacccagaagagcctctccctgtccccgggtaaa

SEQ ID NO: 3393 - DNA, 1350 bp, Artificial Sequence
  Description of Artificial Sequence: Synthetic polynucleotide
caggtccagctggtgcagtcaggccccgaagtgaagaagcccggaagtagtgtcaaggtcccatgtaaagcatcagggtatatttttactgattacgtgatcagctgggtcaaacaggcaccaggacagggactggagtggatcggggaaattttccctagatcaggaagcacatactataacgagaagtttaaaggcaaggccaccctgacagctgacaagtccacttctaccgcttacatggagctgagctccctgcggagtgaagacaccgcagtgtatttctgcgccagagattactatgggacatcctttgcaatggactattggggacagggcacactggtgactgtctctagtgcctccaccaagggcccttccgtgttccctctggccccttcctccaagtccacctccggcggcaccgccgctctgggctgcctggtgaaggactacttccctgagcctgtgaccgtgtcctggaactctggcgccctgaccagcggcgtgcacaccttccctgccgtgctgcagtcctccggcctgtactccctgtcctccgtggtgaccgtgccttcctcctccctgggcacccagacctacatctgcaacgtgaaccacaagccttccaacaccaaggtggacaagaaggtggagcctaagtcctgcgacaagacccacacgtgccctccatgcccagctcccgagctgctgggcggaccaagcgtgtttctgttccctcctaagcctaaggacaccctgatgatctcccggacccctgaggtgacgtgcgtggtggtggacgtgtcccacgaggacccagaggtgaagttcaattggtacgtggacggcgtggaggtgcacaacgccaagaccaagcctcgggaggaacagtacaactccacctaccgggtggtgtctgtgctgaccgtgctgcaccaggactggctgaacggcaaggaatacaagtgcaaagtctccaacaaggccctgcctgcccccatcgaaaagaccatctccaaggccaagggccagcctcgcgagcctcaggtgtacaccctgcctccaagcagggaggaaatgaccaagaaccaggtgtccctgacctgtctggtgaagggcttctacccttccgatatcgccgtggagtgggagtccaacggccagcctgagaacaactacaagaccacccctcctgtgctggactccgacggctccttcttcctgtactccaagctgaccgtggacaagtcccggtggcagcagggcaacgtgttctcctgctccgtgatgcacgaggccctgcacaaccactacacccagaagagcctctccctgtccccgggtaaa

SEQ ID NO: 3394 - DNA, 1350 bp, Artificial Sequence
  Description of Artificial Sequence: Synthetic polynucleotide
caggtccagctggtccagagcggacccgaagtgaagaaacccggaagtagcgtgaaggtgccatgcaaggcaagcggcggaacatttagtgattacgtgatctcctgggtccgacaggctccaggacagggactggagtggatgggggaaattttccctagatcaggaagcacctactataacgagaagtttaaaggccgcgtgaccatcacagcagacaagtccacttctaccgcctacatggagctgagctccctgcggagcgaagacaccgccgtctactattgcgctagagattactatgggacatctttcgccatggactattggggacagggcacactggtgactgtctctagtgcctccaccaagggcccttccgtgttccctctggccccttcctccaagtccacctccggcggcaccgccgctctgggctgcctggtgaaggactacttccctgagcctgtgaccgtgtcctggaactctggcgccctgaccagcggcgtgcacaccttccctgccgtgctgcagtcctccggcctgtactccctgtcctccgtggtgaccgtgccttcctcctccctgggcacccagacctacatctgcaacgtgaaccacaagccttccaacaccaaggtggacaagaaggtggagcctaagtcctgcgacaagacccacacgtgccctccatgcccagctcccgagctgctgggcggaccaagcgtgtttctgttccctcctaagcctaaggacaccctgatgatctcccggacccctgaggtgacgtgcgtggtggtggacgtgtcccacgaggacccagaggtgaagttcaattggtacgtggacggcgtggaggtgcacaacgccaagaccaagcctcgggaggaacagtacaactccacctaccgggtggtgtctgtgctgaccgtgctgcaccaggactggctgaacggcaaggaatacaagtgcaaagtctccaacaaggccctgcctgcccccatcgaaaagaccatctccaaggccaagggccagcctcgcgagcctcaggtgtacaccctgcctccaagcagggaggaaatgaccaagaaccaggtgtccctgacctgtctggtgaagggcttctacccttccgatatcgccgtggagtgggagtccaacggccagcctgagaacaactacaagaccacccctcctgtgctggactccgacggctccttcttcctgtactccaagctgaccgtggacaagtcccggtggcagcagggcaacgtgttctcctgctccgtgatgcacgaggccctgcacaaccactacacccagaagagcctctccctgtccccgggtaaa

SEQ ID NO: 3395 - DNA, 1350 bp, Artificial Sequence
  Description of Artificial Sequence: Synthetic polynucleotide
caggtccagctggtccagagcggagcagaagtgaagaaacccggaagtagcgtgaaggtgtcatgcaaggcaagcgggtatacatttagtgattacgtgatctcctgggtccgacaggctccaggacagggactggagtggatgggggaaattttccctagatcaggaagcacctactataacgagaagtttaaaggccgcgtgaccatcacagcagacaagtccacttctaccgcctacatggagctgagctccctgcggagcgaagacaccgccgtctactattgcgctagagattactatgggacatctttcgccatggactattggggacagggcacactggtgactgtctctagtgcctccaccaagggcccttccgtgttccctctggccccttcctccaagtccacctccggcggcaccgccgctctgggctgcctggtgaaggactacttccctgagcctgtgaccgtgtcctggaactctggcgccctgaccagcggcgtgcacaccttccctgccgtgctgcagtcctccggcctgtactccctgtcctccgtggtgaccgtgccttcctcctccctgggcacccagacctacatctgcaacgtgaaccacaagccttccaacaccaaggtggacaagaaggtggagcctaagtcctgcgacaagacccacacgtgccctccatgcccagctcccgagctgctgggcggaccaagcgtgtttctgttccctcctaagcctaaggacaccctgatgatctcccggacccctgaggtgacgtgcgtggtggtggacgtgtcccacgaggacccagaggtgaagttcaattggtacgtggacggcgtggaggtgcacaacgccaagaccaagcctcgggaggaacagtacaactccacctaccgggtggtgtctgtgctgaccgtgctgcaccaggactggctgaacggcaaggaatacaagtgcaaagtctccaacaaggccctgcctgcccccatcgaaaagaccatctccaaggccaagggccagcctcgcgagcctcaggtgtacaccctgcctccaagcagggaggaaatgaccaagaaccaggtgtccctgacctgtctggtgaagggcttctacccttccgatatcgccgtggagtgggagtccaacggccagcctgagaacaactacaagaccacccctcctgtgctggactccgacggctccttcttcctgtactccaagctgaccgtggacaagtcccggtggcagcagggcaacgtgttctcctgctccgtgatgcacgaggccctgcacaaccactacacccagaagagcctctccctgtccccgggtaaa

SEQ ID NO: 3396 - DNA, 1350 bp, Artificial Sequence
  Description of Artificial Sequence: Synthetic polynucleotide
caggtccagctggtccagagcggagcagaagtgaagaaacccggaagtagcgtgaaggtgtcatgcaaggcaagcggcggaatttttagtgattacgtgatctcctgggtccgacaggctccaggacagggactggagtggatgggggaaattttccctagatcaggaagcacctactataacgagaagtttaaaggccgcgtgaccatcacagcagacaagtccacttctaccgcctacatggagctgagctccctgcggagcgaagacaccgccgtctactattgcgctagagattactatgggacatctttcgccatggactattggggacagggcacactggtgactgtctctagtgcctccaccaagggcccttccgtgttccctctggccccttcctccaagtccacctccggcggcaccgccgctctgggctgcctggtgaaggactacttccctgagcctgtgaccgtgtcctggaactctggcgccctgaccagcggcgtgcacaccttccctgccgtgctgcagtcctccggcctgtactccctgtcctccgtggtgaccgtgccttcctcctccctgggcacccagacctacatctgcaacgtgaaccacaagccttccaacaccaaggtggacaagaaggtggagcctaagtcctgcgacaagacccacacgtgccctccatgcccagctcccgagctgctgggcggaccaagcgtgtttctgttccctcctaagcctaaggacaccctgatgatctcccggacccctgaggtgacgtgcgtggtggtggacgtgtcccacgaggacccagaggtgaagttcaattggtacgtggacggcgtggaggtgcacaacgccaagaccaagcctcgggaggaacagtacaactccacctaccgggtggtgtctgtgctgaccgtgctgcaccaggactggctgaacggcaaggaatacaagtgcaaagtctccaacaaggccctgcctgcccccatcgaaaagaccatctccaaggccaagggccagcctcgcgagcctcaggtgtacaccctgcctccaagcagggaggaaatgaccaagaaccaggtgtccctgacctgtctggtgaagggcttctacccttccgatatcgccgtggagtgggagtccaacggccagcctgagaacaactacaagaccacccctcctgtgctggactccgacggctccttcttcctgtactccaagctgaccgtggacaagtcccggtggcagcagggcaacgtgttctcctgctccgtgatgcacgaggccctgcacaaccactacacccagaagagcctctccctgtccccgggtaaa

SEQ ID NO: 3397 - DNA, 1350 bp, Artificial Sequence
  Description of Artificial Sequence: Synthetic polynucleotide
caggtccagctggtccagagcggagcagaagtgaagaaacccggaagtagcgtgaaggtgtcatgcaaggcaagcggcggaacatttactgattacgtgatctcctgggtccgacaggctccaggacagggactggagtggatgggggaaattttccctagatcaggaagcacctactataacgagaagtttaaaggccgcgtgaccatcacagcagacaagtccacttctaccgcctacatggagctgagctccctgcggagcgaagacaccgccgtctactattgcgctagagattactatgggacatctttcgccatggactattggggacagggcacactggtgactgtctctagtgcctccaccaagggcccttccgtgttccctctggccccttcctccaagtccacctccggcggcaccgccgctctgggctgcctggtgaaggactacttccctgagcctgtgaccgtgtcctggaactctggcgccctgaccagcggcgtgcacaccttccctgccgtgctgcagtcctccggcctgtactccctgtcctccgtggtgaccgtgccttcctcctccctgggcacccagacctacatctgcaacgtgaaccacaagccttccaacaccaaggtggacaagaaggtggagcctaagtcctgcgacaagacccacacgtgccctccatgcccagctcccgagctgctgggcggaccaagcgtgtttctgttccctcctaagcctaaggacaccctgatgatctcccggacccctgaggtgacgtgcgtggtggtggacgtgtcccacgaggacccagaggtgaagttcaattggtacgtggacggcgtggaggtgcacaacgccaagaccaagcctcgggaggaacagtacaactccacctaccgggtggtgtctgtgctgaccgtgctgcaccaggactggctgaacggcaaggaatacaagtgcaaagtctccaacaaggccctgcctgcccccatcgaaaagaccatctccaaggccaagggccagcctcgcgagcctcaggtgtacaccctgcctccaagcagggaggaaatgaccaagaaccaggtgtccctgacctgtctggtgaagggcttctacccttccgatatcgccgtggagtgggagtccaacggccagcctgagaacaactacaagaccacccctcctgtgctggactccgacggctccttcttcctgtactccaagctgaccgtggacaagtcccggtggcagcagggcaacgtgttctcctgctccgtgatgcacgaggccctgcacaaccactacacccagaagagcctctccctgtccccgggtaaa

SEQ ID NO: 3398 - DNA, 1350 bp, Artificial Sequence
  Description of Artificial Sequence: Synthetic polynucleotide
caggtccagctggtccagagcggagcagaagtgaagaaacccggaagtagcgtgaaggtgtcatgcaaggcaagcggcggaacatttagtgattacgtgatctcctgggtcaaacaggctccaggacagggactggagtggatgggggaaattttccctagatcaggaagcacctactataacgagaagtttaaaggccgcgtgaccatcacagcagacaagtccacttctaccgcctacatggagctgagctccctgcggagcgaagacaccgccgtctactattgcgctagagattactatgggacatctttcgccatggactattggggacagggcacactggtgactgtctctagtgcctccaccaagggcccttccgtgttccctctggccccttcctccaagtccacctccggcggcaccgccgctctgggctgcctggtgaaggactacttccctgagcctgtgaccgtgtcctggaactctggcgccctgaccagcggcgtgcacaccttccctgccgtgctgcagtcctccggcctgtactccctgtcctccgtggtgaccgtgccttcctcctccctgggcacccagacctacatctgcaacgtgaaccacaagccttccaacaccaaggtggacaagaaggtggagcctaagtcctgcgacaagacccacacgtgccctccatgcccagctcccgagctgctgggcggaccaagcgtgtttctgttccctcctaagcctaaggacaccctgatgatctcccggacccctgaggtgacgtgcgtggtggtggacgtgtcccacgaggacccagaggtgaagttcaattggtacgtggacggcgtggaggtgcacaacgccaagaccaagcctcgggaggaacagtacaactccacctaccgggtggtgtctgtgctgaccgtgctgcaccaggactggctgaacggcaaggaatacaagtgcaaagtctccaacaaggccctgcctgcccccatcgaaaagaccatctccaaggccaagggccagcctcgcgagcctcaggtgtacaccctgcctccaagcagggaggaaatgaccaagaaccaggtgtccctgacctgtctggtgaagggcttctacccttccgatatcgccgtggagtgggagtccaacggccagcctgagaacaactacaagaccacccctcctgtgctggactccgacggctccttcttcctgtactccaagctgaccgtggacaagtcccggtggcagcagggcaacgtgttctcctgctccgtgatgcacgaggccctgcacaaccactacacccagaagagcctctccctgtccccgggtaaa

SEQ ID NO: 3399 - DNA, 1350 bp, Artificial Sequence
  Description of Artificial Sequence: Synthetic polynucleotide
caggtccagctggtccagagcggagcagaagtgaagaaacccggaagtagcgtgaaggtgtcatgcaaggcaagcggcggaacatttagtgattacgtgatctcctgggtccgacaggctccaggacagggactggagtggatcggggaaattttccctagatcaggaagcacctactataacgagaagtttaaaggccgcgtgaccatcacagcagacaagtccacttctaccgcctacatggagctgagctccctgcggagcgaagacaccgccgtctactattgcgctagagattactatgggacatctttcgccatggactattggggacagggcacactggtgactgtctctagtgcctccaccaagggcccttccgtgttccctctggccccttcctccaagtccacctccggcggcaccgccgctctgggctgcctggtgaaggactacttccctgagcctgtgaccgtgtcctggaactctggcgccctgaccagcggcgtgcacaccttccctgccgtgctgcagtcctccggcctgtactccctgtcctccgtggtgaccgtgccttcctcctccctgggcacccagacctacatctgcaacgtgaaccacaagccttccaacaccaaggtggacaagaaggtggagcctaagtcctgcgacaagacccacacgtgccctccatgcccagctcccgagctgctgggcggaccaagcgtgtttctgttccctcctaagcctaaggacaccctgatgatctcccggacccctgaggtgacgtgcgtggtggtggacgtgtcccacgaggacccagaggtgaagttcaattggtacgtggacggcgtggaggtgcacaacgccaagaccaagcctcgggaggaacagtacaactccacctaccgggtggtgtctgtgctgaccgtgctgcaccaggactggctgaacggcaaggaatacaagtgcaaagtctccaacaaggccctgcctgcccccatcgaaaagaccatctccaaggccaagggccagcctcgcgagcctcaggtgtacaccctgcctccaagcagggaggaaatgaccaagaaccaggtgtccctgacctgtctggtgaagggcttctacccttccgatatcgccgtggagtgggagtccaacggccagcctgagaacaactacaagaccacccctcctgtgctggactccgacggctccttcttcctgtactccaagctgaccgtggacaagtcccggtggcagcagggcaacgtgttctcctgctccgtgatgcacgaggccctgcacaaccactacacccagaagagcctctccctgtccccgggtaaa

SEQ ID NO: 3400 - DNA, 1350 bp, Artificial Sequence
  Description of Artificial Sequence: Synthetic polynucleotide
caggtccagctggtccagagcggagcagaagtgaagaaacccggaagtagcgtgaaggtgtcatgcaaggcaagcggcggaacatttagtgattacgtgatctcctgggtccgacaggctccaggacagggactggagtggatgggggaaattttccctagatcaggaagcacctactataacgagaagtttaaaggcaaggtgaccatcacagcagacaagtccacttctaccgcctacatggagctgagctccctgcggagcgaagacaccgccgtctactattgcgctagagattactatgggacatctttcgccatggactattggggacagggcacactggtgactgtctctagtgcctccaccaagggcccttccgtgttccctctggccccttcctccaagtccacctccggcggcaccgccgctctgggctgcctggtgaaggactacttccctgagcctgtgaccgtgtcctggaactctggcgccctgaccagcggcgtgcacaccttccctgccgtgctgcagtcctccggcctgtactccctgtcctccgtggtgaccgtgccttcctcctccctgggcacccagacctacatctgcaacgtgaaccacaagccttccaacaccaaggtggacaagaaggtggagcctaagtcctgcgacaagacccacacgtgccctccatgcccagctcccgagctgctgggcggaccaagcgtgtttctgttccctcctaagcctaaggacaccctgatgatctcccggacccctgaggtgacgtgcgtggtggtggacgtgtcccacgaggacccagaggtgaagttcaattggtacgtggacggcgtggaggtgcacaacgccaagaccaagcctcgggaggaacagtacaactccacctaccgggtggtgtctgtgctgaccgtgctgcaccaggactggctgaacggcaaggaatacaagtgcaaagtctccaacaaggccctgcctgcccccatcgaaaagaccatctccaaggccaagggccagcctcgcgagcctcaggtgtacaccctgcctccaagcagggaggaaatgaccaagaaccaggtgtccctgacctgtctggtgaagggcttctacccttccgatatcgccgtggagtgggagtccaacggccagcctgagaacaactacaagaccacccctcctgtgctggactccgacggctccttcttcctgtactccaagctgaccgtggacaagtcccggtggcagcagggcaacgtgttctcctgctccgtgatgcacgaggccctgcacaaccactacacccagaagagcctctccctgtccccgggtaaa

SEQ ID NO: 3401 - DNA, 1350 bp, Artificial Sequence
  Description of Artificial Sequence: Synthetic polynucleotide
caggtccagctggtccagagcggagcagaagtgaagaaacccggaagtagcgtgaaggtgtcatgcaaggcaagcggcggaacatttagtgattacgtgatctcctgggtccgacaggctccaggacagggactggagtggatgggggaaattttccctagatcaggaagcacctactataacgagaagtttaaaggccgcgccaccatcacagcagacaagtccacttctaccgcctacatggagctgagctccctgcggagcgaagacaccgccgtctactattgcgctagagattactatgggacatctttcgccatggactattggggacagggcacactggtgactgtctctagtgcctccaccaagggcccttccgtgttccctctggccccttcctccaagtccacctccggcggcaccgccgctctgggctgcctggtgaaggactacttccctgagcctgtgaccgtgtcctggaactctggcgccctgaccagcggcgtgcacaccttccctgccgtgctgcagtcctccggcctgtactccctgtcctccgtggtgaccgtgccttcctcctccctgggcacccagacctacatctgcaacgtgaaccacaagccttccaacaccaaggtggacaagaaggtggagcctaagtcctgcgacaagacccacacgtgccctccatgcccagctcccgagctgctgggcggaccaagcgtgtttctgttccctcctaagcctaaggacaccctgatgatctcccggacccctgaggtgacgtgcgtggtggtggacgtgtcccacgaggacccagaggtgaagttcaattggtacgtggacggcgtggaggtgcacaacgccaagaccaagcctcgggaggaacagtacaactccacctaccgggtggtgtctgtgctgaccgtgctgcaccaggactggctgaacggcaaggaatacaagtgcaaagtctccaacaaggccctgcctgcccccatcgaaaagaccatctccaaggccaagggccagcctcgcgagcctcaggtgtacaccctgcctccaagcagggaggaaatgaccaagaaccaggtgtccctgacctgtctggtgaagggcttctacccttccgatatcgccgtggagtgggagtccaacggccagcctgagaacaactacaagaccacccctcctgtgctggactccgacggctccttcttcctgtactccaagctgaccgtggacaagtcccggtggcagcagggcaacgtgttctcctgctccgtgatgcacgaggccctgcacaaccactacacccagaagagcctctccctgtccccgggtaaa

SEQ ID NO: 3402 - DNA, 1350 bp, Artificial Sequence
  Description of Artificial Sequence: Synthetic polynucleotide
caggtccagctggtccagagcggagcagaagtgaagaaacccggaagtagcgtgaaggtgtcatgcaaggcaagcggcggaacatttagtgattacgtgatctcctgggtccgacaggctccaggacagggactggagtggatgggggaaattttccctagatcaggaagcacctactataacgagaagtttaaaggccgcgtgaccctgacagcagacaagtccacttctaccgcctacatggagctgagctccctgcggagcgaagacaccgccgtctactattgcgctagagattactatgggacatctttcgccatggactattggggacagggcacactggtgactgtctctagtgcctccaccaagggcccttccgtgttccctctggccccttcctccaagtccacctccggcggcaccgccgctctgggctgcctggtgaaggactacttccctgagcctgtgaccgtgtcctggaactctggcgccctgaccagcggcgtgcacaccttccctgccgtgctgcagtcctccggcctgtactccctgtcctccgtggtgaccgtgccttcctcctccctgggcacccagacctacatctgcaacgtgaaccacaagccttccaacaccaaggtggacaagaaggtggagcctaagtcctgcgacaagacccacacgtgccctccatgcccagctcccgagctgctgggcggaccaagcgtgtttctgttccctcctaagcctaaggacaccctgatgatctcccggacccctgaggtgacgtgcgtggtggtggacgtgtcccacgaggacccagaggtgaagttcaattggtacgtggacggcgtggaggtgcacaacgccaagaccaagcctcgggaggaacagtacaactccacctaccgggtggtgtctgtgctgaccgtgctgcaccaggactggctgaacggcaaggaatacaagtgcaaagtctccaacaaggccctgcctgcccccatcgaaaagaccatctccaaggccaagggccagcctcgcgagcctcaggtgtacaccctgcctccaagcagggaggaaatgaccaagaaccaggtgtccctgacctgtctggtgaagggcttctacccttccgatatcgccgtggagtgggagtccaacggccagcctgagaacaactacaagaccacccctcctgtgctggactccgacggctccttcttcctgtactccaagctgaccgtggacaagtcccggtggcagcagggcaacgtgttctcctgctccgtgatgcacgaggccctgcacaaccactacacccagaagagcctctccctgtccccgggtaaa

SEQ ID NO: 3403 - DNA, 1350 bp, Artificial Sequence
  Description of Artificial Sequence: Synthetic polynucleotide
caggtccagctggtccagagcggagcagaagtgaagaaacccggaagtagcgtgaaggtgtcatgcaaggcaagcggcggaacatttagtgattacgtgatctcctgggtccgacaggctccaggacagggactggagtggatgggggaaattttccctagatcaggaagcacctactataacgagaagtttaaaggccgcgtgaccatcacagcagacaagtccacttctaccgcctacatggagctgagctccctgcggagcgaagacaccgccgtctatttctgcgctagagattactatgggacatctttcgccatggactattggggacagggcacactggtgactgtctctagtgcctccaccaagggcccttccgtgttccctctggccccttcctccaagtccacctccggcggcaccgccgctctgggctgcctggtgaaggactacttccctgagcctgtgaccgtgtcctggaactctggcgccctgaccagcggcgtgcacaccttccctgccgtgctgcagtcctccggcctgtactccctgtcctccgtggtgaccgtgccttcctcctccctgggcacccagacctacatctgcaacgtgaaccacaagccttccaacaccaaggtggacaagaaggtggagcctaagtcctgcgacaagacccacacgtgccctccatgcccagctcccgagctgctgggcggaccaagcgtgtttctgttccctcctaagcctaaggacaccctgatgatctcccggacccctgaggtgacgtgcgtggtggtggacgtgtcccacgaggacccagaggtgaagttcaattggtacgtggacggcgtggaggtgcacaacgccaagaccaagcctcgggaggaacagtacaactccacctaccgggtggtgtctgtgctgaccgtgctgcaccaggactggctgaacggcaaggaatacaagtgcaaagtctccaacaaggccctgcctgcccccatcgaaaagaccatctccaaggccaagggccagcctcgcgagcctcaggtgtacaccctgcctccaagcagggaggaaatgaccaagaaccaggtgtccctgacctgtctggtgaagggcttctacccttccgatatcgccgtggagtgggagtccaacggccagcctgagaacaactacaagaccacccctcctgtgctggactccgacggctccttcttcctgtactccaagctgaccgtggacaagtcccggtggcagcagggcaacgtgttctcctgctccgtgatgcacgaggccctgcacaaccactacacccagaagagcctctccctgtccccgggtaaa

SEQ ID NO: 3404 - DNA, 1350 bp, Artificial Sequence
  Description of Artificial Sequence: Synthetic polynucleotide
caggtccagctggtccagagcggagcagaagtgaagaaacccggaagtagcgtgaaggtgtcatgcaaggcaagcgggtatatttttagtgattacgtgatctcctgggtccgacaggctccaggacagggactggagtggatgggggaaattttccctagatcaggaagcacctactataacgagaagtttaaaggccgcgtgaccatcacagcagacaagtccacttctaccgcctacatggagctgagctccctgcggagcgaagacaccgccgtctactattgcgctagagattactatgggacatctttcgccatggactattggggacagggcacactggtgactgtctctagtgcctccaccaagggcccttccgtgttccctctggccccttcctccaagtccacctccggcggcaccgccgctctgggctgcctggtgaaggactacttccctgagcctgtgaccgtgtcctggaactctggcgccctgaccagcggcgtgcacaccttccctgccgtgctgcagtcctccggcctgtactccctgtcctccgtggtgaccgtgccttcctcctccctgggcacccagacctacatctgcaacgtgaaccacaagccttccaacaccaaggtggacaagaaggtggagcctaagtcctgcgacaagacccacacgtgccctccatgcccagctcccgagctgctgggcggaccaagcgtgtttctgttccctcctaagcctaaggacaccctgatgatctcccggacccctgaggtgacgtgcgtggtggtggacgtgtcccacgaggacccagaggtgaagttcaattggtacgtggacggcgtggaggtgcacaacgccaagaccaagcctcgggaggaacagtacaactccacctaccgggtggtgtctgtgctgaccgtgctgcaccaggactggctgaacggcaaggaatacaagtgcaaagtctccaacaaggccctgcctgcccccatcgaaaagaccatctccaaggccaagggccagcctcgcgagcctcaggtgtacaccctgcctccaagcagggaggaaatgaccaagaaccaggtgtccctgacctgtctggtgaagggcttctacccttccgatatcgccgtggagtgggagtccaacggccagcctgagaacaactacaagaccacccctcctgtgctggactccgacggctccttcttcctgtactccaagctgaccgtggacaagtcccggtggcagcagggcaacgtgttctcctgctccgtgatgcacgaggccctgcacaaccactacacccagaagagcctctccctgtccccgggtaaa

SEQ ID NO: 3405 - DNA, 1350 bp, Artificial Sequence
  Description of Artificial Sequence: Synthetic polynucleotide
caggtccagctgcagcagagcggccccgaactggtcaaacccggaacctccgtgaagatgccttgtaaagcctcaggatacattttcaccgattacgtgatctcttgggtcaaacagcgaacaggacagggactggagtggatcggggaaattttccccagatccggatctacttactataacgagaagtttaaaggcaaggccaccctgacagctgacaagagctccaatacagcttacatgcagctgtctagtgtgactagtgaagactcagcagtctatttctgcgccagggattactatgggacaagttttgccatggactattggggacagggcacttccgtgaccgtctcaagcgcctccaccaagggcccttccgtgttccctctggccccttcctccaagtccacctccggcggcaccgccgctctgggctgcctggtgaaggactacttccctgagcctgtgaccgtgtcctggaactctggcgccctgaccagcggcgtgcacaccttccctgccgtgctgcagtcctccggcctgtactccctgtcctccgtggtgaccgtgccttcctcctccctgggcacccagacctacatctgcaacgtgaaccacaagccttccaacaccaaggtggacaagaaggtggagcctaagtcctgcgacaagacccacacgtgccctccatgcccagctcccgagctgctgggcggaccaagcgtgtttctgttccctcctaagcctaaggacaccctgatgatctcccggacccctgaggtgacgtgcgtggtggtggacgtgtcccacgaggacccagaggtgaagttcaattggtacgtggacggcgtggaggtgcacaacgccaagaccaagcctcgggaggaacagtacaactccacctaccgggtggtgtctgtgctgaccgtgctgcaccaggactggctgaacggcaaggaatacaagtgcaaagtctccaacaaggccctgcctgcccccatcgaaaagaccatctccaaggccaagggccagcctcgcgagcctcaggtgtacaccctgcctccaagcagggaggaaatgaccaagaaccaggtgtccctgacctgtctggtgaagggcttctacccttccgatatcgccgtggagtgggagtccaacggccagcctgagaacaactacaagaccacccctcctgtgctggactccgacggctccttcttcctgtactccaagctgaccgtggacaagtcccggtggcagcagggcaacgtgttctcctgctccgtgatgcacgaggccctgcacaaccactacacccagaagagcctctccctgtccccgggtaaa

SEQ ID NO: 3406 - DNA, 1332 bp, Mus musculus
caggtccaattgcagcagtctggacctgagctggtgaagcctgggacttcagtgaagatgccctgtaaggcttctggatacatattcactgactatgtcataagctgggtgaagcagagaactggacagggccttgagtggattggagagatttttcctagaagtggtagtacttactacaatgagaagttcaagggcaaggccacactgactgcagacaaatcctccaacacagcctacatgcagctcagcagcgtgacatctgaggactctgcggtctatttctgtgcaagagattactacggtacttcatttgctatggactactggggtcaaggaacctcagtcaccgtctcctcagccaaaacgacacccccatctgtctatccactggcccctggatctgctgcccaaactaactccatggtgaccctgggatgcctggtcaagggctatttccctgagccagtgacagtgacctggaactctggatccctgtccagcggtgtgcacaccttcccagctgtcctgcagtctgacctctacactctgagcagctcagtgactgtcccctccagcacctggcccagccagaccgtcacctgcaacgttgcccacccggccagcagcaccaaggtggacaagaaaattgtgcccagggattgtggttgtaagccttgcatatgtacagtcccagaagtatcatctgtcttcatcttccccccaaagcccaaggatgtgctcaccattactctgactcctaaggtcacgtgtgttgtggtagacatcagcaaggatgatcccgaggtccagttcagctggtttgtagatgatgtggaggtgcacacagctcagacgaaaccccgggaggagcagatcaacagcactttccgttcagtcagtgaacttcccatcatgcaccaggactggctcaatggcaaggagttcaaatgcagggtcaacagtgcagctttccctgcccccatcgagaaaaccatctccaaaaccaaaggcagaccgaaggctccacaggtgtacaccattccacctcccaaggagcagatggccaaggataaagtcagtctgacctgcatgataacaaacttcttccctgaagacattactgtggagtggcagtggaatgggcagccagcggagaactacaagaacactcagcccatcatggacacagatggctcttacttcgtctacagcaagctcaatgtgcagaagagcaactgggaggcaggaaatactttcacctgctctgtgttacatgagggcctgcacaaccaccatactgagaagagcctctcccactctcctggtaaa

SEQ ID NO: 3407 - DNA, 1350 bp, Artificial Sequence; identical to SEQ ID NO: 3405
  Description of Artificial Sequence: Synthetic polynucleotide

SEQ ID NO: 3408 - DNA, 1341 bp, Artificial Sequence
  Description of Artificial Sequence: Synthetic polynucleotide
caggtccagctggtccagagcggagcagaagtgaagaaacccggaagtagcgtgaaggtgtcatgcaaggcaagcggcggaacatttagtgattacgtgatctcctgggtccgacaggctccaggacagggactggagtggatgggggaaattttccctagatcaggaagcacctactataacgagaagtttaaaggccgcgtgaccatcacagcagacaagtccacttctaccgcctacatggagctgagctccctgcggagcgaagacaccgccgtctactattgcgctagagattactatgggacatctttcgccatggactattggggacagggcacactggtgactgtctctagtgcctccaccaagggcccatccgtcttccccctggcgccctgctccaggagcacctccgagagcacagccgccctgggctgcctggtcaaggactacttccccgaaccggtgacggtgtcgtggaactcaggcgccctgaccagcggcgtgcacaccttcccggctgtcctacagtcctcaggactctactccctcagcagcgtggtgaccgtgccctccagcagcttgggcacgaagacctacacgtgcaacgtagatcacaagcccagcaacaccaaggtggacaagagagttgagtccaaatatggtcccccatgcccaccatgcccagcacctgagttcctggggggaccatcagtcttcctgttccccccaaaacccaaggacactctcatgatctcccggacccctgaggtcacgtgcgtggtggtggacgtgagccaggaagaccccgaggtccagttcaactggtacgtggatggcgtggaggtgcataatgccaagacaaagccgcgggaggagcagttcaacagcacgtaccgtgtggtcagcgtcctcaccgtcctgcaccaggactggctgaacggcaaggagtacaagtgcaaggtctccaacaaaggcctcccgtcctccatcgagaaaaccatctccaaagccaaagggcagccccgagagccacaggtgtacaccctgcccccatcccaggaggagatgaccaagaaccaggtcagcctgacgtgcctggtcaaaggcttctaccccagcgacatcgccgtggagtgggagagcaatgggcagccggagaacaactacaagaccacgcctcccgtgctggactccgacggctccttcttcctctacagcaggctaaccgtggacaagagcagatggcaggaggggaatgtcttctcatgctccgtgatgcatgaggctctgcacaaccactacacacagaagagcctctccctgtctctgggtaaa

SEQ ID NO: 3409 - DNA, 1341 bp, Artificial Sequence
  Description of Artificial Sequence: Synthetic polynucleotide
caggtccagctggtgcagtcaggccccgaagtgaagaagcccggaagtagtgtcaaggtcccatgtaaagcatcagggtatatttttactgattacgtgatcagctgggtcaaacaggcaccaggacagggactggagtggatcggggaaattttccctagatcaggaagcacatactataacgagaagtttaaaggcaaggccaccctgacagctgacaagtccacttctaccgcttacatggagctgagctccctgcggagtgaagacaccgcagtgtatttctgcgccagagattactatgggacatcctttgcaatggactattggggacagggcacactggtgactgtctctagtgcctccaccaagggcccatccgtcttccccctggcgccctgctccaggagcacctccgagagcacagccgccctgggctgcctggtcaaggactacttccccgaaccggtgacggtgtcgtggaactcaggcgccctgaccagcggcgtgcacaccttcccggctgtcctacagtcctcaggactctactccctcagcagcgtggtgaccgtgccctccagcagcttgggcacgaagacctacacgtgcaacgtagatcacaagcccagcaacaccaaggtggacaagagagttgagtccaaatatggtcccccatgcccaccatgcccagcacctgagttcctggggggaccatcagtcttcctgttccccccaaaacccaaggacactctcatgatctcccggacccctgaggtcacgtgcgtggtggtggacgtgagccaggaagaccccgaggtccagttcaactggtacgtggatggcgtggaggtgcataatgccaagacaaagccgcgggaggagcagttcaacagcacgtaccgtgtggtcagcgtcctcaccgtcctgcaccaggactggctgaacggcaaggagtacaagtgcaaggtctccaacaaaggcctcccgtcctccatcgagaaaaccatctccaaagccaaagggcagccccgagagccacaggtgtacaccctgcccccatcccaggaggagatgaccaagaaccaggtcagcctgacgtgcctggtcaaaggcttctaccccagcgacatcgccgtggagtgggagagcaatgggcagccggagaacaactacaagaccacgcctcccgtgctggactccgacggctccttcttcctctacagcaggctaaccgtggacaagagcagatggcaggaggggaatgtcttctcatgctccgtgatgcatgaggctctgcacaaccactacacacagaagagcctctccctgtctctgggtaaa

SEQ ID NO: 3410 - DNA, 1341 bp, Artificial Sequence
  Description of Artificial Sequence: Synthetic polynucleotide
caggtccagctggtccagagcggacccgaagtgaagaaacccggaagtagcgtgaaggtgccatgcaaggcaagcggcggaacatttagtgattacgtgatctcctgggtccgacaggctccaggacagggactggagtggatgggggaaattttccctagatcaggaagcacctactataacgagaagtttaaaggccgcgtgaccatcacagcagacaagtccacttctaccgcctacatggagctgagctccctgcggagcgaagacaccgccgtctactattgcgctagagattactatgggacatctttcgccatggactattggggacagggcacactggtgactgtctctagtgcctccaccaagggcccatccgtcttccccctggcgccctgctccaggagcacctccgagagcacagccgccctgggctgcctggtcaaggactacttccccgaaccggtgacggtgtcgtggaactcaggcgccctgaccagcggcgtgcacaccttcccggctgtcctacagtcctcaggactctactccctcagcagcgtggtgaccgtgccctccagcagcttgggcacgaagacctacacgtgcaacgtagatcacaagcccagcaacaccaaggtggacaagagagttgagtccaaatatggtcccccatgcccaccatgcccagcacctgagttcctggggggaccatcagtcttcctgttccccccaaaacccaaggacactctcatgatctcccggacccctgaggtcacgtgcgtggtggtggacgtgagccaggaagaccccgaggtccagttcaactggtacgtggatggcgtggaggtgcataatgccaagacaaagccgcgggaggagcagttcaacagcacgtaccgtgtggtcagcgtcctcaccgtcctgcaccaggactggctgaacggcaaggagtacaagtgcaaggtctccaacaaaggcctcccgtcctccatcgagaaaaccatctccaaagccaaagggcagccccgagagccacaggtgtacaccctgcccccatcccaggaggagatgaccaagaaccaggtcagcctgacgtgcctggtcaaaggcttctaccccagcgacatcgccgtggagtgggagagcaatgggcagccggagaacaactacaagaccacgcctcccgtgctggactccgacggctccttcttcctctacagcaggctaaccgtggacaagagcagatggcaggaggggaatgtcttctcatgctccgtgatgcatgaggctctgcacaaccactacacacagaagagcctctccctgtctctgggtaaa

SEQ ID NO: 3411 - DNA, 1341 bp, Artificial Sequence
  Description of Artificial Sequence: Synthetic polynucleotide
caggtccagctggtccagagcggagcagaagtgaagaaacccggaagtagcgtgaaggtgtcatgcaaggcaagcgggtatacatttagtgattacgtgatctcctgggtccgacaggctccaggacagggactggagtggatgggggaaattttccctagatcaggaagcacctactataacgagaagtttaaaggccgcgtgaccatcacagcagacaagtccacttctaccgcctacatggagctgagctccctgcggagcgaagacaccgccgtctactattgcgctagagattactatgggacatctttcgccatggactattggggacagggcacactggtgactgtctctagtgcctccaccaagggcccatccgtcttccccctggcgccctgctccaggagcacctccgagagcacagccgccctgggctgcctggtcaaggactacttccccgaaccggtgacggtgtcgtggaactcaggcgccctgaccagcggcgtgcacaccttcccggctgtcctacagtcctcaggactctactccctcagcagcgtggtgaccgtgccctccagcagcttgggcacgaagacctacacgtgcaacgtagatcacaagcccagcaacaccaaggtggacaagagagttgagtccaaatatggtcccccatgcccaccatgcccagcacctgagttcctggggggaccatcagtcttcctgttccccccaaaacccaaggacactctcatgatctcccggacccctgaggtcacgtgcgtggtggtggacgtgagccaggaagaccccgaggtccagttcaactggtacgtggatggcgtggaggtgcataatgccaagacaaagccgcgggaggagcagttcaacagcacgtaccgtgtggtcagcgtcctcaccgtcctgcaccaggactggctgaacggcaaggagtacaagtgcaaggtctccaacaaaggcctcccgtcctccatcgagaaaaccatctccaaagccaaagggcagccccgagagccacaggtgtacaccctgcccccatcccaggaggagatgaccaagaaccaggtcagcctgacgtgcctggtcaaaggcttctaccccagcgacatcgccgtggagtgggagagcaatgggcagccggagaacaactacaagaccacgcctcccgtgctggactccgacggctccttcttcctctacagcaggctaaccgtggacaagagcagatggcaggaggggaatgtcttctcatgctccgtgatgcatgaggctctgcacaaccactacacacagaagagcctctccctgtctctgggtaaa

SEQ ID NO: 3412 - DNA, 1341 bp, Artificial Sequence
  Description of Artificial Sequence: Synthetic polynucleotide
caggtccagctggtccagagcggagcagaagtgaagaaacccggaagtagcgtgaaggtgtcatgcaaggcaagcggcggaatttttagtgattacgtgatctcctgggtccgacaggctccaggacagggactggagtggatgggggaaattttccctagatcaggaagcacctactataacgagaagtttaaaggccgcgtgaccatcacagcagacaagtccacttctaccgcctacatggagctgagctccctgcggagcgaagacaccgccgtctactattgcgctagagattactatgggacatctttcgccatggactattggggacagggcacactggtgactgtctctagtgcctccaccaagggcccatccgtcttccccctggcgccctgctccaggagcacctccgagagcacagccgccctgggctgcctggtcaaggactacttccccgaaccggtgacggtgtcgtggaactcaggcgccctgaccagcggcgtgcacaccttcccggctgtcctacagtcctcaggactctactccctcagcagcgtggtgaccgtgccctccagcagcttgggcacgaagacctacacgtgcaacgtagatcacaagcccagcaacaccaaggtggacaagagagttgagtccaaatatggtcccccatgcccaccatgcccagcacctgagttcctggggggaccatcagtcttcctgttccccccaaaacccaaggacactctcatgatctcccggacccctgaggtcacgtgcgtggtggtggacgtgagccaggaagaccccgaggtccagttcaactggtacgtggatggcgtggaggtgcataatgccaagacaaagccgcgggaggagcagttcaacagcacgtaccgtgtggtcagcgtcctcaccgtcctgcaccaggactggctgaacggcaaggagtacaagtgcaaggtctccaacaaaggcctcccgtcctccatcgagaaaaccatctccaaagccaaagggcagccccgagagccacaggtgtacaccctgcccccatcccaggaggagatgaccaagaaccaggtcagcctgacgtgcctggtcaaaggcttctaccccagcgacatcgccgtggagtgggagagcaatgggcagccggagaacaactacaagaccacgcctcccgtgctggactccgacggctccttcttcctctacagcaggctaaccgtggacaagagcagatggcaggaggggaatgtcttctcatgctccgtgatgcatgaggctctgcacaaccactacacacagaagagcctctccctgtctctgggtaaa

SEQ ID NO: 3413 - DNA, 1341 bp, Artificial Sequence
  Description of Artificial Sequence: Synthetic polynucleotide
caggtccagctggtccagagcggagcagaagtgaagaaacccggaagtagcgtgaaggtgtcatgcaaggcaagcggcggaacatttactgattacgtgatctcctgggtccgacaggctccaggacagggactggagtggatgggggaaattttccctagatcaggaagcacctactataacgagaagtttaaaggccgcgtgaccatcacagcagacaagtccacttctaccgcctacatggagctgagctccctgcggagcgaagacaccgccgtctactattgcgctagagattactatgggacatctttcgccatggactattggggacagggcacactggtgactgtctctagtgcctccaccaagggcccatccgtcttccccctggcgccctgctccaggagcacctccgagagcacagccgccctgggctgcctggtcaaggactacttccccgaaccggtgacggtgtcgtggaactcaggcgccctgaccagcggcgtgcacaccttcccggctgtcctacagtcctcaggactctactccctcagcagcgtggtgaccgtgccctccagcagcttgggcacgaagacctacacgtgcaacgtagatcacaagcccagcaacaccaaggtggacaagagagttgagtccaaatatggtcccccatgcccaccatgcccagcacctgagttcctggggggaccatcagtcttcctgttccccccaaaacccaaggacactctcatgatctcccggacccctgaggtcacgtgcgtggtggtggacgtgagccaggaagaccccgaggtccagttcaactggtacgtggatggcgtggaggtgcataatgccaagacaaagccgcgggaggagcagttcaacagcacgtaccgtgtggtcagcgtcctcaccgtcctgcaccaggactggctgaacggcaaggagtacaagtgcaaggtctccaacaaaggcctcccgtcctccatcgagaaaaccatctccaaagccaaagggcagccccgagagccacaggtgtacaccctgcccccatcccaggaggagatgaccaagaaccaggtcagcctgacgtgcctggtcaaaggcttctaccccagcgacatcgccgtggagtgggagagcaatgggcagccggagaacaactacaagaccacgcctcccgtgctggactccgacggctccttcttcctctacagcaggctaaccgtggacaagagcagatggcaggaggggaatgtcttctcatgctccgtgatgcatgaggctctgcacaaccactacacacagaagagcctctccctgtctctgggtaaa

SEQ ID NO: 3414 - DNA, 1341 bp, Artificial Sequence
  Description of Artificial Sequence: Synthetic polynucleotide
caggtccagctggtccagagcggagcagaagtgaagaaacccggaagtagcgtgaaggtgtcatgcaaggcaagcggcggaacatttagtgattacgtgatctcctgggtcaaacaggctccaggacagggactggagtggatgggggaaattttccctagatcaggaagcacctactataacgagaagtttaaaggccgcgtgaccatcacagcagacaagtccacttctaccgcctacatggagctgagctccctgcggagcgaagacaccgccgtctactattgcgctagagattactatgggacatctttcgccatggactattggggacagggcacactggtgactgtctctagtgcctccaccaagggcccatccgtcttccccctggcgccctgctccaggagcacctccgagagcacagccgccctgggctgcctggtcaaggactacttccccgaaccggtgacggtgtcgtggaactcaggcgccctgaccagcggcgtgcacaccttcccggctgtcctacagtcctcaggactctactccctcagcagcgtggtgaccgtgccctccagcagcttgggcacgaagacctacacgtgcaacgtagatcacaagcccagcaacaccaaggtggacaagagagttgagtccaaatatggtcccccatgcccaccatgcccagcacctgagttcctggggggaccatcagtcttcctgttccccccaaaacccaaggacactctcatgatctcccggacccctgaggtcacgtgcgtggtggtggacgtgagccaggaagaccccgaggtccagttcaactggtacgtggatggcgtggaggtgcataatgccaagacaaagccgcgggaggagcagttcaacagcacgtaccgtgtggtcagcgtcctcaccgtcctgcaccaggactggctgaacggcaaggagtacaagtgcaaggtctccaacaaaggcctcccgtcctccatcgagaaaaccatctccaaagccaaagggcagccccgagagccacaggtgtacaccctgcccccatcccaggaggagatgaccaagaaccaggtcagcctgacgtgcctggtcaaaggcttctaccccagcgacatcgccgtggagtgggagagcaatgggcagccggagaacaactacaagaccacgcctcccgtgctggactccgacggctccttcttcctctacagcaggctaaccgtggacaagagcagatggcaggaggggaatgtcttctcatgctccgtgatgcatgaggctctgcacaaccactacacacagaagagcctctccctgtctctgggtaaa

SEQ ID NO: 3415 - DNA, 1341 bp, Artificial Sequence
  Description of Artificial Sequence: Synthetic polynucleotide
caggtccagctggtccagagcggagcagaagtgaagaaacccggaagtagcgtgaaggtgtcatgcaaggcaagcggcggaacatttagtgattacgtgatctcctgggtccgacaggctccaggacagggactggagtggatcggggaaattttccctagatcaggaagcacctactataacgagaagtttaaaggccgcgtgaccatcacagcagacaagtccacttctaccgcctacatggagctgagctccctgcggagcgaagacaccgccgtctactattgcgctagagattactatgggacatctttcgccatggactattggggacagggcacactggtgactgtctctagtgcctccaccaagggcccatccgtcttccccctggcgccctgctccaggagcacctccgagagcacagccgccctgggctgcctggtcaaggactacttccccgaaccggtgacggtgtcgtggaactcaggcgccctgaccagcggcgtgcacaccttcccggctgtcctacagtcctcaggactctactccctcagcagcgtggtgaccgtgccctccagcagcttgggcacgaagacctacacgtgcaacgtagatcacaagcccagcaacaccaaggtggacaagagagttgagtccaaatatggtcccccatgcccaccatgcccagcacctgagttcctggggggaccatcagtcttcctgttccccccaaaacccaaggacactctcatgatctcccggacccctgaggtcacgtgcgtggtggtggacgtgagccaggaagaccccgaggtccagttcaactggtacgtggatggcgtggaggtgcataatgccaagacaaagccgcgggaggagcagttcaacagcacgtaccgtgtggtcagcgtcctcaccgtcctgcaccaggactggctgaacggcaaggagtacaagtgcaaggtctccaacaaaggcctcccgtcctccatcgagaaaaccatctccaaagccaaagggcagccccgagagccacaggtgtacaccctgcccccatcccaggaggagatgaccaagaaccaggtcagcctgacgtgcctggtcaaaggcttctaccccagcgacatcgccgtggagtgggagagcaatgggcagccggagaacaactacaagaccacgcctcccgtgctggactccgacggctccttcttcctctacagcaggctaaccgtggacaagagcagatggcaggaggggaatgtcttctcatgctccgtgatgcatgaggctctgcacaaccactacacacagaagagcctctccctgtctctgggtaaa

SEQ ID NO: 3416 - DNA, 1341 bp, Artificial Sequence
  Description of Artificial Sequence: Synthetic polynucleotide
caggtccagctggtccagagcggagcagaagtgaagaaacccggaagtagcgtgaaggtgtcatgcaaggcaagcggcggaacatttagtgattacgtgatctcctgggtccgacaggctccaggacagggactggagtggatgggggaaattttccctagatcaggaagcacctactataacgagaagtttaaaggcaaggtgaccatcacagcagacaagtccacttctaccgcctacatggagctgagctccctgcggagcgaagacaccgccgtctactattgcgctagagattactatgggacatctttcgccatggactattggggacagggcacactggtgactgtctctagtgcctccaccaagggcccatccgtcttccccctggcgccctgctccaggagcacctccgagagcacagccgccctgggctgcctggtcaaggactacttccccgaaccggtgacggtgtcgtggaactcaggcgccctgaccagcggcgtgcacaccttcccggctgtcctacagtcctcaggactctactccctcagcagcgtggtgaccgtgccctccagcagcttgggcacgaagacctacacgtgcaacgtagatcacaagcccagcaacaccaaggtggacaagagagttgagtccaaatatggtcccccatgcccaccatgcccagcacctgagttcctggggggaccatcagtcttcctgttccccccaaaacccaaggacactctcatgatctcccggacccctgaggtcacgtgcgtggtggtggacgtgagccaggaagaccccgaggtccagttcaactggtacgtggatggcgtggaggtgcataatgccaagacaaagccgcgggaggagcagttcaacagcacgtaccgtgtggtcagcgtcctcaccgtcctgcaccaggactggctgaacggcaaggagtacaagtgcaaggtctccaacaaaggcctcccgtcctccatcgagaaaaccatctccaaagccaaagggcagccccgagagccacaggtgtacaccctgcccccatcccaggaggagatgaccaagaaccaggtcagcctgacgtgcctggtcaaaggcttctaccccagcgacatcgccgtggagtgggagagcaatgggcagccggagaacaactacaagaccacgcctcccgtgctggactccgacggctccttcttcctctacagcaggctaaccgtggacaagagcagatggcaggaggggaatgtcttctcatgctccgtgatgcatgaggctctgcacaaccactacacacagaagagcctctccctgtctctgggtaaa

SEQ ID NO: 3417 - DNA, 1341 bp, Artificial Sequence
  Description of Artificial Sequence: Synthetic polynucleotide
caggtccagctggtccagagcggagcagaagtgaagaaacccggaagtagcgtgaaggtgtcatgcaaggcaagcggcggaacatttagtgattacgtgatctcctgggtccgacaggctccaggacagggactggagtggatgggggaaattttccctagatcaggaagcacctactataacgagaagtttaaaggccgcgccaccatcacagcagacaagtccacttctaccgcctacatggagctgagctccctgcggagcgaagacaccgccgtctactattgcgctagagattactatgggacatctttcgccatggactattggggacagggcacactggtgactgtctctagtgcctccaccaagggcccatccgtcttccccctggcgccctgctccaggagcacctccgagagcacagccgccctgggctgcctggtcaaggactacttccccgaaccggtgacggtgtcgtggaactcaggcgccctgaccagcggcgtgcacaccttcccggctgtcctacagtcctcaggactctactccctcagcagcgtggtgaccgtgccctccagcagcttgggcacgaagacctacacgtgcaacgtagatcacaagcccagcaacaccaaggtggacaagagagttgagtccaaatatggtcccccatgcccaccatgcccagcacctgagttcctggggggaccatcagtcttcctgttccccccaaaacccaaggacactctcatgatctcccggacccctgaggtcacgtgcgtggtggtggacgtgagccaggaagaccccgaggtccagttcaactggtacgtggatggcgtggaggtgcataatgccaagacaaagccgcgggaggagcagttcaacagcacgtaccgtgtggtcagcgtcctcaccgtcctgcaccaggactggctgaacggcaaggagtacaagtgcaaggtctccaacaaaggcctcccgtcctccatcgagaaaaccatctccaaagccaaagggcagccccgagagccacaggtgtacaccctgcccccatcccaggaggagatgaccaagaaccaggtcagcctgacgtgcctggtcaaaggcttctaccccagcgacatcgccgtggagtgggagagcaatgggcagccggagaacaactacaagaccacgcctcccgtgctggactccgacggctccttcttcctctacagcaggctaaccgtggacaagagcagatggcaggaggggaatgtcttctcatgctccgtgatgcatgaggctctgcacaaccactacacacagaagagcctctccctgtctctgggtaaa

SEQ ID NO: 3418 - DNA, 1341 bp, Artificial Sequence
  Description of Artificial Sequence: Synthetic polynucleotide
caggtccagctggtccagagcggagcagaagtgaagaaacccggaagtagcgtgaaggtgtcatgcaaggcaagcggcggaacatttagtgattacgtgatctcctgggtccgacaggctccaggacagggactggagtggatgggggaaattttccctagatcaggaagcacctactataacgagaagtttaaaggccgcgtgaccctgacagcagacaagtccacttctaccgcctacatggagctgagctccctgcggagcgaagacaccgccgtctactattgcgctagagattactatgggacatctttcgccatggactattggggacagggcacactggtgactgtctctagtgcctccaccaagggcccatccgtcttccccctggcgccctgctccaggagcacctccgagagcacagccgccctgggctgcctggtcaaggactacttccccgaaccggtgacggtgtcgtggaactcaggcgccctgaccagcggcgtgcacaccttcccggctgtcctacagtcctcaggactctactccctcagcagcgtggtgaccgtgccctccagcagcttgggcacgaagacctacacgtgcaacgtagatcacaagcccagcaacaccaaggtggacaagagagttgagtccaaatatggtcccccatgcccaccatgcccagcacctgagttcctggggggaccatcagtcttcctgttccccccaaaacccaaggacactctcatgatctcccggacccctgaggtcacgtgcgtggtggtggacgtgagccaggaagaccccgaggtccagttcaactggtacgtggatggcgtggaggtgcataatgccaagacaaagccgcgggaggagcagttcaacagcacgtaccgtgtggtcagcgtcctcaccgtcctgcaccaggactggctgaacggcaaggagtacaagtgcaaggtctccaacaaaggcctcccgtcctccatcgagaaaaccatctccaaagccaaagggcagccccgagagccacaggtgtacaccctgcccccatcccaggaggagatgaccaagaaccaggtcagcctgacgtgcctggtcaaaggcttctaccccagcgacatcgccgtggagtgggagagcaatgggcagccggagaacaactacaagaccacgcctcccgtgctggactccgacggctccttcttcctctacagcaggctaaccgtggacaagagcagatggcaggaggggaatgtcttctcatgctccgtgatgcatgaggctctgcacaaccactacacacagaagagcctctccctgtctctgggtaaa

SEQ ID NO: 3419 - DNA, 1341 bp, Artificial Sequence
  Description of Artificial Sequence: Synthetic polynucleotide
caggtccagctggtccagagcggagcagaagtgaagaaacccggaagtagcgtgaaggtgtcatgcaaggcaagcggcggaacatttagtgattacgtgatctcctgggtccgacaggctccaggacagggactggagtggatgggggaaattttccctagatcaggaagcacctactataacgagaagtttaaaggccgcgtgaccatcacagcagacaagtccacttctaccgcctacatggagctgagctccctgcggagcgaagacaccgccgtctatttctgcgctagagattactatgggacatctttcgccatggactattggggacagggcacactggtgactgtctctagtgcctccaccaagggcccatccgtcttccccctggcgccctgctccaggagcacctccgagagcacagccgccctgggctgcctggtcaaggactacttccccgaaccggtgacggtgtcgtggaactcaggcgccctgaccagcggcgtgcacaccttcccggctgtcctacagtcctcaggactctactccctcagcagcgtggtgaccgtgccctccagcagcttgggcacgaagacctacacgtgcaacgtagatcacaagcccagcaacaccaaggtggacaagagagttgagtccaaatatggtcccccatgcccaccatgcccagcacctgagttcctggggggaccatcagtcttcctgttccccccaaaacccaaggacactctcatgatctcccggacccctgaggtcacgtgcgtggtggtggacgtgagccaggaagaccccgaggtccagttcaactggtacgtggatggcgtggaggtgcataatgccaagacaaagccgcgggaggagcagttcaacagcacgtaccgtgtggtcagcgtcctcaccgtcctgcaccaggactggctgaacggcaaggagtacaagtgcaaggtctccaacaaaggcctcccgtcctccatcgagaaaaccatctccaaagccaaagggcagccccgagagccacaggtgtacaccctgcccccatcccaggaggagatgaccaagaaccaggtcagcctgacgtgcctggtcaaaggcttctaccccagcgacatcgccgtggagtgggagagcaatgggcagccggagaacaactacaagaccacgcctcccgtgctggactccgacggctccttcttcctctacagcaggctaaccgtggacaagagcagatggcaggaggggaatgtcttctcatgctccgtgatgcatgaggctctgcacaaccactacacacagaagagcctctccctgtctctgggtaaa

SEQ ID NO: 3420 - DNA, 1341 bp, Artificial Sequence
  Description of Artificial Sequence: Synthetic polynucleotide
caggtccagctggtccagagcggagcagaagtgaagaaacccggaagtagcgtgaaggtgtcatgcaaggcaagcgggtatatttttagtgattacgtgatctcctgggtccgacaggctccaggacagggactggagtggatgggggaaattttccctagatcaggaagcacctactataacgagaagtttaaaggccgcgtgaccatcacagcagacaagtccacttctaccgcctacatggagctgagctccctgcggagcgaagacaccgccgtctactattgcgctagagattactatgggacatctttcgccatggactattggggacagggcacactggtgactgtctctagtgcctccaccaagggcccatccgtcttccccctggcgccctgctccaggagcacctccgagagcacagccgccctgggctgcctggtcaaggactacttccccgaaccggtgacggtgtcgtggaactcaggcgccctgaccagcggcgtgcacaccttcccggctgtcctacagtcctcaggactctactccctcagcagcgtggtgaccgtgccctccagcagcttgggcacgaagacctacacgtgcaacgtagatcacaagcccagcaacaccaaggtggacaagagagttgagtccaaatatggtcccccatgcccaccatgcccagcacctgagttcctggggggaccatcagtcttcctgttccccccaaaacccaaggacactctcatgatctcccggacccctgaggtcacgtgcgtggtggtggacgtgagccaggaagaccccgaggtccagttcaactggtacgtggatggcgtggaggtgcataatgccaagacaaagccgcgggaggagcagttcaacagcacgtaccgtgtggtcagcgtcctcaccgtcctgcaccaggactggctgaacggcaaggagtacaagtgcaaggtctccaacaaaggcctcccgtcctccatcgagaaaaccatctccaaagccaaagggcagccccgagagccacaggtgtacaccctgcccccatcccaggaggagatgaccaagaaccaggtcagcctgacgtgcctggtcaaaggcttctaccccagcgacatcgccgtggagtgggagagcaatgggcagccggagaacaactacaagaccacgcctcccgtgctggactccgacggctccttcttcctctacagcaggctaaccgtggacaagagcagatggcaggaggggaatgtcttctcatgctccgtgatgcatgaggctctgcacaaccactacacacagaagagcctctccctgtctctgggtaaa

SEQ ID NO: 3421 - DNA, 1341 bp, Artificial Sequence
  Description of Artificial Sequence: Synthetic polynucleotide
caggtccagctgcagcagagcggccccgaactggtcaaacccggaacctccgtgaagatgccttgtaaagcctcaggatacattttcaccgattacgtgatctcttgggtcaaacagcgaacaggacagggactggagtggatcggggaaattttccccagatccggatctacttactataacgagaagtttaaaggcaaggccaccctgacagctgacaagagctccaatacagcttacatgcagctgtctagtgtgactagtgaagactcagcagtctatttctgcgccagggattactatgggacaagttttgccatggactattggggacagggcacttccgtgaccgtctcaagcgcctccaccaagggcccatccgtcttccccctggcgccctgctccaggagcacctccgagagcacagccgccctgggctgcctggtcaaggactacttccccgaaccggtgacggtgtcgtggaactcaggcgccctgaccagcggcgtgcacaccttcccggctgtcctacagtcctcaggactctactccctcagcagcgtggtgaccgtgccctccagcagcttgggcacgaagacctacacgtgcaacgtagatcacaagcccagcaacaccaaggtggacaagagagttgagtccaaatatggtcccccatgcccaccatgcccagcacctgagttcctggggggaccatcagtcttcctgttccccccaaaacccaaggacactctcatgatctcccggacccctgaggtcacgtgcgtggtggtggacgtgagccaggaagaccccgaggtccagttcaactggtacgtggatggcgtggaggtgcataatgccaagacaaagccgcgggaggagcagttcaacagcacgtaccgtgtggtcagcgtcctcaccgtcctgcaccaggactggctgaacggcaaggagtacaagtgcaaggtctccaacaaaggcctcccgtcctccatcgagaaaaccatctccaaagccaaagggcagccccgagagccacaggtgtacaccctgcccccatcccaggaggagatgaccaagaaccaggtcagcctgacgtgcctggtcaaaggcttctaccccagcgacatcgccgtggagtgggagagcaatgggcagccggagaacaactacaagaccacgcctcccgtgctggactccgacggctccttcttcctctacagcaggctaaccgtggacaagagcagatggcaggaggggaatgtcttctcatgctccgtgatgcatgaggctctgcacaaccactacacacagaagagcctctccctgtctctgggtaaa

SEQ ID NO: 3422 - protein, 595 aa, Artificial Sequence
  Description of Artificial Sequence: Synthetic polypeptide
  heavy chain: amino acid sequence
MGWSCIILFLVSTATGVHSQVQLQQPGAELVMPGASVKLSCKASGYTFTSYWMHWVKQRPGQGLEWIGEIDPSDSYTNYNQKFKGKSTLTVDKSSSTAYMQLSSLTSEDSAVYYCARSGDGSSPWYFDVWGTGTTVTVSSESQSFPNVFPLVSCESPLSDKNLVAMGCLARDFLPSTISFTWNYQNNTEVIQGIRTFPTLRTGGKYLATSQVLLSPKSILEGSDEYLVCKIHYGGKNKDLHVPIPAVAEMNPNVNVFVPPRDGFSGPAPRKSKLICEATNFTPKPITVSWLKDGKLVESGFTTDPVTIENKGSTPQTYKVISTLTISEIDWLNLNVYTCRVDHRGLTFLKNVSSTCAASPSTDILTFTIPPSFADIFLSKSANLTCLVSNLATYETLNISWASQSGEPLETKIKIMESHPNGTFSAKGVASVCVEDWNNRKEFVCTVTHRDLPSPQKKFISKPNEVHKHPPAVYLLPPAREQLNLRESATVTCLVKGFSPADISVQWLQRGQLLPQEKYVTSAPMPEPGAPGFYFTHSILTVTEEEWNSGETYTCVVGHEALPHLVTERTVDKSTGKPTLYNVSLIMSDTGGTCY

SEQ ID NO: 3423 - protein, 445 aa, Artificial Sequence; identical to SEQ ID NO: 2982
  Description of Artificial Sequence: Synthetic polypeptide

SEQ ID NO: 3424 - protein, 163 aa, Mus musculus
MGVSLQLLGTQDLTMRWSCIILFLVATATGVNSQVQLQQPGAELVKPGASVKMSCKASGYTFTSYWIHWVKQRPGQGLEWIGVIDPSDSYTRYNQKFKGKATLTVDTSSSTAYMQLSSLTSEDSAVYYCTTWEVDYWGQGTTLTVSSAKTTPPSVYPLAPGSL

SEQ ID NO: 3425 - protein, 149 aa, Mus musculus
MKVLSLLYLLTAIPGILSDVQLQESGPGLVKPSQSLSLTCSVTGYSITSGYYWNWIRQFPGNKLEWMGYISYDGSNNYNPSLKNRISITRDTSKNQFFLKLNSVTTEDTATYYCAGLRRDAYWGQGTLVTVSAAKTTPPSVYPLAPGSL

SEQ ID NO: 3426 - protein, 152 aa, Mus musculus
MKCSWVIFFLMAVVTGVTSEVQLQQSGAELVKPGASVKLSCTASGFNIKDTYMHWVKQRPEQGLEWIGRIDPANGNTRYDPKFQGKATITSDTSSNTAYLQLSSLTSEDTAVYYCARRVGYYFDYWGQGTTLTVSSAKTTPPSVYPLVPGSL

SEQ ID NO: 3427 - protein, 450 aa, Artificial Sequence
  Description of Artificial Sequence: Synthetic polypeptide
  chimaera
QVQLVESGGGAVQPGGSLRLSCAASGFTFSDYAMHWVRQAPGKGLQWVAVISYEGTYKYYADSVKGRFTISRDNSKNTLNLQMSSLRVEDTAVYFCVKARAFASGQRSTSTVPDYWGQGTLVTVSSAKTTPPSVYPLAPGSAAQTNSMVTLGCLVKGYFPEPVTVTWNSGSLSSGVHTFPAVLQSDLYTLSSSVTVPSSTWPSETVTCNVAHPASSTKVDKKIVPRDCGCKPCICTVPEVSSVFIFPPKPKDVLTITLTPKVTCVVVDISKDDPEVQFSWFVDDVEVHTAQTQPREEQFQSTFRSVSELPIMHQDWLNGKEFKCRVNSAAFPAPIEKTISKTKGRPKAPQVYTIPPPKEQMAKDKVSLTCMITDFFPEDITVEWQWNGQPAENYKNTQPIMDTDGSYFVYSKLNVQKSNWEAGNTFTCSVLHEGLHNHHTEKSLSHSPGK

SEQ ID NO: 3428 - protein, 445 aa, Artificial Sequence
  Description of Artificial Sequence: Synthetic polypeptide
  chimaera
EVQLVESGGGLVQPGGSLKLSCAASGFNFQISAIHWVRQASGKGLEWVGRIRSKSHNYATLYAASLKGRFTLSRDDSRNTAYLQMSSLQTEDMAVYYCTVLSANYDTFDYWGQGTLVTVSSAKTTPPSVYPLAPGSAAQTNSMVTLGCLVKGYFPEPVTVTWNSGSLSSGVHTFPAVLQSDLYTLSSSVTVPSSTWPSETVTCNVAHPASSTKVDKKIVPRDCGCKPCICTVPEVSSVFIFPPKPKDVLTITLTPKVTCVVVDISKDDPEVQFSWFVDDVEVHTAQTQPREEQFQSTFRSVSELPIMHQDWLNGKEFKCRVNSAAFPAPIEKTISKTKGRPKAPQVYTIPPPKEQMAKDKVSLTCMITDFFPEDITVEWQWNGQPAENYKNTQPIMDTDGSYFVYSKLNVQKSNWEAGNTFTCSVLHEGLHNHHTEKSLSHSPGK

SEQ ID NO: 3429 - protein, 449 aa, Artificial Sequence
  Description of Artificial Sequence: Synthetic polypeptide
  chimaera
QVQLVESGGGVVQPGRSLRVSCAASGFTFSSYDMHWVRQAPGKGLEWVAVIWFDGSNEFYADSVKGRFTISRDNSKNTLFLQMNSLRAEDTAVYYCARDLGASVTTSNAENFHHWGQGTLVTVSSAKTTPPSVYPLAPGSAAQTNSMVTLGCLVKGYFPEPVTVTWNSGSLSSGVHTFPAVLQSDLYTLSSSVTVPSSTWPSETVTCNVAHPASSTKVDKKIVPRDCGCKPCICTVPEVSSVFIFPPKPKDVLTITLTPKVTCVVVDISKDDPEVQFSWFVDDVEVHTAQTQPREEQFQSTFRSVSELPIMHQDWLNGKEFKCRVNSAAFPAPIEKTISKTKGRPKAPQVYTIPPPKEQMAKDKVSLTCMITDFFPEDITVEWQWNGQPAENYKNTQPIMDTDGSYFVYSKLNVQKSNWEAGNTFTCSVLHEGLHNHHTEKSLSHSPGK

SEQ ID NO: 3430 - protein, 444 aa, Artificial Sequence
  Description of Artificial Sequence: Synthetic polypeptide
  chimaera
EVQLVQSGAEVKKPGESLKISCKAFGYSFTNFWIGWVRQVPGKGLEWVGIIYPGDSDTRYSPSFQGQVTISADKSIDTAYLQWGHLKASDSAMYFCARRGFWTGSQIEYWGQGTQVTVSSAKTTPPSVYPLAPGSAAQTNSMVTLGCLVKGYFPEPVTVTWNSGSLSSGVHTFPAVLQSDLYTLSSSVTVPSSTWPSETVTCNVAHPASSTKVDKKIVPRDCGCKPCICTVPEVSSVFIFPPKPKDVLTITLTPKVTCVVVDISKDDPEVQFSWFVDDVEVHTAQTQPREEQFQSTFRSVSELPIMHQDWLNGKEFKCRVNSAAFPAPIEKTISKTKGRPKAPQVYTIPPPKEQMAKDKVSLTCMITDFFPEDITVEWQWNGQPAENYKNTQPIMDTDGSYFVYSKLNVQKSNWEAGNTFTCSVLHEGLHNHHTEKSLSHSPGK

SEQ ID NO: 3431 - protein, 458 aa, Artificial Sequence
  Description of Artificial Sequence: Synthetic polypeptide
  chimaera
EVQLVESGGGLVQPGGSLRLSCAASGFTFPNYVMTWVRQAPGKGLEWVSGISGSGGSTDYADSVKGRFTISRDNSKNTLYLQMNSLRVEDTALYYCAKGSGGIWGQGTMVTVSSASTKGPSVFPLAPSSKSTSGGTAALGCLVKDYFPEPVTVSWNSGALTSGVHTFPAVLQSSGLYSLSSVVTVPSSSLGTQTYICNVNHKPSNTKVDKRVEPKSCDKTHTCPPCPAPELLGGPSVFLFPPKPKDTLMISRTPEVTCVVVDVSHEDPEVKFNWYVDGVEVHNAKTKPREEQYNSTYRVVSVLTVLHQDWLNGKEYKCKVSNKALPAPIEKTISKAKGQPREPQVYTLPPSREEMTKNQVSLTCLVKGFYPSDIAVEWESNGQPENNYKTTPPVLDSDGSFFLYSKLTVDKSRWQQGNVFSCSVMHEALHNHYTQKSLSLSPGQSALTQPRSVSGSPG

SEQ ID NO: 3432 - protein, 121 aa, Artificial Sequence; identical to SEQ ID NO: 2967
  Description of Artificial Sequence: Synthetic polypeptide
  VH antibody

SEQ ID NO: 3433 - protein, 120 aa, Artificial Sequence; identical to SEQ ID NO: 3101
  Description of Artificial Sequence: Synthetic polypeptide

SEQ ID NO: 3434 - protein, 112 aa, Homo sapiens; identical to SEQ ID NO: 3256

SEQ ID NO: 3435 - protein, 457 aa, Artificial Sequence
  Description of Artificial Sequence: Synthetic polypeptide
  pT231/pS235 heavy chain
AVTLDESGGGLQTPGGGLSLVCKASGFTLSSYQMMWVRQAPGKGLEWVAGITSRGGVTGYGSAVKGRATISRDNGQSTVRLQLNNLRAEDTGTYYCAKPALDSDQCGFPEAGCIDAWGHGTEVIVSSASTKGPSVFPLAPSSKSTSGGTAALGCLVKDYFPEPVTVSWNSGALTSGVHTFPAVLQSSGLYSLSSVVTVPSSSLGTQTYICNVNHKPSNTKVDKKVEPKSCDKTHTCPPCPAPEAAGAPSVFLFPPKPKDTLMISRTPEVTCVVVDVSHEDPEVKFNWYVDGVEVHNAKTKPREEQYNSTYRVVSVLTVLHQDWLNGKEYKCKVSNKALPAPIEKTISKAKGQPREPQVYTLPPSREEMTKNQVSLTCLVKGFYPSDIAVEWESNGQPENNYKTTPPVLDSDGSFFLYSKLTVDKSRWQQGNVFSCSVMHEALHNHYTQKSLSLSPGK

SEQ ID NO: 3436 - protein, 444 aa, Artificial Sequence
  Description of Artificial Sequence: Synthetic polypeptide
  chimaera
EVQLVESGGGLVQPGGSLRLSCAASGFTFPNYVMTWVRQAPGKGLEWVSGISGSGGSTDYADSVKGRFTISRDNSKNTLYLQMNSLRVEDTALYYCAKGSGGIWGQGTMVTVSSAKTTAPSVYPLAPVCGDTTGSSVTLGCLVKGYFPEPVTLTWNSGSLSSGVHTFPAVLQSDLYTLSSSVTVTSSTWPSQSITCNVAHPASSTKVDKKIEPRGPTIKPCPPCKCPAPNLLGGPSVFIFPPKIKDVLMISLSPIVTCVVVDVSEDDPDVQISWFVNNVEVHTAQTQTHREDYNSTLRVVSALPIQHQDWMSGKEFKCKVNNKDLPAPIERTISKPKGSVRAPQVYVLPPPEEEMTKKQVTLTCMVTDFMPEDIYVEWTNNGKTELNYKNTEPVLDSDGSYFMYSKLRVEKKNWVERNSYSCSVVHEGLHNHHTTKSFSRTPGK

SEQ ID NO: 3437 - protein, 450 aa, Artificial Sequence
  Description of Artificial Sequence: Synthetic polypeptide
  chimaera
EVQLVQSGAEVKKPGESLKISCKAFGYSFTNFWIGWVRQVPGKGLEWVGIIYPGDSDTRYSPSFQGQVTISADKSIDTAYLQWGHLKASDSAMYFCARRGFWTGSQIEYWGQGTQVTVSSAKTTAPSVYPLAPVCGDTTGSSVTLGCLVKGYFPEPVTLTWNSGSLSSGVHTFPAVLQSDLYTLSSSVTVTSSTWPSQSITCNVAHPASSTKVDKKIEPRGPTIKPCPPCKCPAPNLLGGPSVFIFPPKIKDVLMISLSPIVTCVVVDVSEDDPDVQISWFVNNVEVHTAQTQTHREDYNSTLRVVSALPIQHQDWMSGKEFKCKVNNKDLPAPIERTISKPKGSVRAPQVYVLPPPEEEMTKKQVTLTCMVTDFMPEDIYVEWTNNGKTELNYKNTEPVLDSDGSYFMYSKLRVEKKNWVERNSYSCSVVHEGLHNHHTTKSFSRTPGK

SEQ ID NO: 3438 - protein, 455 aa, Artificial Sequence
  Description of Artificial Sequence: Synthetic polypeptide
  chimaera
QVQLVESGGGVVQPGRSLRVSCAASGFTFSSYDMHWVRQAPGKGLEWVAVIWFDGSNEFYADSVKGRFTISRDNSKNTLFLQMNSLRAEDTAVYYCARDLGASVTTSNAENFHHWGQGTLVTVSSAKTTAPSVYPLAPVCGDTTGSSVTLGCLVKGYFPEPVTLTWNSGSLSSGVHTFPAVLQSDLYTLSSSVTVTSSTWPSQSITCNVAHPASSTKVDKKIEPRGPTIKPCPPCKCPAPNLLGGPSVFIFPPKIKDVLMISLSPIVTCVVVDVSEDDPDVQISWFVNNVEVHTAQTQTHREDYNSTLRVVSALPIQHQDWMSGKEFKCKVNNKDLPAPIERTISKPKGSVRAPQVYVLPPPEEEMTKKQVTLTCMVTDFMPEDIYVEWTNNGKTELNYKNTEPVLDSDGSYFMYSKLRVEKKNWVERNSYSCSVVHEGLHNHHTTKSFSRTPGK

SEQ ID NO: 3439 - protein, 444 aa, Artificial Sequence
  Description of Artificial Sequence: Synthetic polypeptide
  chimaera
EVQLVESGGGLVQPGGSLRLSCAASGFTFPNYVMTWVRQAPGKGLEWVSGISGSGGSTDYADSVKGRFTISRDNSKNTLYLQMNSLRVEDTALYYCAKGSGGIRGQGTMVTVSSAKTTAPSVYPLAPVCGDTTGSSVTLGCLVKGYFPEPVTLTWNSGSLSSGVHTFPAVLQSDLYTLSSSVTVTSSTWPSQSITCNVAHPASSTKVDKKIEPRGPTIKPCPPCKCPAPNLLGGPSVFIFPPKIKDVLMISLSPIVTCVVVDVSEDDPDVQISWFVNNVEVHTAQTQTHREDYNSTLRVVSALPIQHQDWMSGKEFKCKVNNKDLPAPIERTISKPKGSVRAPQVYVLPPPEEEMTKKQVTLTCMVTDFMPEDIYVEWTNNGKTELNYKNTEPVLDSDGSYFMYSKLRVEKKNWVERNSYSCSVVHEGLHNHHTTKSFSRTPGK

SEQ ID NO: 3440 - protein, 452 aa, Artificial Sequence
  Description of Artificial Sequence: Synthetic polypeptide
  chimaera
EVQLVESGGGLVQPGGSLRLSCIGSSGMTFSSYAFNWVRQTPGKGLEWVSSISRFGSTVDYTDSVRGRFTISRDDGQRSLYLQMNSLRVEDTAVYYCVRSTASGSRSPGIIWGQGTTVTVSSAKTTAPSVYPLAPVCGDTTGSSVTLGCLVKGYFPEPVTLTWNSGSLSSGVHTFPAVLQSDLYTLSSSVTVTSSTWPSQSITCNVAHPASSTKVDKKIEPRGPTIKPCPPCKCPAPNLLGGPSVFIFPPKIKDVLMISLSPIVTCVVVDVSEDDPDVQISWFVNNVEVHTAQTQTHREDYNSTLRVVSALPIQHQDWMSGKEFKCKVNNKDLPAPIERTISKPKGSVRAPQVYVLPPPEEEMTKKQVTLTCMVTDFMPEDIYVEWTNNGKTELNYKNTEPVLDSDGSYFMYSKLRVEKKNWVERNSYSCSVVHEGLHNHHTTKSFSRTPGK

SEQ ID NO: 3441 - protein, 330 aa, Homo sapiens
ASTKGPSVFPLAPSSKSTSGGTAALGCLVKDYFPEPVTVSWNSGALTSGVHTFPAVLQSSGLYSLSSVVTVPSSSLGTQTYICNVNHKPSNTKVDKKVEPKSCDKTHTCPPCPAPELLGGPSVFLFPPKPKDTLMISRTPEVTCVVVDVSHEDPEVKFNWYVDGVEVHNAKTKPREEQYNSTYRVVSVLTVLHQDWLNGKEYKCKVSNKALPAPIEKTISKAKGQPREPQVYTLPPSREEMTKNQVSLTCLVKGFYPSDIAVEWESNGQPENNYKTTPPVLDSDGSFFLYSKLTVDKSRWQQGNVFSCSVMHEALHNHYTQKSLSLSPGK

SEQ ID NO: 3442 - protein, 327 aa, Homo sapiens
ASTKGPSVFPLAPCSRSTSESTAALGCLVKDYFPEPVTVSWNSGALTSGVHTFPAVLQSSGLYSLSSVVTVPSSSLGTKTYTCNVDHKPSNTKVDKRVESKYGPPCPPCPAPEFLGGPSVFLFPPKPKDTLMISRTPEVTCVVVDVSQEDPEVQFNWYVDGVEVHNAKTKPREEQFNSTYRVVSVLTVLHQDWLNGKEYKCKVSNKGLPSSIEKTISKAKGQPREPQVYTLPPSQEEMTKNQVSLTCLVKGFYPSDIAVEWESNGQPENNYKTTPPVLDSDGSFFLYSRLTVDKSRWQEGNVFSCSVMHEALHNHYTQKSLSLSLGK

SEQ ID NO: 3443 - protein, 330 aa, Homo sapiens
ASTKGPSVFPLAPSSKSTSGGTAALGCLVKDYFPEPVTVSWNSGALTSGVHTFPAVLQSSGLYSLSSVVTVPSSSLGTQTYICNVNHKPSNTKVDKRVEPKSCDKTHTCPPCPAPELLGGPSVFLFPPKPKDTLMISRTPEVTCVVVDVSHEDPEVKFNWYVDGVEVHNAKTKPREEQYNSTYRVVSVLTVLHQDWLNGKEYKCKVSNKALPAPIEKTISKAKGQPREPQVYTLPPSREEMTKNQVSLTCLVKGFYPSDIAVEWESNGQPENNYKTTPPVLDSDGSFFLYSKLTVDKSRWQQGNVFSCSVMHEALHNHYTQKSLSLSPGK

SEQ ID NO: 3444 - protein, 451 aa, Artificial Sequence; identical to SEQ ID NO: 3017
  Description of Artificial Sequence: Synthetic polypeptide
  mature ch4E4 (N30Q) heavy chain (mouse IgG2a)

SEQ ID NO: 3445 - protein, 451 aa, Artificial Sequence; identical to SEQ ID NO: 3016
  Description of Artificial Sequence: Synthetic polypeptide
  mature ch4E4 heavy chain (mouse IgG2a)

SEQ ID NO: 3446 - protein, 451 aa, Artificial Sequence; identical to SEQ ID NO: 3016
  Description of Artificial Sequence: Synthetic polypeptide
  mature ch4E4 heavy chain (mouse IgG2a)

SEQ ID NO: 3447 - protein, 451 aa, Artificial Sequence; identical to SEQ ID NO: 3017
  Description of Artificial Sequence: Synthetic polypeptide
  mature ch4E4 (N30Q) heavy chain (mouse IgG2a)

SEQ ID NO: 3448 - protein, 126 aa, Homo sapiens; identical to SEQ ID NO: 3097

SEQ ID NO: 3449 - protein, 115 aa, Homo sapiens; identical to SEQ ID NO: 3096

SEQ ID NO: 3450 - protein, 121 aa, Homo sapiens; identical to SEQ ID NO: 3098

SEQ ID NO: 3451 - protein, 119 aa, Mus musculus; identical to SEQ ID NO: 3143

SEQ ID NO: 3452 - protein, 118 aa, Mus musculus; identical to SEQ ID NO: 3144

SEQ ID NO: 3453 - protein, 120 aa, Artificial Sequence
  Description of Artificial Sequence: Synthetic polypeptide
QVQLVQSGAEVKKPGSSVKVSCKASGGTFSDYVISWVRQAPGQGLEWMGEIFPRSGSTYYNEKFKGRVTITADKSTSTAYMELSSLRSEDTAVYYCARDYYGTSFAMDYWGQGTLVTVSS

SEQ ID NO: 3454 - protein, 120 aa, Artificial Sequence
  Description of Artificial Sequence: Synthetic polypeptide
QVQLVQSGPEVKKPGSSVKVPCKASGYIFTDYVISWVKQAPGQGLEWIGEIFPRSGSTYYNEKFKGKATLTADKSTSTAYMELSSLRSEDTAVYFCARDYYGTSFAMDYWGQGTLVTVSS

SEQ ID NO: 3455 - protein, 120 aa, Artificial Sequence
  Description of Artificial Sequence: Synthetic polypeptide
QVQLVQSGPEVKKPGSSVKVPCKASGGTFSDYVISWVRQAPGQGLEWMGEIFPRSGSTYYNEKFKGRVTITADKSTSTAYMELSSLRSEDTAVYYCARDYYGTSFAMDYWGQGTLVTVSS

SEQ ID NO: 3456 - protein, 120 aa, Artificial Sequence
  Description of Artificial Sequence: Synthetic polypeptide
QVQLVQSGAEVKKPGSSVKVSCKASGYTFSDYVISWVRQAPGQGLEWMGEIFPRSGSTYYNEKFKGRVTITADKSTSTAYMELSSLRSEDTAVYYCARDYYGTSFAMDYWGQGTLVTVSS

SEQ ID NO: 3457 - protein, 120 aa, Artificial Sequence
  Description of Artificial Sequence: Synthetic polypeptide
QVQLVQSGAEVKKPGSSVKVSCKASGGIFSDYVISWVRQAPGQGLEWMGEIFPRSGSTYYNEKFKGRVTITADKSTSTAYMELSSLRSEDTAVYYCARDYYGTSFAMDYWGQGTLVTVSS

SEQ ID NO: 3458 - protein, 120 aa, Artificial Sequence
  Description of Artificial Sequence: Synthetic polypeptide
QVQLVQSGAEVKKPGSSVKVSCKASGGTFTDYVISWVRQAPGQGLEWMGEIFPRSGSTYYNEKFKGRVTITADKSTSTAYMELSSLRSEDTAVYYCARDYYGTSFAMDYWGQGTLVTVSS

SEQ ID NO: 3459 - protein, 120 aa, Artificial Sequence
  Description of Artificial Sequence: Synthetic polypeptide
QVQLVQSGAEVKKPGSSVKVSCKASGGTFSDYVISWVKQAPGQGLEWMGEIFPRSGSTYYNEKFKGRVTITADKSTSTAYMELSSLRSEDTAVYYCARDYYGTSFAMDYWGQGTLVTVSS

SEQ ID NO: 3460 - protein, 120 aa, Artificial Sequence
  Description of Artificial Sequence: Synthetic polypeptide
QVQLVQSGAEVKKPGSSVKVSCKASGGTFSDYVISWVRQAPGQGLEWIGEIFPRSGSTYYNEKFKGRVTITADKSTSTAYMELSSLRSEDTAVYYCARDYYGTSFAMDYWGQGTLVTVSS

SEQ ID NO: 3461 - protein, 120 aa, Artificial Sequence
  Description of Artificial Sequence: Synthetic polypeptide
QVQLVQSGAEVKKPGSSVKVSCKASGGTFSDYVISWVRQAPGQGLEWMGEIFPRSGSTYYNEKFKGKVTITADKSTSTAYMELSSLRSEDTAVYYCARDYYGTSFAMDYWGQGTLVTVSS

SEQ ID NO: 3462 - protein, 120 aa, Artificial Sequence
  Description of Artificial Sequence: Synthetic polypeptide
QVQLVQSGAEVKKPGSSVKVSCKASGGTFSDYVISWVRQAPGQGLEWMGEIFPRSGSTYYNEKFKGRATITADKSTSTAYMELSSLRSEDTAVYYCARDYYGTSFAMDYWGQGTLVTVSS

SEQ ID NO: 3463 - protein, 120 aa, Artificial Sequence
  Description of Artificial Sequence: Synthetic polypeptide
QVQLVQSGAEVKKPGSSVKVSCKASGGTFSDYVISWVRQAPGQGLEWMGEIFPRSGSTYYNEKFKGRVTLTADKSTSTAYMELSSLRSEDTAVYYCARDYYGTSFAMDYWGQGTLVTVSS

SEQ ID NO: 3464 - protein, 120 aa, Artificial Sequence
  Description of Artificial Sequence: Synthetic polypeptide
QVQLVQSGAEVKKPGSSVKVSCKASGGTFSDYVISWVRQAPGQGLEWMGEIFPRSGSTYYNEKFKGRVTITADKSTSTAYMELSSLRSEDTAVYFCARDYYGTSFAMDYWGQGTLVTVSS

SEQ ID NO: 3465 - protein, 120 aa, Artificial Sequence
  Description of Artificial Sequence: Synthetic polypeptide
QVQLVQSGAEVKKPGSSVKVSCKASGYIFSDYVISWVRQAPGQGLEWMGEIFPRSGSTYYNEKFKGRVTITADKSTSTAYMELSSLRSEDTAVYYCARDYYGTSFAMDYWGQGTLVTVSS

SEQ ID NO: 3466 - protein, 121 aa, Artificial Sequence
  Description of Artificial Sequence: Synthetic polypeptide
  variable region of the heavy chain
QVQLQQPGAELVMPGASVKLSCKASGYTFTSYWMHWVKQRPGQGLEWIGEIDPSDSYTNYNQKFKGKSTLTVDKPSSTAYMQLSSLTSEDSAVYYCARSGDGSSPWYFDVWGTGTTVTVSS

SEQ ID NO: 3467 - protein, 115 aa, Artificial Sequence; identical to SEQ ID NO: 3134
  Description of Artificial Sequence: Synthetic polypeptide

SEQ ID NO: 3468 - protein, 225 aa, Artificial Sequence
  Description of Artificial Sequence: Synthetic polypeptide
MDWVWNLLFLMAAAQSIQAQIQLVQSGPELKKPGETVKISCKASGYPFTYHGMDWVKQAPWGGLEWMGWINTYSGVPTYADDFKGRFAFSLETSVGTAYLQINNLKNEDTATYFCARRRDFTMDFWGQGTSVTVSSAKTTPPSVYPLAPGSAAQTNSMVTLGCLVKGYFPEPVTVTWNSGSLSSGVHTFPAVLQSDLYTLSSSVTVPSSTWPSETVTCNVAHPAS

SEQ ID NO: 3469 - protein, 120 aa, Homo sapiens; identical to SEQ ID NO: 3095

SEQ ID NO: 3470 - protein, 125 aa, Homo sapiens; identical to SEQ ID NO: 3108

SEQ ID NO: 3471 - protein, 121 aa, Homo sapiens; identical to SEQ ID NO: 3109

SEQ ID NO: 3472 - protein, 124 aa, Homo sapiens; identical to SEQ ID NO: 3110

SEQ ID NO: 3473 - protein, 114 aa, Homo sapiens; identical to SEQ ID NO: 3111

SEQ ID NO: 3474 - protein, 114 aa, Artificial Sequence; identical to SEQ ID NO: 3105
  Description of Artificial Sequence: Synthetic polypeptide
  chimaera

SEQ ID NO: 3475 - protein, 118 aa, Homo sapiens; identical to SEQ ID NO: 3112

SEQ ID NO: 3476 - protein, 122 aa, Homo sapiens; identical to SEQ ID NO: 3113

SEQ ID NO: 3477 - protein, 126 aa, Homo sapiens; identical to SEQ ID NO: 3114

SEQ ID NO: 3478 - protein, 118 aa, Homo sapiens; identical to SEQ ID NO: 3115

SEQ ID NO: 3479 - protein, 120 aa, Homo sapiens; identical to SEQ ID NO: 3116

SEQ ID NO: 3480 - protein, 115 aa, Homo sapiens; identical to SEQ ID NO: 3117

SEQ ID NO: 3481 - protein, 121 aa, Homo sapiens; identical to SEQ ID NO: 3118

SEQ ID NO: 3482 - protein, 114 aa, Homo sapiens; identical to SEQ ID NO: 3119

SEQ ID NO: 3483 - protein, 124 aa, Homo sapiens; identical to SEQ ID NO: 3120

SEQ ID NO: 3484 - protein, 117 aa, Homo sapiens; identical to SEQ ID NO: 3122

SEQ ID NO: 3485 - protein, 117 aa, Artificial Sequence
  Description of Artificial Sequence: Synthetic polypeptide
EVQLVESGGGLVQPGGSLRLSCAASGFTFSSFGMHWVRQAPGKGLEWVAYISRGSSTIYYADTVKGRFTISRDNAKNSLYLQMNSLRAEDTAVYYCARGITTALDYWGQGTLVTVSS

SEQ ID NO: 3486 - protein, 71 aa, Artificial Sequence
  Description of Artificial Sequence: Synthetic polypeptide
EVQLVESGGGLVQPGGSLRLSCAASWVRQAPGKGLEWVSRFTISRDNSKNTLYLQMNSLRAEDTAVYYCAR

SEQ ID NO: 3487 - protein, 134 aa, Mus sp.
MKCSWVIFFLMAVVIGVNSEVQLQQSGAELVRPGASVKLPCTASGFNIKDDYMNWVMQRPERGLEWIGWIDPENGDTAYASKFQGKATMTADTSSNTAYLQLSSLTSEDTAVYYCTSGGRFDYWGQGTSLTVSS

SEQ ID NO: 3488 - protein, 124 aa, Homo sapiens
EVQLVQSGGGVVQPGRSLRLSCAASGFAFSSYGIHWVRQAPGKGLEWVAVIWFDGTKKYYTDSVKGRFTISRDNSKNTLYLQMNTLRAEDTAVYYCARDRGIGARRGPYYMDVWGKGTTVTVSS

SEQ ID NO: 3489 - protein, 124 aa, Homo sapiens
EVQLVQSGGGVVQPGRSLRLSCAASGFAFSSYGMHWVRQAPGKGLEWVAVIWFDGTKKYYTDSVKGRFTISRDNSKNTLYLQMNTLRAEDTAVYYCARDRGIGARRGPYYMDVWGKGTTVTVSS

SEQ ID NO: 3490 - protein, 127 aa, Homo sapiens
EVQLVESGPGLVKPAETLSLTCTVSGGSIRSGSICWYWIRQPPGKGLEWIGYFCYSGATFYTPSLRGRLTISVDASKNQLSLSLSSVTAADTAVYYCARRAGENSGGIEPYYGMDVWGQGTTVTVSS

SEQ ID NO: 3491 - protein, 121 aa, Homo sapiens
QVQLQESGPGLVKPSETLSLTCTVSGGSISRRSYYWGWIRQSPGKGLEWSGSIHYSGSTYYNPSLKSRVTISVDTSKNQFSLKLSSVTAADTAVYYCARSRWGSSWVFDYWGQGTLVTVSS

SEQ ID NO: 3492 - protein, 124 aa, Homo sapiens
QVQLVESGGGVVQPGRSLRLSCAASGFAFSSYGMHWVRQAPGKGLEWVAVIWFDGTKKYYTDSVKGRFTISRDNSKNTLYLQMNTLRAEDTAVYYCARDRGIGARRGPYYMDVWGKGTTVTVSS

SEQ ID NO: 3493 - protein, 121 aa, Mus musculus
EVHLVESGGELVQPKGSLKLSCAASGFAFNSFAMNWVRQTPGKGLNWVAHIRSKTNNYATFYADSVKDRFTISRDDSQNMLYLQMNNLKTEDTGIYYCVRRGPRDSWFGYWGQGTLVTVSA

SEQ ID NO: 3494 - protein, 121 aa, Mus musculus
EVQLVESGGGLVQPKGSLKLSCAASGFAFNSFALNWVRQAPGKSLEWVVHIRSKTNNYATFYADSVKDRFTVSRDDSQNMVYLQMNNLKTEDTGIYYCVRRGPRDSWFGYWGQGTLVTVSA

SEQ ID NO: 3495 - protein, 121 aa, Mus musculus
EVQLVESGGGLVQPKGSLKLSCAASGFAFNSFALNWVRQAPGKSLEWVVHIRSKTNNYATFYADSVKDRFTVSRDDSQSMVYLQMNNLKTEDTGIYYCVRRGPRDSWFGYWGQGTLVTVSA

SEQ ID NO: 3496 - protein, 121 aa, Mus musculus
EVHLVESGGGLVQPKGSLKLSCAASGFAFNSFAMNWVRQAPGKALDWIAHIRSKTNNYVTFYADSVKGRFSISRDDSQSMVYLQMNNLQTEDTGIYYCVRRGPRDSWFGYWGQGTLVTVSA

SEQ ID NO: 3497 - protein, 121 aa, Mus musculus
EIQLVESGGGLVQPKGSLKLSCAASGFAFSSFALNWVRQAPGKSLDWVAHIRSKANHYVTFYADSVKDRFTVSRDDSQSMVYLQMNNLKTEDTGIYYCVRRGPRDSWFGYWGQGTLVTVSA

SEQ ID NO: 3498 - protein, 121 aa, Mus musculus
EVHLVESGGGLVQPKGSLKLSCAASGFAFNSFAMNWVRQAPGKGLDWIAHIRSKTNNYVTFYADSVKGRFSISRDDSQSMVYLQMNNLQTEDTGIYYCVRRGPRDSWFGYWGQGTLVTVSA

SEQ ID NO: 3499 - protein, 121 aa, Mus musculus
EVQLVESGGGLVQPKGSLKLSCAASGFAFNSFAMNWVRQAPGKGLDWIAHIRSKSNNYVTFYADSVKDRFIISRDDSQSMIYLQMNNLKTEDSGIYYCVRRGPRDSWFGYWGQGTLVTVSA

SEQ ID NO: 3500 - protein, 120 aa, Mus sp.; identical to SEQ ID NO: 3102

SEQ ID NO: 3501 - protein, 120 aa, Artificial Sequence; identical to SEQ ID NO: 3103
  Description of Artificial Sequence: Synthetic polypeptide

SEQ ID NO: 3502 - protein, 120 aa, Artificial Sequence; identical to SEQ ID NO: 3104
  Description of Artificial Sequence: Synthetic polypeptide

SEQ ID NO: 3503 - protein, 117 aa, Artificial Sequence; identical to SEQ ID NO: 2976
  Description of Artificial Sequence: Synthetic polypeptide

SEQ ID NO: 3504 - protein, 117 aa, Artificial Sequence
  Description of Artificial Sequence: Synthetic polypeptide
EVHLVESGGALVKPGGSLKLSCAASGFSFSKYGMSWVRQTPDKRLEWVATISSSGSRTYYPDSVKGQFTISRDNAKNTLYLQMSSLKSEDTAMYYCSISWDGAMDYWGQGTSVTVSS

SEQ ID NO: 3505 - protein, 115 aa, Artificial Sequence
  Description of Artificial Sequence: Synthetic polypeptide
EVKVEESGGGLVQPGGSMKLSCVVSGFTFSNYWVNWVRQSPEKGLEWVAQIRLKSDNYATHYEESVKGRFTISRDDSKSSVYLQMNNLRAEDSGIYYCTNWEDYWGQGTTLTVSS

SEQ ID NO: 3506 - protein, 117 aa, Artificial Sequence
  Description of Artificial Sequence: Synthetic polypeptide
  combination of PCR-generated and human sequence
QVQLVESGGGLVQPGGSLRLSCAASGFTFSSYWMHWVRQAPGKGLVWVSRINSDGSDTNYADSVKGRFTFSRDNAKNTLYLQMTSLRAEDTAIYYCTRGRSYGFFDYWGQGALVTVS

SEQ ID NO: 3507 - protein, 124 aa, Artificial Sequence
  Description of Artificial Sequence: Synthetic polypeptide
  combination of PCR-generated and human sequence
QVQLVESRGGVVQPGTSLRLSCKASGFTFSTYGMHWVRQAPGKALEWVAVIWFDGNNKYYADSVKGRFTISRDNSKNTVYLQMNSLRGEDTAVYYCARDWWEAGCRPCYFFDYWGQGSLVTVSS

SEQ ID NO: 3508 - protein, 127 aa, Artificial Sequence
  Description of Artificial Sequence: Synthetic polypeptide
  combination of PCR-generated and human sequence
EVQLVQSGGGLVQPGGSLRLSCAASGFTFSDYWMSWVRQAPGKGLEWVANINQDGSAAYYVDSVRGRFTISRDSAENSLNLQMNSLRAEDTAVYYCAKDAHYYDRNRNNYYYYFDFWGQGTLVTVSS

SEQ ID NO: 3509 - protein, 127 aa, Artificial Sequence
  Description of Artificial Sequence: Synthetic polypeptide
  combination of PCR-generated and human sequence
QVQLLESGPGLVNPSQTLSLTCTVSGGSISSGNYYWSWIRQPAGKGLEWIGRMSSSGSTNYNPSLKSRVTMSEDTSKNQFSLKLSSVTAADTAVYYCARESGSSWQNHYYYYGMDVWGQGTTVTVSS

SEQ ID NO: 3510 - protein, 123 aa, Artificial Sequence
  Description of Artificial Sequence: Synthetic polypeptide
  combination of PCR-generated and human sequence
QVQLVESGGGLVQPGGSLRLSCAASGFTFRNYAMSWVRQAPGKGLEWVSGISSDGNTFYADSVKGRFTVSRDNSKNTLYLQVNSLRADDTAVYYCAKESGRWGGGTLYGAHYWGQGTPVTVSS

SEQ ID NO: 3511 - protein, 121 aa, Artificial Sequence
  Description of Artificial Sequence: Synthetic polypeptide
  combination of PCR-generated and human sequence
QVQLVQSGAEVKKPGAPVKVSCETSGYRFSDYNVHWVRQAPGQGPEWIGRISPNSGGTKYAQKFQGRVTMTRDMSMNTAYMELSGLRSDDTAVYYCVRGHCDGTTCSRAYWGQGTLVTVSS

SEQ ID NO: 3512 - protein, 120 aa, Artificial Sequence
  Description of Artificial Sequence: Synthetic polypeptide
  combination of PCR-generated and human sequence
QVQLVQSGAEVKKPGASVKVSCTASGYTFTGYYLHWVRQAPGQGLEWMGWVNPRSGGTSYPPKFQGRVTMTRDTSINTAYMDLTWLTSDDTAVYYCAVGRIPDVTAFDIWGQGTPVTVSS

SEQ ID NO: 3513 - protein, 122 aa, Artificial Sequence
  Description of Artificial Sequence: Synthetic polypeptide
  combination of PCR-generated and human sequence
QVQLVESGPEMRKPGESLKISCKTSGYIFSDYWTAWVRQLPGKGLQWMGIIYSGDSDTRYHPSVQGHVTMSTDSSLTTAYLQWSSLKASDTGIYYCARLDARVDAGWQLDSWGQGTLVTVSS

SEQ ID NO: 3514 - protein, 121 aa, Artificial Sequence
  Description of Artificial Sequence: Synthetic polypeptide
  combination of PCR-generated and human sequence
QVQLQQSGAEVKKPGESLKISCEASGYSFTNYWIGWVRQMPGKGLEWMGIIYPGDSDTRYSPPFQGQVTITADRSITTAYLEWSSLKASDTAMYYCARVGRPSKGGWFDPWGQGTLVTVSS

SEQ ID NO: 3515 - protein, 126 aa, Artificial Sequence
  Description of Artificial Sequence: Synthetic polypeptide
  combination of PCR-generated and human sequence
EVQLLESGGGLVKPGGSLRLSCVASGITFSDSYMSWIRQTPGKGLEWLSYISRSSSHTNYADSVKGRFTISRDNAKNSLYLQMNSLRGEDTAVYYCARVQTTMIEGKTKLNYFDYWGQGTQVTVSS

SEQ ID NO: 3516 - protein, 126 aa, Artificial Sequence
  Description of Artificial Sequence: Synthetic polypeptide
  combination of PCR-generated and human sequence
EVQLVQSGGGLVKPGGSLRLSCVASGITFSDSYMSWIRQTPGKGLEWLSYISRSSSHTNYADSVKGRFTISRDNAKNSLYLQMNSLRGEDTAVYYCARVQTTMIEGKTKLNYFDYWGQGTLVTVSS

SEQ ID NO: 3517 - protein, 122 aa, Artificial Sequence
  Description of Artificial Sequence: Synthetic polypeptide
  combination of PCR-generated and human sequence
QLVQSEGGLAEPGGSLRLSCAASGFTFTKAWMSWVRQTPGRGLEWLGRIKSKVDGETTDYAAPVRGRFTISRDDSKSTVYLQMTGLRTEDTGVYFCTTLIHCDLSACLPHFWGRGTLVTVSS

SEQ ID NO: 3518 - protein, 124 aa, Artificial Sequence
  Description of Artificial Sequence: Synthetic polypeptide
  combination of PCR-generated and human sequence
QVQLVQSGGEVKKPGESLKISCKGSGYSFSNYWIAWVRQMPGKGLECMGIIYPGDSDTTYSPSFQGQVTISADKSVSTTYLQWSSLKASDSAMYYCARLPRTDGDNSIGYFEYWGQGTMVTVSS

SEQ ID NO: 3519 - protein, 118 aa, Artificial Sequence
  Description of Artificial Sequence: Synthetic polypeptide
  combination of PCR-generated and human sequence
EVQLVESGGGLVQPGGSLRLSCAASGFTFSSYSMNWVRQAPGKGLEWVSYISSSTTTIYYADSVKGRFTISRDNVKNSLYLQMHSLRAEDTAVYYCVPAPRLGGSYTYWGQGTLVTVS

SEQ ID NO: 3520 - protein, 119 aa, Artificial Sequence
  Description of Artificial Sequence: Synthetic polypeptide
  combination of PCR-generated and human sequence
EVQLVESGGDLVKPGGSLRLSCAASGFVFTDAWMSWVRQSPGKGPEWLGRIKSKNVGETTDYAEHVRGRFTIARDDSNRTLYLQMSNLKIDDTAVYYCTTGLGGGTYGWGRGTRVTVSS

SEQ ID NO: 3521 - protein, 119 aa, Artificial Sequence
  Description of Artificial Sequence: Synthetic polypeptide
  combination of PCR-generated and human sequence
QVQLVESGGGLVQPGESLRLSCVASGFNFSIYEMNWVRQAPGKGLEWVSYITNRGSTIYYADSVKGRFTISRDNAQNSLYLQMNSLRAEDTAVYYCAKPRIGARVFDVWGQGTMVTVSS

SEQ ID NO: 3522 - protein, 121 aa, Artificial Sequence
  Description of Artificial Sequence: Synthetic polypeptide
  combination of PCR-generated and human sequence
QVQLVESGAVVKKPGESLKISCEASGYMFLDHWIGWVRQMPGKGLEWMGIIFPEDSDTRYSGSFEGQVTISADRSVNTVYLEWSSLKASDTAMYYCARVSVVRKGGWFDPWGQGTLVTVSS

SEQ ID NO: 3523 - protein, 121 aa, Artificial Sequence
  Description of Artificial Sequence: Synthetic polypeptide
  combination of PCR-generated and human sequence
QVQLVESGAELKKPGESLKISCEASGYIFADHWIGWVRQMPGKGLEWMGIIFPGDSDIRYSPSFEGQVTISVDRSVSTAFLQWSSLKASDTAMYFCARVAVVRKGGWFDSWGQGTRVTVSS

SEQ ID NO: 3524 - protein, 126 aa, Artificial Sequence
  Description of Artificial Sequence: Synthetic polypeptide
  combination of PCR-generated and human sequence
QVQLVQSGAEVKKPWESLKISCLASGYDFASYWIGWVRQMPGKGLEWVGIIYPDDSDTRYNASLEGRVTMSVDTSTNTAYLQWTSLKVSDTGMYYCARRDRNCSGTTCYPRWFDSWGQGTLVTVSS

SEQ ID NO: 3525 - protein, 107 aa, Homo sapiens
EVQLVESGGGLVQPGGSLRLSCAASGFTFSSYWMHWVRQAPGKGLVWVSRINSDGSDTNYADSVKGRFTFSRDNAKNTLYLQMTSLRAEDTAIYYCTRGRSYGFFDY

SEQ ID NO: 3526 - protein, 113 aa, Homo sapiens
QVQLVESRGGVVQPGTSLRLSCKASGFTFSTYGMHWVRQAPGKALEWVAVIWFDGNNKYYADSVKGRFTISRDNSKNTVYLQMNSLRGEDTAVYYCARDWWEAGCRPCYFFDY

SEQ ID NO: 3527 - protein, 116 aa, Homo sapiens
EVQLVESGGGLVQPGGSLRLSCAASGFTFSDYWMSWVRQAPGKGLEWVANINQDGSAAYYVDSVRGRFTISRDSAENSLNLQMNSLRAEDTAVYYCAKDAHYYDRNRNNYYYYFDF

SEQ ID NO: 3528 - protein, 116 aa, Homo sapiens
QVQLQESGPGLVNPSQTLSLTCTVSGGSISSGNYYWSWIRQPAGKGLEWIGRMSSSGSTNYNPSLKSRVTMSEDTSKNQFSLKLSSVTAADTAVYYCARESGSSWQNHYYYYGMDV

SEQ ID NO: 3529 - protein, 112 aa, Homo sapiens
EVQLVESGGGLVQPGGSLRLSCAASGFTFRNYAMSWVRQAPGKGLEWVSGISSDGNTFYADSVKGRFTVSRDNSKNTLYLQVNSLRADDTAVYYCAKESGRWGGGTLYGAHY

SEQ ID NO: 3530 - protein, 110 aa, Homo sapiens
QVQLVQSGAEVKKPGAPVKVSCETSGYRFSDYNVHWVRQAPGQGPEWIGRISPNSGGTKYAQKFQGRVTMTRDMSMNTAYMELSGLRSDDTAVYYCVRGHCDGTTCSRAY

SEQ ID NO: 3531 - protein, 109 aa, Homo sapiens
QVQLVQSGAEVKKPGASVKVSCTASGYTFTGYYLHWVRQAPGQGLEWMGWVNPRSGGTSYPPKFQGRVTMTRDTSINTAYMDLTWLTSDDTAVYYCAVGRIPDVTAFDI

SEQ ID NO: 3532 - protein, 111 aa, Homo sapiens
EVQLVQSGPEMRKPGESLKISCKTSGYIFSDYWTAWVRQLPGKGLQWMGIIYSGDSDTRYHPSVQGHVTMSTDSSLTTAYLQWSSLKASDTGIYYCARLDARVDAGWQLDS

SEQ ID NO: 3533 - protein, 110 aa, Homo sapiens
EVQLVQSGAEVKKPGESLKISCEASGYSFTNYWIGWVRQMPGKGLEWMGIIYPGDSDTRYSPPFQGQVTITADRSITTAYLEWSSLKASDTAMYYCARVGRPSKGGWFDP

SEQ ID NO: 3534 - protein, 115 aa, Homo sapiens
QVQLVESGGGLVKPGGSLRLSCVASGITFSDSYMSWIRQTPGKGLEWLSYISRSSSHTNYADSVKGRFTISRDNAKNSLYLQMNSLRGEDTAVYYCARVQTTMIEGKTKLNYFDY

SEQ ID NO: 3535 - protein, 111 aa, Homo sapiens
QLVESGGGLAEPGGSLRLSCAASGFTFTKAWMSWVRQTPGRGLEWLGRIKSKVDGETTDYAAPVRGRFTISRDDSKSTVYLQMTGLRTEDTGVYFCTTLIHCDLSACLPHF

SEQ ID NO: 3536 - protein, 113 aa, Homo sapiens
EVQLVQSGGEVKKPGESLKISCKGSGYSFSNYWIAWVRQMPGKGLECMGIIYPGDSDTTYSPSFQGQVTISADKSVSTTYLQWSSLKASDSAMYYCARLPRTDGDNSIGYFEY

SEQ ID NO: 3537 - protein, 108 aa, Homo sapiens
EVQLVESGGGLVQPGGSLRLSCAASGFTFSSYSMNWVRQAPGKGLEWVSYISSSTTTIYYADSVKGRFTISRDNVKNSLYLQMHSLRAEDTAVYYCVPAPRLGGSYTY

SEQ ID NO: 3538 - protein, 108 aa, Homo sapiens
EVQLVESGGDLVKPGGSLRLSCAASGFVFTDAWMSWVRQSPGKGPEWLGRIKSKNVGETTDYAEHVRGRFTIARDDSNRTLYLQMSNLKIDDTAVYYCTTGLGGGTYG

SEQ ID NO: 3539 - protein, 108 aa, Homo sapiens
EVQLVESGGGLVQPGESLRLSCVASGFNFSIYEMNWVRQAPGKGLEWVSYITNRGSTIYYADSVKGRFTISRDNAQNSLYLQMNSLRAEDTAVYYCAKPRIGARVFDV

SEQ ID NO: 3540 - protein, 110 aa, Homo sapiens
EVQLVQSGAVVKKPGESLKISCEASGYMFLDHWIGWVRQMPGKGLEWMGIIFPEDSDTRYSGSFEGQVTISADRSVNTVYLEWSSLKASDTAMYYCARVSVVRKGGWFDP

SEQ ID NO: 3541 - protein, 110 aa, Homo sapiens
EVQLVQSGAELKKPGESLKISCEASGYIFADHWIGWVRQMPGKGLEWMGIIFPGDSDIRYSPSFEGQVTISVDRSVSTAFLQWSSLKASDTAMYFCARVAVVRKGGWFDS

SEQ ID NO: 3542 - protein, 115 aa, Homo sapiens
EVQLVQSGAEVKKPWESLKISCLASGYDFASYWIGWVRQMPGKGLEWVGIIYPDDSDTRYNASLEGRVTMSVDTSTNTAYLQWTSLKVSDTGMYYCARRDRNCSGTTCYPRWFDS

SEQ ID NO: 3543 - protein, 117 aa, Mus musculus
LEVQLQQSGPELVKPGASVKISCKTSEYTFTEYTKHWVKQSHGKSLEWIGSINPNNGDTYYNQKFTDKATLTVDKSSTTASMELRSLTFEDSAVYYCAMGDSAWFAYWGQGTLVTVS

SEQ ID NO: 3544 - protein, 120 aa, Mus sp.
EVQLQQSGAELVRPGASVKLSCTASGFNIKDEYMNWVKQRPERGLEWIGWIDPENGDAAYASKFQGKATMTADTSSNTAYLQLSSLTSEDTAVYFCTFFYSNYDGYFDVWGAGTTVTVSS

SEQ ID NO: 3545 - protein, 121 aa, Mus sp.
QVTLKESGPGILQPSQTLSLTCSFSGFSLSTSGMGVGWIRQPSGKGLEWLAHIWWDDDKYYNAVLKSRLTISKDTSKNQVFLKIASVDTADTATYYCARIGIDGPYAMDYWGQGTSVTVSS

SEQ ID NO: 3546 - protein, 127 aa, Artificial Sequence
  Description of Artificial Sequence: Synthetic polypeptide
  pT231/pS235_1 VH; pT231/pS235_2 VH
AVTLDESGGGLQTPGGGLSLVCKASGFTLSSYQMMWVRQAPGKGLEWVAGITSRGGVTGYGSAVKGRATISRDNGQSTVRLQLNNLRAEDTGTYYCAKPALDSDQCGFPEAGCIDAWGHGTEVIVSS

SEQ ID NO: 3547 - protein, 119 aa, Artificial Sequence
  Description of Artificial Sequence: Synthetic polypeptide
  pT212/pS214_1 VH
AVTLDESGGGLQTPGGALSLVCKASGFTFSSFNMFWVRQAPGKGLEFVAGIGKTGRSTYYGAAVKGRATISRDNGQTTVRLQLNNLRAEDTGIYFCAKGATGPYIIDTWGHGTEVIVSS

SEQ ID NO: 3548 - protein, 125 aa, Artificial Sequence
  Description of Artificial Sequence: Synthetic polypeptide
  pT212/pS214_2 VH
AVTLDESGGGLQTPGGGLSLVCKASGFTFSSYPMVWVRQVPGKGLEWVADIDAAGSGTWYATAVKGRATISRDNGQSTLRLQLNNLRAEDTGTYFCAKTTPSTSGGWSVGSIDTWGHGTEVIVSS

SEQ ID NO: 3549 - protein, 120 aa, Artificial Sequence
  Description of Artificial Sequence: Synthetic polypeptide
  pS396/pS404_1 VH
AVTLDESGGGLQTPGGGLSLVCKASGFTFSSYGMAWVRQAPGKGLEFVAGISSSGTYTNYAPAVKGRATISRDNGQSTSRLQLNNLRAEDTGIYYCAKTTGRGAGEIDAWGHGTEVIVSS

SEQ ID NO: 3550 - protein, 127 aa, Artificial Sequence
  Description of Artificial Sequence: Synthetic polypeptide
  pS396/pS404_2 VH
DRALDESGGGLQTPGGTISLVCKASGFTMSSYGMNWVRQAPGKGLEWVGVISSRGSSTGYGAAVKGRATISRDNGQSTVRLQLNNLRAEDTGTYYCGKDSGGRCGGRSYSGGCIDAWGHGTEVIVSS

SEQ ID NO: 3551 - protein, 115 aa, Artificial Sequence
  Description of Artificial Sequence: Synthetic polypeptide
  VH amino acid sequence of 2H9
QVQLLQPGTELVKPGASVKLSCKASGYTFTSYWMHWVKQRPGQGLEWIGNINPNNGGTNYNEKFKNKATLTVDKSSSTAYMHLSSLTSEDSAVYYCAGGRNYDVWGTGTTVTVSS

SEQ ID NO: 3552 - protein, 125 aa, Artificial Sequence
  Description of Artificial Sequence: Synthetic polypeptide
LPEVQLEESGAELVRSGASVTLSCTASGFNIKDYYIHWVKQRPEQGLEWIGWIDPENGDTEYAPKFQGKATMTADTSSNTAYLQLSSLTSEDTAVYYCNGAPGYWGPGTTLTVSSAKTTPPSVYS

SEQ ID NO: 3553 - protein, 127 aa, Artificial Sequence
  Description of Artificial Sequence: Synthetic polypeptide
LPEVQLEESGGGLVQPGGSLSLSCAASGFTFTDYYMSWVRQPPGKALEWVALNRNKTKGYTTEYSASVKGRFTISRDNSQSILYLQMNALRAEDSATYYCARGMDYWGQGTSVTVSSAKTTPPSVYS

SEQ ID NO: 3554 - protein, 128 aa, Artificial Sequence
  Description of Artificial Sequence: Synthetic polypeptide
LPEVQLEESGGGLVKPGGSLKLSCAASGFTFSTYPMSWVRQTPEKRLEWVASISNGGSTYYPDTVKGRFTISRDNARNILYLQMSSLRSEDTAMYYCARGRDYHFDFWGQGTTLTVSSAKTTPPSVYS

SEQ ID NO: 3555 - protein, 125 aa, Artificial Sequence
  Description of Artificial Sequence: Synthetic polypeptide
LPQVQLEESGAELVKPGASVKLSCKASGYTFTNYWINWVKQRPGQGLEWIGNIYPGSTRANYNEKFKSKATLTVDTSSSTAYMQVSSLTSDDSAVYYCTRTHSIWGQGTQVTVSAAKTTPPSVYS

SEQ ID NO: 3556 - protein, 131 aa, Artificial Sequence
  Description of Artificial Sequence: Synthetic polypeptide
LPEVKLEESGAELVKPGASVKLSCKASGYTFISNWMHWVKQRPGQGLEWIGNIDPSDSETHYNQKFKDKATLTVDKSSSTAYMQLSSLTSEDSAVYYCARRDRDGYYFDYWGQGTTLTVSSAKTTPPSVYS

SEQ ID NO: 3557 - protein, 125 aa, Artificial Sequence
  Description of Artificial Sequence: Synthetic polypeptide
LPEVKLEQSGAELVKPGASVKLSCKASGYTFTNYWINWVKQRPGQGLEWIGNIYPGSTRANYNEKFKSKATLTVDTSSSTAYMQVSSLTSDDSAVYYCTRTHSIWGQGTQVTVSAAKTTPPSVYS

SEQ ID NO: 3558 - protein, 131 aa, Artificial Sequence
  Description of Artificial Sequence: Synthetic polypeptide
LPEVQLEQSGAELVKPGASVKLSCKASGYTFISNWMHWVKQRPGQGLEWIGNIDPSDSETHYNQKFKDKATLTVDKSSSTAYMQLSSLTSEDSAVYYCARRDRDGYYFDYWGQGTTLTVSSAKTTPPSVYS

SEQ ID NO: 3559 - protein, 326 aa, Artificial Sequence
  Description of Artificial Sequence: Synthetic polypeptide
ASTKGPSVFPLAPCSRSTSESTAALGCLVKDYFPEPVTVSWNSGALTSGVHTFPAVLQSSGLYSLSSVVTVPSSNFGTQTYTCNVDHKPSNTKVDKTVERKCCVECPPCPAPPVAGPSVFLFPPKPKDTLMISRTPEVTCVVVDVSHEDPEVQFNWYVDGVEVHNAKTKPREEQFNSTFRVVSVLTVVHQDWLNGKEYKCKVSNKGLPAPIEKTISKTKGQPREPQVYTLPPSREEMTKNQVSLTCLVKGFYPSDIAVEWESNGQPENNYKTTPPMLDSDGSFFLYSKLTVDKSRWQQGNVFSCSVMHEALHNHYTQKSLSLSPGK

SEQ ID NO: 3560 - protein, 120 aa, Homo sapiens; identical to SEQ ID NO: 3106

SEQ ID NO: 3561 - protein, 125 aa, Homo sapiens; identical to SEQ ID NO: 3107

SEQ ID NO: 3562 - protein, 113 aa, Homo sapiens; identical to SEQ ID NO: 3271

SEQ ID NO: 3563 - protein, 117 aa, Homo sapiens; identical to SEQ ID NO: 3121

SEQ ID NO: 3564 - protein, 111 aa, Artificial Sequence
  Description of Artificial Sequence: Synthetic polypeptide
  humanized sequence
EVQVLESGGGLVQPGGSLRLSCAVSGFSLSSNAINWVRQAPGKGLEWVGYIAVSGNTYYASWAKGRFTISRDNSKNTVYLQMNSLRAEDTAVYYCGKSNIWGQGTLVTVSS

SEQ ID NO: 3565 - protein, 112 aa, Artificial Sequence
  Description of Artificial Sequence: Synthetic polypeptide
  humanized sequence
AQVMTQSPSSLSASVGDRVTITCRSSQSVRTNKLAWFQQKPGQPPKRLIYSASTLDFGVPSRFSGSGSGTEFTLTISSLQPEDFATYYCLGYFDSSIADIVAFGGGTKVEIK

SEQ ID NO: 3566 - protein, 117 aa, Artificial Sequence; identical to SEQ ID NO: 3139
  Description of Artificial Sequence: Synthetic polypeptide

SEQ ID NO: 3567 - protein, 117 aa, Artificial Sequence; identical to SEQ ID NO: 3140
  Description of Artificial Sequence: Synthetic polypeptide

SEQ ID NO: 3568 - protein, 117 aa, Artificial Sequence; identical to SEQ ID NO: 3141
  Description of Artificial Sequence: Synthetic polypeptide

SEQ ID NO: 3569 - protein, 117 aa, Artificial Sequence; identical to SEQ ID NO: 3142
  Description of Artificial Sequence: Synthetic polypeptide

SEQ ID NO: 3570 - protein, 118 aa, Artificial Sequence
  Description of Artificial Sequence: Synthetic polypeptide
QVQLVQSGSELKRPGASVKVSCKASGYSFTSYAVNWVRQAPGQGLEWVGWINTNTGNPTYAQGFTGRFVFSLDTSVSTAYLQISSLKAADTAVYYCARARGQNGMDVWGQGTTVTVSS

SEQ ID NO: 3571 - protein, 330 aa, Artificial Sequence
  Description of Artificial Sequence: Synthetic polypeptide
ASTKGPSVFPLAPSSKSTSGGTAALGCLVKDYFPEPVTVSWNSGALTSGVHTFPAVLQSSGLYSLSSVVTVPSSSLGTQTYICNVNHKPSNTKVDKRVEPKSCDKTHTCPPCPAPELLGGPSVFLFPPKPKDTLMISRTPEVTCVVVDVSHEDPEVKFNWYVDGVEVHNVKTKPREEQYNSTYRVVSVLTVLHQDWLNGKEYKCKVSNKALPAPIEKTISKAKGQPREPQVYTLPPSREEMTKNQVSLTCLVKGFYPSDIAVEWESNGQPENNYKTTPPVLDSDGSFFLYSKLTVDKSRWQQGNVFSCSVMHEALHNHYTQKSLSLSPGK

SEQ ID NO: 3572 - protein, 445 aa, Artificial Sequence; identical to SEQ ID NO: 2982
  Description of Artificial Sequence: Synthetic polypeptide

SEQ ID NO: 3573 - protein, 445 aa, Artificial Sequence; identical to SEQ ID NO: 2983
  Description of Artificial Sequence: Synthetic polypeptide

SEQ ID NO: 3574 - protein, 442 aa, Artificial Sequence; identical to SEQ ID NO: 2981
  Description of Artificial Sequence: Synthetic polypeptide

SEQ ID NO: 3575 - protein, 117 aa, Artificial Sequence
  Description of Artificial Sequence: Synthetic polypeptide
QVQLVQSGSELKKPGASVKVSCKASGYTFTYHGMDWVRQAPGQGLEWMGWINTYSGVPTYADDFKGRFVFSLDTSVSTAYLQISSLKAEDTAVYFCARRRDFTMDFWGQGTTVTVSS

SEQ ID NO: 3576 - protein, 148 aa, Artificial Sequence
  Description of Artificial Sequence: Synthetic polypeptide
  VHH Tau-A2-SH
MGSSHHHHHHSSGLVPRGSAAAQLQASGGGLVQAGGSLRLSCAASGRSFSGSTMEWYRQAPGKERKFVAAIRTISSRTYYVDSVKGRFTISRDSTKNTVYLQLNSLKVEDTAVYYCAARFSGTIGTTSSVDYWGQGTQVTVGGGSCSA

SEQ ID NO: 3577 - protein, 150 aa, Artificial Sequence
  Description of Artificial Sequence: Synthetic polypeptide
  Tau-A2 Var-SH
MGSSHHHHHHSSGLVPRGSAAADVQLEASGGGLVQAGGSLRLSCAASGRSFSGSTMEWYRQAPGKERKFVAAIRTGSSRTYYVDSVKGRFTISRDSTKNTVYLQLNSLKGEDTAVYYCAARFSGTIGTTSSVDYWGQGTQVTVGGGSCSA

SEQ ID NO: 3578 - protein, 121 aa, Artificial Sequence
  Description of Artificial Sequence: Synthetic polypeptide
  VHH Tau-A2 Variant
DVQLEASGGGLVQAGGSLRLSCAASGRSFSGSTMEWYRQAPGKERKFVAAIRTGSSRTYYVDSVKGRFTISRDSTKNTVYLQLNSLKGEDTAVYYCAARFSGTIGTTSSVDYWGQGTQVTV

SEQ ID NO: 3579 - protein, 119 aa, Artificial Sequence
  Description of Artificial Sequence: Synthetic polypeptide
  VHH Tau-A2 Variant
QLEASGGGLVQAGGSLRLSCAASGRSFSGSTMEWYRQAPGKERKFVAAIRTGSSRTYYVDSVKGRFTISRDSTKNTVYLQLNSLKGEDTAVYYCAARFSGTIGTTSSVDYWGQGTQVTV

SEQ ID NO: 3580 - protein, 112 aa, Artificial Sequence; identical to SEQ ID NO: 3255
  Description of Artificial Sequence: Synthetic polypeptide

SEQ ID NO: 3581 - protein, 219 aa, Artificial Sequence
  Description of Artificial Sequence: Synthetic polypeptide
DIVMTQSPLSLPVTPGEPASISCKSSQSLLNSRTRKNYLAWYLQKPGQSPQLLIYWASTRESGVPDRFTGSGSGTDFTLKISRVEAEDVGVYYCKQSFYLRTFGQGTKVEIKRTVAAPSVFIFPPSDEQLKSGTASVVCLLNNFYPREAKVQWKVDNALQSGNSQESVTEQDSKDSTYSLSSTLTLSKADYEKHKVYACEVTHQGLSSPVTKSFNRGEC

SEQ ID NO: 3582 - protein, 219 aa, Artificial Sequence
  Description of Artificial Sequence: Synthetic polypeptide
DIVMSQSPSSLAVSAGEKVTMSCKSSQSLLNSRTRKNYLAWYQQKPGQSPKLLIYWASTRESGVPDRFTGSGSGTDFTLTISSVQAEDLAVYYCKQSFYLRTFGGGTKLDIKRTVAAPSVFIFPPSDEQLKSGTASVVCLLNNFYPREAKVQWKVDNALQSGNSQESVTEQDSKDSTYSLSSTLTLSKADYEKHKVYACEVTHQGLSSPVTKSFNRGEC

SEQ ID NO: 3583 - DNA, 336 bp, Artificial Sequence
  Description of Artificial Sequence: Synthetic polynucleotide
gatattgtcatgtcacagtcaccttcatccctggcagtcagcgccggagaaaaagtcactatgtcttgtaagtcttcacagagcctgctgaactcccggaccagaaagaattacctggcatggtatcagcagaagcccggccagtctcctaaactgctgatctactgggcatcaacaagggagagcggagtgccagaccgcttcacaggctctgggagtggaactgattttaccctgacaattagctccgtgcaggccgaagacctggctgtctactattgcaaacagagcttctatctgcgaacttttggcgggggaaccaagctggatatcaaa

SEQ ID NO: 3584 - DNA, 336 bp, Artificial Sequence
  Description of Artificial Sequence: Synthetic polynucleotide
gacatcgtgatgacacagtccccactgtctctgcccgtcactcctggggagccagcatctattagttgcaagagctcccagagtctgctgaactcacggaccagaaagaattacctggcctggtatctgcagaaacccggacagagccctcagctgctgatctactgggctagcaccagggaatccggagtgccagaccgcttcacaggatcaggaagcggaaccgattttacactgaagatcagccgggtggaggccgaagatgtgggcgtctactattgtaaacagtccttctatctgagaacttttggccaggggaccaaggtggagatcaaa

SEQ ID NO: 3585 - DNA, 336 bp, Artificial Sequence
  Description of Artificial Sequence: Synthetic polynucleotide
gacatcgtgatgtctcagagtccactgtctctgccagtcacccctggagagccagcatcaattagctgcaagagctcccagagtctgctgaactcacggacaagaaagaattacctggcctggtatctgcagaaacccggacagagccctcagctgctgatctactgggctagcacaagggaatccggagtgccagaccgcttcactggatccggatctggaaccgattttacactgaagatcagccgggtggaggccgaagatgtgggcgtctactattgtaaacagagtttctatctgagaacttttggccaggggaccaaggtggagatcaaa

SEQ ID NO: 3586 - DNA, 657 bp, Artificial Sequence
  Description of Artificial Sequence: Synthetic polynucleotide
gacatcgtgatgacacagtccccactgtctctgcccgtcactcctggggagccagcatctattagttgcaagagctcccagagtctgctgaactcacggaccagaaagaattacctggcctggtatctgcagaaacccggacagagccctcagctgctgatctactgggctagcaccagggaatccggagtgccagaccgcttcacaggatcaggaagcggaaccgattttacactgaagatcagccgggtggaggccgaagatgtgggcgtctactattgtaaacagtccttctatctgagaacttttggccaggggaccaaggtggagatcaaaagaactgtggcagcaccaagcgtcttcatcttcccgccatctgatgagcagttgaaatctggaactgcctctgttgtgtgcctgctgaataacttctatcccagagaggccaaagtacagtggaaggtggataacgccctccaatcgggtaactcccaggagagtgtcacagagcaggacagcaaggacagcacctacagcctcagcagcaccctgacgctgagcaaagcagactacgagaaacacaaagtctacgcctgcgaagtcacccatcagggcctgagctcgcccgtcacaaagagcttcaacaggggagagtgt

SEQ ID NO: 3587 - DNA, 657 bp, Artificial Sequence
  Description of Artificial Sequence: Synthetic polynucleotide
gacatcgtgatgtctcagagtccactgtctctgccagtcacccctggagagccagcatcaattagctgcaagagctcccagagtctgctgaactcacggacaagaaagaattacctggcctggtatctgcagaaacccggacagagccctcagctgctgatctactgggctagcacaagggaatccggagtgccagaccgcttcactggatccggatctggaaccgattttacactgaagatcagccgggtggaggccgaagatgtgggcgtctactattgtaaacagagtttctatctgagaacttttggccaggggaccaaggtggagatcaaaagaactgtggcagcaccaagcgtcttcatcttcccgccatctgatgagcagttgaaatctggaactgcctctgttgtgtgcctgctgaataacttctatcccagagaggccaaagtacagtggaaggtggataacgccctccaatcgggtaactcccaggagagtgtcacagagcaggacagcaaggacagcacctacagcctcagcagcaccctgacgctgagcaaagcagactacgagaaacacaaagtctacgcctgcgaagtcacccatcagggcctgagctcgcccgtcacaaagagcttcaacaggggagagtgt

SEQ ID NO: 3588 - DNA, 657 bp, Artificial Sequence
  Description of Artificial Sequence: Synthetic polynucleotide
gatattgtcatgtcacagtcaccttcatccctggcagtcagcgccggagaaaaagtcactatgtcttgtaagtcttcacagagcctgctgaactcccggaccagaaagaattacctggcatggtatcagcagaagcccggccagtctcctaaactgctgatctactgggcatcaacaagggagagcggagtgccagaccgcttcacaggctctgggagtggaactgattttaccctgacaattagctccgtgcaggccgaagacctggctgtctactattgcaaacagagcttctatctgcgaacttttggcgggggaaccaagctggatatcaaaagaactgtggcagcaccaagcgtcttcatcttcccgccatctgatgagcagttgaaatctggaactgcctctgttgtgtgcctgctgaataacttctatcccagagaggccaaagtacagtggaaggtggataacgccctccaatcgggtaactcccaggagagtgtcacagagcaggacagcaaggacagcacctacagcctcagcagcaccctgacgctgagcaaagcagactacgagaaacacaaagtctacgcctgcgaagtcacccatcagggcctgagctcgcccgtcacaaagagcttcaacaggggagagtgt

SEQ ID NO: 3589 - protein, 238 aa, Artificial Sequence
  Description of Artificial Sequence: Synthetic polypeptide
  light chain amino acid sequence
MKLPVRLLVLMFWIPASSSDVLMTQTPLSLPVSLGDQASISCRSSQSIVHSNGNTYLEWYLQKPGQSPKLLIYKVSNRFSGVPDRFSGSGSGTDFTLKISRVEAEDLGVYYCFQGSHVPRTFGGGTKLEIKRADAAPTVSIFPPSSEQLTSGGASVVCFLNNFYPKDINVKWKIDGSERQNGVLNSWTDQDSKDSTYSMSSTLTLTKDEYERHNSYTCEATHKTSTSPIVKSFNRNEC

SEQ ID NO: 3590 - protein, 219 aa, Artificial Sequence; identical to SEQ ID NO: 3175
  Description of Artificial Sequence: Synthetic polypeptide

SEQ ID NO: 3591 - protein, 219 aa, Artificial Sequence
  Description of Artificial Sequence: Synthetic polypeptide
DIVMTQTPLSLPVTPGEPASISCRSSQSLVHRNGKTYLHWYLQKPGQSPQLLIYKVSNRFSGVPDRFSGSGSGTDFTLKISRVEAEDVGVYFCSQTARFPYTFGGGTKVEIKRTVAAPSVFIFPPSDEQLKSGTASVVCLLNNFYPREAKVQWKVDNALQSGNSQESVTEQDSKDSTYSLSSTLTLSKADYEKHKVYACEVTHQGLSSPVTKSFNRGEC

SEQ ID NO: 3592 - protein, 219 aa, Artificial Sequence
  Description of Artificial Sequence: Synthetic polypeptide
DIVMTQTPLSLPVTPGEPASISCRSSQSLVHSRGKTYLHWYLQKPGQSPQLLIYKVSNRFFGVPDRFSGSGSGTDFTLKISRVEAEDVGVYFCSQTARFPYTFGGGTKVEIKRTVAAPSVFIFPPSDEQLKSGTASVVCLLNNFYPREAKVQWKVDNALQSGNSQESVTEQDSKDSTYSLSSTLTLSKADYEKHKVYACEVTHQGLSSPVTKSFNRGEC

SEQ ID NO: 3593 - protein, 219 aa, Artificial Sequence
  Description of Artificial Sequence: Synthetic polypeptide
DIVMTQTPLSLPVTPGEPASISCRSSQSLVHSKGKTYLHWYLQKPGQSPQLLIYKVKNRFSGVPDRFSGSGSGTDFTLKISRVEAEDVGVYFCSQTAHFPRTFGGGTKVEIKRTVAAPSVFIFPPSDEQLKSGTASVVCLLNNFYPREAKVQWKVDNALQSGNSQESVTEQDSKDSTYSLSSTLTLSKADYEKHKVYACEVTHQGLSSPVTKSFNRGEC

SEQ ID NO: 3594 - protein, 219 aa, Artificial Sequence
  Description of Artificial Sequence: Synthetic polypeptide
DIVMTQTPLSLPVTPGEPASISCRSSQSLVRSRGKTYLHWYLQKPGQSPQLLIYKVSNRFSGVPDRFSGSGSGTDFTLKISRVEAEDVGVYFCSQTAQFPYTFGGGTKVEIKRTVAAPSVFIFPPSDEQLKSGTASVVCLLNNFYPREAKVQWKVDNALQSGNSQESVTEQDSKDSTYSLSSTLTLSKADYEKHKVYACEVTHQGLSSPVTKSFNRGEC

SEQ ID NO: 3595 - protein, 219 aa, Artificial Sequence
  Description of Artificial Sequence: Synthetic polypeptide
DIVMTQTPLSLPVTPGEPASISCRSSQSLVHKHGKTYLHWYLQKPGQSPQLLIYKVRNRFSGVPDRFSGSGSGTDFTLKISRVEAEDVGVYFCSQTAHFPYTFGGGTKVEIKRTVAAPSVFIFPPSDEQLKSGTASVVCLLNNFYPREAKVQWKVDNALQSGNSQESVTEQDSKDSTYSLSSTLTLSKADYEKHKVYACEVTHQGLSSPVTKSFNRGEC

SEQ ID NO: 3596 - protein, 219 aa, Artificial Sequence
  Description of Artificial Sequence: Synthetic polypeptide
DIVMTQTPLSLPVTPGEPASISCRSSQSLVHSGGKTYLHWYLQKPGQSPQLLIYKVSNRFGGVPDRFSGSGSGTDFTLKISRVEAEDVGVYFCSQTRHFPYTFGGGTKVEIKRTVAAPSVFIFPPSDEQLKSGTASVVCLLNNFYPREAKVQWKVDNALQSGNSQESVTEQDSKDSTYSLSSTLTLSKADYEKHKVYACEVTHQGLSSPVTKSFNRGEC

SEQ ID NO: 3597 - protein, 219 aa, Artificial Sequence
  Description of Artificial Sequence: Synthetic polypeptide
DIVMTQTPLSLPVTPGEPASISCRSSQRLIHRNGKTYLHWYLQKPGQSPQLLIYKVSNRFFGVPDRFSGSGSGTDFTLKISRVEAEDVGVYFCSQTAHFPYTFGGGTKVEIKRTVAAPSVFIFPPSDEQLKSGTASVVCLLNNFYPREAKVQWKVDNALQSGNSQESVTEQDSKDSTYSLSSTLTLSKADYEKHKVYACEVTHQGLSSPVTKSFNRGEC

SEQ ID NO: 3598 - protein, 219 aa, Artificial Sequence
  Description of Artificial Sequence: Synthetic polypeptide
DIVMTQTPLSLPVTPGEPASISCRSSQSLVRSHGKTYLHWYLQKPGQSPQLLIYKVSNRFFGVPDRFSGSGSGTDFTLKISRVEAEDVGVYFCSQTAYFPYTFGGGTKVEIKRTVAAPSVFIFPPSDEQLKSGTASVVCLLNNFYPREAKVQWKVDNALQSGNSQESVTEQDSKDSTYSLSSTLTLSKADYEKHKVYACEVTHQGLSSPVTKSFNRGEC

SEQ ID NO: 3599 - protein, 219 aa, Artificial Sequence
  Description of Artificial Sequence: Synthetic polypeptide
DIVMTQTPLSLPVTPGEPASISCRSSQSLVRSHGKTYLHWYLQKPGQSPQLLIYKVSNRFKGVPDRFSGSGSGTDFTLKISRVEAEDVGVYFCSQTAQFPYTFGGGTKVEIKRTVAAPSVFIFPPSDEQLKSGTASVVCLLNNFYPREAKVQWKVDNALQSGNSQESVTEQDSKDSTYSLSSTLTLSKADYEKHKVYACEVTHQGLSSPVTKSFNRGEC

SEQ ID NO: 3600 - protein, 219 aa, Artificial Sequence
  Description of Artificial Sequence: Synthetic polypeptide
DIVMTQTPLSLPVTPGEPASISCRSSQSLVRSRGKTYLHWYLQKPGQSPQLLIYKVSNRFSGVPDRFSGSGSGTDFTLKISRVEAEDVGVYFCSQTAHFPYTFGGGTKVEIKRTVAAPSVFIFPPSDEQLKSGTASVVCLLNNFYPREAKVQWKVDNALQSGNSQESVTEQDSKDSTYSLSSTLTLSKADYEKHKVYACEVTHQGLSSPVTKSFNRGEC

SEQ ID NO: 3601 - protein, 219 aa, Artificial Sequence
  Description of Artificial Sequence: Synthetic polypeptide
DIVMTQTPLSLPVTPGEPASISCRSSQSLVHSHGRTYLHWYLQKPGQSPQLLIYKVSNRFRGVPDRFSGSGSGTDFTLKISRVEAEDVGVYFCSQTAYFPYTFGGGTKVEIKRTVAAPSVFIFPPSDEQLKSGTASVVCLLNNFYPREAKVQWKVDNALQSGNSQESVTEQDSKDSTYSLSSTLTLSKADYEKHKVYACEVTHQGLSSPVTKSFNRGEC

SEQ ID NO: 3602 - protein, 219 aa, Artificial Sequence
  Description of Artificial Sequence: Synthetic polypeptide
DIVMTQTPLSLPVTPGEPASISCTSSQVLVHSHGKTYLHWYLQKPGQSPQLLIYKVSNRFRGVPDRFSGSGSGTDFTLKISRVEAEDVGVYFCSQTARFPYTFGGGTKVEIKRTVAAPSVFIFPPSDEQLKSGTASVVCLLNNFYPREAKVQWKVDNALQSGNSQESVTEQDSKDSTYSLSSTLTLSKADYEKHKVYACEVTHQGLSSPVTKSFNRGEC

SEQ ID NO: 3603 - protein, 219 aa, Artificial Sequence
  Description of Artificial Sequence: Synthetic polypeptide
DIVMTQTPLSLPVTPGEPASISCRSSQSLVHRHGKTYLHWYLQKPGQSPQLLIYKVSNRFSGVPDRFSGSGSGTDFTLKISRVEAEDVGVYFCSQTAHFPRTFGGGTKVEIKRTVAAPSVFIFPPSDEQLKSGTASVVCLLNNFYPREAKVQWKVDNALQSGNSQESVTEQDSKDSTYSLSSTLTLSKADYEKHKVYACEVTHQGLSSPVTKSFNRGEC

SEQ ID NO: 3604 - protein, 219 aa, Artificial Sequence
  Description of Artificial Sequence: Synthetic polypeptide
DIVMTQTPLSLPVTPGEPASISCRSSQSLVHRRGKTYVHWYLQKPGQSPQLLIYKVSNRFSGVPDRFSGSGSGTDFTLKISRVEAEDVGVYFCSQTAHFPYTFGGGTKVEIKRTVAAPSVFIFPPSDEQLKSGTASVVCLLNNFYPREAKVQWKVDNALQSGNSQESVTEQDSKDSTYSLSSTLTLSKADYEKHKVYACEVTHQGLSSPVTKSFNRGEC

SEQ ID NO: 3605 - protein, 219 aa, Artificial Sequence
  Description of Artificial Sequence: Synthetic polypeptide
DIVMTQTPLSLPVTPGEPASISCRSSQSLVRSHGKTYLHWYLQKPGQSPQLLIYKVSKRFYGVPDRFSGSGSGTDFTLKISRVEAEDVGVYFCSQTAHFPYTFGGGTKVEIKRTVAAPSVFIFPPSDEQLKSGTASVVCLLNNFYPREAKVQWKVDNALQSGNSQESVTEQDSKDSTYSLSSTLTLSKADYEKHKVYACEVTHQGLSSPVTKSFNRGEC

SEQ ID NO: 3606 - protein, 219 aa, Artificial Sequence
  Description of Artificial Sequence: Synthetic polypeptide
DIVMTQTPLSLPVTPGEPASISCRSSQSLVHRHGKTYLHWYLQKPGQSPQLLIYKVSNRFSGVPDRFSGSGSGTDFTLKISRVEAEDVGVYFCSQTAHFPYTFGGGTKVEIKRTVAAPSVFIFPPSDEQLKSGTASVVCLLNNFYPREAKVQWKVDNALQSGNSQESVTEQDSKDSTYSLSSTLTLSKADYEKHKVYACEVTHQGLSSPVTKSFNRGEC

SEQ ID NO: 3607 - protein, 219 aa, Artificial Sequence
  Description of Artificial Sequence: Synthetic polypeptide
DIVMTQTPLSLPVTPGEPASISCRSSQSLVHGHGKTYLHWYLQKPGQSPQLLIYKVRNRFSGVPDRFSGSGSGTDFTLKISRVEAEDVGVYFCSQTAHFPYTFGGGTKVEIKRTVAAPSVFIFPPSDEQLKSGTASVVCLLNNFYPREAKVQWKVDNALQSGNSQESVTEQDSKDSTYSLSSTLTLSKADYEKHKVYACEVTHQGLSSPVTKSFNRGEC

SEQ ID NO: 3608 - protein, 219 aa, Artificial Sequence
  Description of Artificial Sequence: Synthetic polypeptide
DIVMTQTPLSLPVTPGEPASISCRSSQSLVHGHGKTYLHWYLQKPGQSPQLLIYKVSNRFSGVPDRFSGSGSGTDFTLKISRVEAEDVGVYFCSQTARFPYTFGGGTKVEIKRTVAAPSVFIFPPSDEQLKSGTASVVCLLNNFYPREAKVQWKVDNALQSGNSQESVTEQDSKDSTYSLSSTLTLSKADYEKHKVYACEVTHQGLSSPVTKSFNRGEC

SEQ ID NO: 3609 - protein, 219 aa, Artificial Sequence
  Description of Artificial Sequence: Synthetic polypeptide
DIVMTQTPLSLPVTPGEPASISCRSSQSLRHSHGKTYLHWYLQKPGQSPQLLIYKVSHRFSGVPDRFSGSGSGTDFTLKISRVEAEDVGVYFCSQTRHFPYTFGGGTKVEIKRTVAAPSVFIFPPSDEQLKSGTASVVCLLNNFYPREAKVQWKVDNALQSGNSQESVTEQDSKDSTYSLSSTLTLSKADYEKHKVYACEVTHQGLSSPVTKSFNRGEC

SEQ ID NO: 3610 - protein, 219 aa, Artificial Sequence
  Description of Artificial Sequence: Synthetic polypeptide
DIVMTQTPLSLPVTPGEPASISCRSSQSLVHSHGRTYLHWYLQKPGQSPQLLIYKVSNRFFGVPDRFSGSGSGTDFTLKISRVEAEDVGVYFCSQTRHFPYTFGGGTKVEIKRTVAAPSVFIFPPSDEQLKSGTASVVCLLNNFYPREAKVQWKVDNALQSGNSQESVTEQDSKDSTYSLSSTLTLSKADYEKHKVYACEVTHQGLSSPVTKSFNRGEC

SEQ ID NO: 3611 - protein, 219 aa, Artificial Sequence
  Description of Artificial Sequence: Synthetic polypeptide
DIVMTQTPLSLPVTPGEPASISCRSSQSLVRSHGKTYLHWYLQKPGQSPQLLIYKVSNRFLGVPDRFSGSGSGTDFTLKISRVEAEDVGVYFCSQTAHFPYTFGGGTKVEIKRTVAAPSVFIFPPSDEQLKSGTASVVCLLNNFYPREAKVQWKVDNALQSGNSQESVTEQDSKDSTYSLSSTLTLSKADYEKHKVYACEVTHQGLSSPVTKSFNRGEC

SEQ ID NO: 3612 - protein, 166 aa, Mus musculus
MGTDQSPQAVSSGCLLKMKLPVRLLVLMFWIPASNSDVVMTQTPLSLPVSLGDQASISCRSSQSLVHSDGNTYLHWYLQKPGQSPKLLIYKVSNRFSGVPDRFSGSGSGTDFTLKISRLEAEDLGVYFCSQSTHVPWTFGGGTKLEIKRADAAPTVSIFPPSSKLG

SEQ ID NO: 3613 - protein, 145 aa, Mus musculus
MMSSAQFLGLLLLCFQGTRCDIQMTQTTSSLSASLGDRVTISCRASQDISNYLNWYQQKPDGTVKLLIYYTSRLHSGVPSRFSGSGSGTDYSLTISNLEQEDIATYFCQQGNTLPWTFGGGTKLEIKRADAAPTVSIFPPSSKLG

SEQ ID NO: 3614 - protein, 148 aa, Mus musculus
MESQTQVFLSLLLWVSGTCGNIMMTQSPSSLAVSAGEKVTMSCKSSQSVLYSSDLKNYLAWYQQKPGQSPTLLIYWASTRESGVPDRFTGSGSGTDFTLTISSVQAEDLAVYYCHQYLSSYTFGGGTKLEIKRADAAPTVSIFPPSSK

SEQ ID NO: 3615 - protein, 151 aa, Mus musculus
MDSQAQVLMLLLLWVSGTCGDIVMSQSPSSLAVSVGEKVTMSCKSSQSLLYTGNQKNYLAWYQQKPGQSPKLLIYWASTRESGVPDRFTGSGSGTDFTLTISSVKAEDLAVYYCQQYYSYPWTFGGGTKLEIKRADAAPTVSIFPPSSKLG

SEQ ID NO: 3616 - protein, 120 aa, Homo sapiens; identical to SEQ ID NO: 3100

SEQ ID NO: 3617 - protein, 112 aa, Artificial Sequence; identical to SEQ ID NO: 3257
  Description of Artificial Sequence: Synthetic polypeptide

SEQ ID NO: 3618 - protein, 209 aa, Artificial Sequence
  Description of Artificial Sequence: Synthetic polypeptide
  pT231/pS235 lightchain
ALTQPTSVSANLGGSVEITCSGSDYDYGWYQQKAPGSAPVTVIYWNDKRPSDIPSRFSGSTSGSTSTLTITGVQAEDEAVYYCGAYDGSAGGGIFGAGTTLTVLGQPKAAPSVTLFPPSSEELQANKATLVCLISDFYPGAVTVAWKADSSPVKAGVETTTPSKQSNNKYAASSYLSLTPEQWKSHRSYSCQVTHEGSTVEKTVAPTEC

SEQ ID NO: 3619 - protein, 219 aa, Artificial Sequence
  Description of Artificial Sequence: Synthetic polypeptide
DIVMSQSPLSLPVTPGEPASISCKSSQSLLNSRTRKNYLAWYLQKPGQSPQLLIYWASTRESGVPDRFTGSGSGTDFTLKISRVEAEDVGVYYCKQSFYLRTFGQGTKVEIKRTVAAPSVFIFPPSDEQLKSGTASVVCLLNNFYPREAKVQWKVDNALQSGNSQESVTEQDSKDSTYSLSSTLTLSKADYEKHKVYACEVTHQGLSSPVTKSFNRGEC

SEQ ID NO: 3620 - DNA, 336 bp, Artificial Sequence; identical to SEQ ID NO: 3583
  Description of Artificial Sequence: Synthetic polynucleotide

SEQ ID NO: 3621 - protein, 216 aa, Artificial Sequence
  Description of Artificial Sequence: Synthetic polypeptide
  chimaera
QSALTQPRSVSGSPGQSVTISCTGTSSDVGGYNYVSWHQQHPGKAPKLLIYDVTKRPSGVPDRFSGSKSGNTAALTISGLQAEDEADYYCHSYVGSYTLVFGGGTKLTVLGQPKSSPSVTLFPPSSEELETNKATLVCTITDFYPGVVTVDWKVDGTPVTQGMETTQPSKQSNNKYMASSYLTLTARAWERHSSYSCQVTHEGHTVEKSLSRADCS

SEQ ID NO: 3622 - protein, 214 aa, Artificial Sequence
  Description of Artificial Sequence: Synthetic polypeptide
  chimaera
DIQMTQSPSSLSASVGDRVTITCRASQGIVNNLAWFQQKPGKAPKSLIYAASSLQGGVPSKFSGSASGTDFSLTISNLQPEDFATYFCQQYNSYPWTFGQGTKVEIKRADAAPTVSIFPPSSEQLTSGGASVVCFLNNFYPKDINVKWKIDGSERQNGVLNSWTDQDSKDSTYSMSSTLTLTKDEYERHNSYTCEATHKTSTSPIVKSFNRNEC

SEQ ID NO: 3623 - protein, 217 aa, Artificial Sequence
  Description of Artificial Sequence: Synthetic polypeptide
  chimaera
QSALTQPPSASGSPGHSVTISCTGTSSDVGNYSFVSWYQQYPGKAPKIIIYDVSKRSSGVPDRFFGSKSANTASLTVSGVQEEDEADYFCSSYGGSKYPWVFGGGTKLTVLGQPKSSPSVTLFPPSSEELETNKATLVCTITDFYPGVVTVDWKVDGTPVTQGMETTQPSKQSNNKYMASSYLTLTARAWERHSSYSCQVTHEGHTVEKSLSRADCS

SEQ ID NO: 3624 - protein, 213 aa, Artificial Sequence
  Description of Artificial Sequence: Synthetic polypeptide
  chimaera
YELTQPPSVSVSPGQTARITCSGDALPKRYVYWYQQKSGQAPVLVIYEDSKRPSGIPETFSGSSSGTMATLTISGAQVEDEADYYCYSTDSNGHHWVFGGGTKLTVLGQPKSSPSVTLFPPSSEELETNKATLVCTITDFYPGVVTVDWKVDGTPVTQGMETTQPSKQSNNKYMASSYLTLTARAWERHSSYSCQVTHEGHTVEKSLSRADCS

SEQ ID NO: 3625 - protein, 217 aa, Artificial Sequence
  Description of Artificial Sequence: Synthetic polypeptide
  chimaera
QSALTQPPSASGSPGHSVTISCTGTSSDVGQYSFVSWYQQYPGKAPKIIIYDVSKRSSGVPDRFFGSKSANTASLTVSGVQEEDEADYFCSSYGGSKYPWVFGGGTKLTVLGQPKSSPSVTLFPPSSEELETNKATLVCTITDFYPGVVTVDWKVDGTPVTQGMETTQPSKQSNNKYMASSYLTLTARAWERHSSYSCQVTHEGHTVEKSLSRADCS

SEQ ID NO: 3626 - protein, 107 aa, Homo sapiens [sequence omitted]

SEQ ID NO: 3627 - protein, 106 aa, Homo sapiens
TVAAPSVFIFPPSDEQLKSGTASVVCLLNNFYPREAKVQWKVDNALQSGNSQESVTEQDSKDSTYSLSSTLTLSKADYEKHKVYACEVTHQGLSSPVTKSFNRGEC

SEQ ID NO: 3628 - protein, 216 aa, Artificial Sequence
  Description of Artificial Sequence: Synthetic polypeptide
  chimaera
QSALTQPRSVSGSPGQSVTISCTGTSSDVGGYNYVSWHQQHPGKAPKLLIYDVTKRPSGVPDRFSGSKSGNTAALTISGLQAEDEADYYCHSYVGSYTLVFGGGTKLTVLGQPKAAPSVTLFPPSSEELQANKATLVCLISDFYPGAVTVAWKADSSPVKAGVETTTPSKQSNNKYAASSYLSLTPEQWKSHRSYSCQVTHEGSTVEKTVAPTECS

SEQ ID NO: 3629 - protein, 217 aa, Artificial Sequence
  Description of Artificial Sequence: Synthetic polypeptide
  chimaera
QSALTQPPSASGSPGHSVTISCTGTSSDVGQYSFVSWYQQYPGKAPKVIIYDVSKRSSGVPDRFFGSKSANTASLTVSGVQEEDEADYFCSSYGGSKYPWVFGGGTKLTVLGQPKSSPSVTLFPPSSEELETNKATLVCTITDFYPGVVTVDWKVDGTPVTQGMETTQPSKQSNNKYMASSYLTLTARAWERHSSYSCQVTHEGHTVEKSLSRADCS

SEQ ID NO: 3630 - protein, 213 aa, Artificial Sequence; identical to SEQ ID NO: 3195
  Description of Artificial Sequence: Synthetic polypeptide
  mature ch4E4 light chain (mouse lambda)

SEQ ID NO: 3631 - protein, 108 aa, Homo sapiens; identical to SEQ ID NO: 3254

SEQ ID NO: 3632 - protein, 108 aa, Homo sapiens; identical to SEQ ID NO: 3253

SEQ ID NO: 3633 - protein, 107 aa, Homo sapiens; identical to SEQ ID NO: 3252

SEQ ID NO: 3634 - protein, 112 aa, Mus musculus; identical to SEQ ID NO: 3284

SEQ ID NO: 3635 - protein, 107 aa, Mus musculus; identical to SEQ ID NO: 3285

SEQ ID NO: 3636 - protein, 112 aa, Artificial Sequence
  Description of Artificial Sequence: Synthetic polypeptide
DIVMTQSPLSLPVTPGEPASISCKSSQSLLNSRTRKNYLAWYLQKPGQSPQLLIYWASTRESGVPDRFTGSGSGTDFTLKISRVEAEDVGVYYCKQSFYLRTFGQGTKVEIK

SEQ ID NO: 3637 - protein, 112 aa, Artificial Sequence
  Description of Artificial Sequence: Synthetic polypeptide
DIVMSQSPLSLPVTPGEPASISCKSSQSLLNSRTRKNYLAWYLQKPGQSPQLLIYWASTRESGVPDRFTGSGSGTDFTLKISRVEAEDVGVYYCKQSFYLRTFGQGTKVEIK

SEQ ID NO: 3638 - DNA, 336 bp, Artificial Sequence
  Description of Artificial Sequence: Synthetic polynucleotide
gacattgtgatgtcacagtctccatcctccctggctgtgtcagcaggagagaaggtcactatgagctgcaaatccagtcagagtctgctcaacagtagaacccgaaagaactacctggcttggtaccagcagaaaccagggcagtctcctaaactgctgatctactgggcatccactagggaatctggggtccctgatcgcttcacaggcagtggatctgggacagatttcactctcaccatcagcagtgtgcaggctgaagacctggcagtttattactgcaagcaatctttttatcttcggacgttcggtggaggcaccaagctggacatcaaa

SEQ ID NO: 3639 - protein, 107 aa, Homo sapiens
YELTQPPSVSVSPGQTAGITCSGDALPKQFVYWYQKKPGQAPVLLIYKDTERPSRIPERFSGSTSGTTVALTINGVQAEDEADYYCQSADRSGALWVFGGGTKLTVL

SEQ ID NO: 3640 - protein, 112 aa, Artificial Sequence
  Description of Artificial Sequence: Synthetic polypeptide
  variable region of the light chain
DIVMTQSTLSLPVSLGDQASISCRSSQSIVHSNGNTYLEWYLQKPGQSPKLLIYKVSNRFSGVPDRFSGSGSGTDFTLKISRVEAEDLGVYYCFQGSHVPRTFGGGTKLEIK

SEQ ID NO: 3641 - protein, 112 aa, Artificial Sequence
  Description of Artificial Sequence: Synthetic polypeptide
DIVMTQTPLSLPVTPGEPASISCRSSQSLVHRNGKTYLHWYLQKPGQSPQLLIYKVSNRFSGVPDRFSGSGSGTDFTLKISRVEAEDVGVYFCSQTARFPYTFGGGTKVEIK

SEQ ID NO: 3642 - protein, 112 aa, Artificial Sequence
  Description of Artificial Sequence: Synthetic polypeptide
DIVMTQTPLSLPVTPGEPASISCRSSQSLVHSRGKTYLHWYLQKPGQSPQLLIYKVSNRFFGVPDRFSGSGSGTDFTLKISRVEAEDVGVYFCSQTARFPYTFGGGTKVEIK

SEQ ID NO: 3643 - protein, 112 aa, Artificial Sequence
  Description of Artificial Sequence: Synthetic polypeptide
DIVMTQTPLSLPVTPGEPASISCRSSQSLVHSKGKTYLHWYLQKPGQSPQLLIYKVKNRFSGVPDRFSGSGSGTDFTLKISRVEAEDVGVYFCSQTAHFPRTFGGGTKVEIK

SEQ ID NO: 3644 - protein, 112 aa, Artificial Sequence
  Description of Artificial Sequence: Synthetic polypeptide
DIVMTQTPLSLPVTPGEPASISCRSSQSLVRSRGKTYLHWYLQKPGQSPQLLIYKVSNRFSGVPDRFSGSGSGTDFTLKISRVEAEDVGVYFCSQTAQFPYTFGGGTKVEIK

SEQ ID NO: 3645 - protein, 112 aa, Artificial Sequence
  Description of Artificial Sequence: Synthetic polypeptide
DIVMTQTPLSLPVTPGEPASISCRSSQSLVHKHGKTYLHWYLQKPGQSPQLLIYKVRNRFSGVPDRFSGSGSGTDFTLKISRVEAEDVGVYFCSQTAHFPYTFGGGTKVEIK

SEQ ID NO: 3646 - protein, 112 aa, Artificial Sequence
  Description of Artificial Sequence: Synthetic polypeptide
DIVMTQTPLSLPVTPGEPASISCRSSQSLVHSGGKTYLHWYLQKPGQSPQLLIYKVSNRFGGVPDRFSGSGSGTDFTLKISRVEAEDVGVYFCSQTRHFPYTFGGGTKVEIK

SEQ ID NO: 3647 - protein, 112 aa, Artificial Sequence
  Description of Artificial Sequence: Synthetic polypeptide
DIVMTQTPLSLPVTPGEPASISCRSSQRLIHRNGKTYLHWYLQKPGQSPQLLIYKVSNRFFGVPDRFSGSGSGTDFTLKISRVEAEDVGVYFCSQTAHFPYTFGGGTKVEIK

SEQ ID NO: 3648 - protein, 112 aa, Artificial Sequence
  Description of Artificial Sequence: Synthetic polypeptide
DIVMTQTPLSLPVTPGEPASISCRSSQSLVRSHGKTYLHWYLQKPGQSPQLLIYKVSNRFFGVPDRFSGSGSGTDFTLKISRVEAEDVGVYFCSQTAYFPYTFGGGTKVEIK

SEQ ID NO: 3649 - protein, 112 aa, Artificial Sequence
  Description of Artificial Sequence: Synthetic polypeptide
DIVMTQTPLSLPVTPGEPASISCRSSQSLVRSHGKTYLHWYLQKPGQSPQLLIYKVSNRFKGVPDRFSGSGSGTDFTLKISRVEAEDVGVYFCSQTAQFPYTFGGGTKVEIK

SEQ ID NO: 3650 - protein, 112 aa, Artificial Sequence
  Description of Artificial Sequence: Synthetic polypeptide
DIVMTQTPLSLPVTPGEPASISCRSSQSLVRSRGKTYLHWYLQKPGQSPQLLIYKVSNRFSGVPDRFSGSGSGTDFTLKISRVEAEDVGVYFCSQTAHFPYTFGGGTKVEIK

SEQ ID NO: 3651 - protein, 112 aa, Artificial Sequence
  Description of Artificial Sequence: Synthetic polypeptide
DIVMTQTPLSLPVTPGEPASISCRSSQSLVHSHGRTYLHWYLQKPGQSPQLLIYKVSNRFRGVPDRFSGSGSGTDFTLKISRVEAEDVGVYFCSQTAYFPYTFGGGTKVEIK

SEQ ID NO: 3652 - protein, 112 aa, Artificial Sequence
  Description of Artificial Sequence: Synthetic polypeptide
DIVMTQTPLSLPVTPGEPASISCTSSQVLVHSHGKTYLHWYLQKPGQSPQLLIYKVSNRFRGVPDRFSGSGSGTDFTLKISRVEAEDVGVYFCSQTARFPYTFGGGTKVEIK

SEQ ID NO: 3653 - protein, 112 aa, Artificial Sequence
  Description of Artificial Sequence: Synthetic polypeptide
DIVMTQTPLSLPVTPGEPASISCRSSQSLVHRHGKTYLHWYLQKPGQSPQLLIYKVSNRFSGVPDRFSGSGSGTDFTLKISRVEAEDVGVYFCSQTAHFPRTFGGGTKVEIK

SEQ ID NO: 3654 - protein, 112 aa, Artificial Sequence
  Description of Artificial Sequence: Synthetic polypeptide
DIVMTQTPLSLPVTPGEPASISCRSSQSLVHRRGKTYVHWYLQKPGQSPQLLIYKVSNRFSGVPDRFSGSGSGTDFTLKISRVEAEDVGVYFCSQTAHFPYTFGGGTKVEIK

SEQ ID NO: 3655 - protein, 112 aa, Artificial Sequence
  Description of Artificial Sequence: Synthetic polypeptide
DIVMTQTPLSLPVTPGEPASISCRSSQSLVRSHGKTYLHWYLQKPGQSPQLLIYKVSKRFYGVPDRFSGSGSGTDFTLKISRVEAEDVGVYFCSQTAHFPYTFGGGTKVEIK

SEQ ID NO: 3656 - protein, 112 aa, Artificial Sequence
  Description of Artificial Sequence: Synthetic polypeptide
DIVMTQTPLSLPVTPGEPASISCRSSQSLVHRHGKTYLHWYLQKPGQSPQLLIYKVSNRFSGVPDRFSGSGSGTDFTLKISRVEAEDVGVYFCSQTAHFPYTFGGGTKVEIK

SEQ ID NO: 3657 - protein, 112 aa, Artificial Sequence
  Description of Artificial Sequence: Synthetic polypeptide
DIVMTQTPLSLPVTPGEPASISCRSSQSLVHGHGKTYLHWYLQKPGQSPQLLIYKVRNRFSGVPDRFSGSGSGTDFTLKISRVEAEDVGVYFCSQTAHFPYTFGGGTKVEIK

SEQ ID NO: 3658 - protein, 112 aa, Artificial Sequence
  Description of Artificial Sequence: Synthetic polypeptide
DIVMTQTPLSLPVTPGEPASISCRSSQSLVHGHGKTYLHWYLQKPGQSPQLLIYKVSNRFSGVPDRFSGSGSGTDFTLKISRVEAEDVGVYFCSQTARFPYTFGGGTKVEIK

SEQ ID NO: 3659 - protein, 112 aa, Artificial Sequence
  Description of Artificial Sequence: Synthetic polypeptide
DIVMTQTPLSLPVTPGEPASISCRSSQSLRHSHGKTYLHWYLQKPGQSPQLLIYKVSHRFSGVPDRFSGSGSGTDFTLKISRVEAEDVGVYFCSQTRHFPYTFGGGTKVEIK

SEQ ID NO: 3660 - protein, 112 aa, Artificial Sequence
  Description of Artificial Sequence: Synthetic polypeptide
DIVMTQTPLSLPVTPGEPASISCRSSQSLVHSHGRTYLHWYLQKPGQSPQLLIYKVSNRFFGVPDRFSGSGSGTDFTLKISRVEAEDVGVYFCSQTRHFPYTFGGGTKVEIK

SEQ ID NO: 3661 - protein, 112 aa, Artificial Sequence
  Description of Artificial Sequence: Synthetic polypeptide
DIVMTQTPLSLPVTPGEPASISCRSSQSLVRSHGKTYLHWYLQKPGQSPQLLIYKVSNRFLGVPDRFSGSGSGTDFTLKISRVEAEDVGVYFCSQTAHFPYTFGGGTKVEIK

SEQ ID NO: 3662 - protein, 112 aa, Artificial Sequence; identical to SEQ ID NO: 3300
  Description of Artificial Sequence: Synthetic polypeptide

SEQ ID NO: 3663 - protein, 111 aa, Homo sapiens; identical to SEQ ID NO: 3263

SEQ ID NO: 3664 - protein, 111 aa, Artificial Sequence; identical to SEQ ID NO: 3261
  Description of Artificial Sequence: Synthetic polypeptide
  chimaera

SEQ ID NO: 3665 - protein, 111 aa, Artificial Sequence; identical to SEQ ID NO: 3262
  Description of Artificial Sequence: Synthetic polypeptide
  chimaera

SEQ ID NO: 3666 - protein, 108 aa, Homo sapiens; identical to SEQ ID NO: 3264

SEQ ID NO: 3667 - protein, 113 aa, Homo sapiens; identical to SEQ ID NO: 3265

SEQ ID NO: 3668 - protein, 108 aa, Homo sapiens; identical to SEQ ID NO: 3266

SEQ ID NO: 3669 - protein, 110 aa, Homo sapiens; identical to SEQ ID NO: 3267

SEQ ID NO: 3670 - protein, 113 aa, Homo sapiens; identical to SEQ ID NO: 3268

SEQ ID NO: 3671 - protein, 107 aa, Homo sapiens; identical to SEQ ID NO: 3269

SEQ ID NO: 3672 - protein, 113 aa, Homo sapiens; identical to SEQ ID NO: 3270

SEQ ID NO: 3673 - protein, 113 aa, Homo sapiens; identical to SEQ ID NO: 3272

SEQ ID NO: 3674 - protein, 113 aa, Homo sapiens; identical to SEQ ID NO: 3273

SEQ ID NO: 3675 - protein, 113 aa, Homo sapiens; identical to SEQ ID NO: 3274

SEQ ID NO: 3676 - protein, 113 aa, Homo sapiens; identical to SEQ ID NO: 3275

SEQ ID NO: 3677 - protein, 110 aa, Homo sapiens; identical to SEQ ID NO: 3276

SEQ ID NO: 3678 - protein, 113 aa, Homo sapiens; identical to SEQ ID NO: 3277

SEQ ID NO: 3679 - protein, 108 aa, Homo sapiens; identical to SEQ ID NO: 3279

SEQ ID NO: 3680 - protein, 112 aa, Artificial Sequence
  Description of Artificial Sequence: Synthetic polypeptide
DVVMTQSPLSLPVTPGEPASISCRSSQSIVHSNGNTYLEWYLQKPGQSPQLLIYKASNRFSGVPDRFSGSGSGTDFTLKISRVEAEDVGVYYCFQGSRLGPSFGQGTKLEIL

SEQ ID NO: 3681 - protein, 70 aa, Artificial Sequence
  Description of Artificial Sequence: Synthetic polypeptide
DIVMTQSPLSLPVTPGEPASISCWYLQKPGQSPQLLIYGVPDRFSGSGSGTDFTLKISRVEAEDVGVYYC

SEQ ID NO: 3682 - protein, 95 aa, Artificial Sequence
  Description of Artificial Sequence: Synthetic polypeptide
PASISCRSSQSIVHSNGNTYLEWYLQKPGQSPQLLIYKASNRFSGVPDRFSGSGSGTDFTLKISRVEAEDVGVYYCFQGSHVPPTFGQGTKLEIK

SEQ ID NO: 3683 - protein, 95 aa, Artificial Sequence
  Description of Artificial Sequence: Synthetic polypeptide
PASISCRSSQSIVHSNGNTYLEWYLQKPGQSPQLLIYKASNRFSGVPDRFSGSGSGTDFTLKISRVEAEDVGVYYCFQGSRLGPSFGQGTKLEIK

SEQ ID NO: 3684 - protein, 95 aa, Artificial Sequence
  Description of Artificial Sequence: Synthetic polypeptide
PASISCRSSQSIVHSNGNTYLEWYLQKPGQSPQLLIYKASNRFSGVPDRFSGSGSGTDFTLKISRVEAEDVGVYYCFQGSRVPASFGQGTKLEIK

SEQ ID NO: 3685 - protein, 95 aa, Artificial Sequence
  Description of Artificial Sequence: Synthetic polypeptide
PASISCRSSQSIVHSNGNTYLEWYLQKPGQSPQLLIYKASNRFSGVPDRFSGSGSGTDFTLKISRVEAEDVGVYYCFQGSRVPPGFGQGTKLEIK

SEQ ID NO: 3686 - protein, 95 aa, Artificial Sequence
  Description of Artificial Sequence: Synthetic polypeptide
PASISCRSSQSIVHSNGNTYLEWYLQKPGQSPQLLIYKASNRFSGVPDRFSGSGSGTDFTLKISRVEAEDVGVYYCFQGSKAHPSFGQGTKLEIK

SEQ ID NO: 3687 - protein, 95 aa, Artificial Sequence
  Description of Artificial Sequence: Synthetic polypeptide
PASISCRSSQSIVHSNGNTYLEWYLQKPGQSPQLLIYKASNRFSGVPDRFSGSGSGTDFTLKISRVEAEDVGVYYCFQGSYAPPGFGQGTKLEIK

SEQ ID NO: 3688 - protein, 95 aa, Artificial Sequence
  Description of Artificial Sequence: Synthetic polypeptide
PASISCRSSQSIVHSNGNTYLEWYLQKPGQSPQLLIYKASNRFSGVPDRFSGSGSGTDFTLKISRVEAEDVGVYYCFQGSRAPPFFGQGTKLEIK

SEQ ID NO: 3689 - protein, 95 aa, Artificial Sequence
  Description of Artificial Sequence: Synthetic polypeptide
PASISCRSSQSIVHSNGNTYLEWYLQKPGQSPQLLIYKASNRFSGVPDRFSGSGSGTDFTLKISRVEAEDVGVYYCFQGSRVPVRFGQGTKLEIK

SEQ ID NO: 3690 - protein, 131 aa, Mus sp.
MKLPVRLLVLMFWIPASSSDVLMTQTPLSLPVSLGDQASISCRSSQSIVHSNGSTYLEWYLQKPGQSPKLLIYKVSNRFSGVPDRFSGSGSGTDFTLKINRVEAEDLGVYYCFQGSHVPWTFGGGTKLEIK

SEQ ID NO: 3691 - protein, 109 aa, Homo sapiens
EIVLTQSPSSLSASVGDRVTITCRASQSISSYLNWYQQKPGKAPKLLIYAASSLQSGVPSRFSGSGSGTDFTLTISSLQPEDFATYYCQQSYSTPLTFGGGTKLEIKRT

SEQ ID NO: 3692 - protein, 110 aa, Homo sapiens
DEIVLTQSPSSLSASIGDRVTITCRASESINKYVNWYQQKPGKAPKLLIYAASSLQSGAPSRVSGSGFGRDFSLTISGLQAEDFGAYFCQQSYSAPYTFGQGTKVEIKRT

SEQ ID NO: 3693 - protein, 110 aa, Homo sapiens
QSVLTQPPSASGTPGQRVTISCSGSSSNIGSNYVYWYQQPPGTAPKLLIYRNNQRPSGVPDRFSGSKSGTSASLAISGLRSEDEADYYCAAWDDSLSGYVFGTGTKVTVL

SEQ ID NO: 3694 - protein, 108 aa, Homo sapiens
DIQMTQSPSSLSASVGDRVTITCRASQSISSYLNWYQQKPGKAPKLLIYAASSLQSGVPSRFSGSGSGTDFTLTISSLQPEDFATYYCQQSYSTPLTFGGGTKVEIKR

SEQ ID NO: 3695 - protein, 107 aa, Homo sapiens
DIQLTQSPSSLSASVGDRVTITCRASQSISSYLNWYQQKPGKAPKLLIYAASSLQSGVPSRFSGSGSGTDFTLTISSLQPEDFATYYCQQSYSTRTFGQGTKVEIKR

SEQ ID NO: 3696 - protein, 108 aa, Homo sapiens
DIQLTQSPSTLSASVGDRVTITCRASQSISSWLAWYQQIPGKAPKLLIYKASSLESGVPSRFSGSGSGTEFTLTISSLQPDDFATYYCQQYNSYSRTFGQGTKLEIKR

SEQ ID NO: 3697 - protein, 109 aa, Mus musculus
DVLMTQTPLSLPVSLGDHASISCRSSQNIVHSNGNTYLEWYLQKPGQSPKVLIYTVSNRFSGVPDRFSGSGSGTDFTLKISRVEAEDLGVYYCFQGSHLPLTFGGGTKL

SEQ ID NO: 3698 - protein, 109 aa, Mus musculus
DILMTQTPLSLPVSLGDQASISCRSSQNIVHSNGNTYLEWYLQKPGQSPKVLIYTVSNRFSGVPDRFSGSGSGTDFTLKISRVEAEDLGVYYCFQGSHLPLTFGGGTKL

SEQ ID NO: 3699 - protein, 109 aa, Mus musculus
GVLMTQIPLSLPVSLGDQASISCRSSQNIVHSNGNTYLEWYLQKPGQSPKVLIYTVSNRFSGVPDRFSGSGSGTDFTLKISRVEAEDLGVYYCFQGSHLPLTFGGGTKL

SEQ ID NO: 3700 - protein, 109 aa, Mus musculus
DVLLTQTPLSLPVSLGDQASISCRSSQNIVHSNGNTYLEWYLQKPGQSPKVLIYTVSNRFSGVPDRFSGSGSGTDFTLKISRVEAEDLGVYYCFQGSHLPLTFGGGTKL

SEQ ID NO: 3701 - protein, 109 aa, Mus musculus
VVLMTQTPLSLPVSLGDQASISCRSSQNIVHSNGNTYLEWYLQKPGQSPKVLIYTVSNRFSGVPDRFSGSGSGTDFTLKISRVEAEDLGVYYCFQGSHLPLTFGGGTKL

SEQ ID NO: 3702 - protein, 109 aa, Mus musculus
DVLMTQSPLSLPVSLGDQASISCRSSQNIVHTNGNTYLEWYLQKPGQSPKVLIYTVSNRFSGVPDRFSGSGSGTDFTLKISRVEAEDLGVYYCFQGSHLPLTFGGGTKL

SEQ ID NO: 3703 - protein, 112 aa, Mus sp.; identical to SEQ ID NO: 3258

SEQ ID NO: 3704 - protein, 112 aa, Artificial Sequence; identical to SEQ ID NO: 3259
  Description of Artificial Sequence: Synthetic polypeptide

SEQ ID NO: 3705 - protein, 112 aa, Artificial Sequence; identical to SEQ ID NO: 3260
  Description of Artificial Sequence: Synthetic polypeptide

SEQ ID NO: 3706 - protein, 112 aa, Artificial Sequence; identical to SEQ ID NO: 3171
  Description of Artificial Sequence: Synthetic polypeptide

SEQ ID NO: 3707 - protein, 112 aa, Artificial Sequence; identical to SEQ ID NO: 2977
  Description of Artificial Sequence: Synthetic polypeptide

SEQ ID NO: 3708 - protein, 108 aa, Artificial Sequence
  Description of Artificial Sequence: Synthetic polypeptide
  combination of PCR-generated and human sequence
DIVMTQSPDTLSLSPGERATLSCRASQIISSNYLAWYQQQPGQAPRLLIYGASSRATGIPDRFSGSGSATDFTLTISRLEPEDFAVYYCQQYGTSPRTFGQGTKLEIK

SEQ ID NO: 3709 - protein, 113 aa, Artificial Sequence
  Description of Artificial Sequence: Synthetic polypeptide
  combination of PCR-generated and human sequence
ETTLTQSPDSLAVSLGERATINCKSSQSVLYSSNNKNYLAWYQQKPGQPPKVLIYWASTRESGVPDRFSGSGSGTDFTLTISSLQAEDVAVYYCQQYYSPPLTFGGGTKLEIK

SEQ ID NO: 3710 - protein, 107 aa, Artificial Sequence
  Description of Artificial Sequence: Synthetic polypeptide
  combination of PCR-generated and human sequence
EIVMTQSPATLSVSPGERATLSCRASQSVGANLAWYQQKPGQAPRLLIYSASTRATGVPARFSGSGSGTEFTLTISSLQSEDFAVYYCQQYNNWPRTFGQGTKVEIK

SEQ ID NO: 3711 - protein, 113 aa, Artificial Sequence
  Description of Artificial Sequence: Synthetic polypeptide
  combination of PCR-generated and human sequence
EIVLTQSPDSLAVSLGERANINCKSSQSVLYSSNNKNYLAWYQQKSGQPPKLLIYWASTRESGVPDRFSGSGSGTDFTLTISSLQAEDVAVYYCQQYYSTPLTFGGGTKVDIK

SEQ ID NO: 3712 - protein, 113 aa, Artificial Sequence
  Description of Artificial Sequence: Synthetic polypeptide
  combination of PCR-generated and human sequence
DIQMTQSPDSLAVSLGERATINCKSSQSLLYNSNNKNYLTWYQQKPGQPPKLLIYWASTRESGVPDRFSGSGSGTDFTLTISSLQAEDVAVYYCQQYYSSPLTFGGGTKVEIK

SEQ ID NO: 3713 - protein, 112 aa, Artificial Sequence
  Description of Artificial Sequence: Synthetic polypeptide
  combination of PCR-generated and human sequence
DVVMTQSPLSLPVTPGEPASISCRSSQSLLHRSGHKYLHWYLQRPGQSPQVLIYLGSNRASGVPDRFSGSGSGTDFTLKISRVEAEDVGLYYCMQTLQTPWTFGQGTKVEIK

SEQ ID NO: 3714 - protein, 113 aa, Artificial Sequence
  Description of Artificial Sequence: Synthetic polypeptide
  combination of PCR-generated and human sequence
DIQMTQSPDSLAVSLGERATINCKSSESLLYDSNNKNYLAWYQQKPGQPPKLLIYWASTRESGVPDRFSGSGSETDFTLTISSLQAEDVAVYHCQQYFSTPWTFGQGTKLEIK

SEQ ID NO: 3715 - protein, 113 aa, Artificial Sequence
  Description of Artificial Sequence: Synthetic polypeptide
  combination of PCR-generated and human sequence
DIQLTQSPDSLAVSLGERATINCKSSQSVFSRDNNKNYLAWYQHKSGQPPKLLFFWASSRESGVSDRFSGSGSGTDFTLTIDNLQAEDVALYYCQHYFNTPHNFGQGTKLEIK

SEQ ID NO: 3716 - protein, 113 aa, Artificial Sequence
  Description of Artificial Sequence: Synthetic polypeptide
  combination of PCR-generated and human sequence
DIQMTQSPDSLAVSLGERATINCESSQTLLYSSNEKNYLAWYQQKPGQPPKLLISWASTPESGVPDRFSGSGSGTSFTLTISSLQAEDVAVYYCQQYYNSPYTFGQGTRLEIK

SEQ ID NO: 3717 - protein, 113 aa, Artificial Sequence
  Description of Artificial Sequence: Synthetic polypeptide
  combination of PCR-generated and human sequence
DIQMTQSPDSLAVSLGERVTITCESSHSLLYRSNNRNYLAWYQQKPRQPPKLLIYWASTRESGVPDRFSGSGSETDFTLTISSLRAEDVAVYYCQQFYTTPYTFGQGTKVEIK

SEQ ID NO: 3718 - protein, 113 aa, Artificial Sequence
  Description of Artificial Sequence: Synthetic polypeptide
  combination of PCR-generated and human sequence
AIQLTQSPDSLAVSLGERVTISCESSHSLLYRSNNKNYLAWYQQKPRQPPKLLIYWASTRESGVPDRFSGSGSETDFTLTISSLRAEDVAVYYCQQFYTTPYTFGQGTKLEIK

SEQ ID NO: 3719 - protein, 113 aa, Artificial Sequence
  Description of Artificial Sequence: Synthetic polypeptide
  combination of PCR-generated and human sequence
EIVLTQSPDSLAVSLGERVTISCESSHSLLYRSNNKNYLAWYQQKPRQPPKLLIYWASTRESGVPDRFSGSGSETDFTLTISSLRAEDVAVYYCQQFYTTPYTFGQGTKLEIK

SEQ ID NO: 3720 - protein, 113 aa, Artificial Sequence
  Description of Artificial Sequence: Synthetic polypeptide
  combination of PCR-generated and human sequence
EIVLTQSPASLAVSLGERATINCKSSQSVLYSSNSENYLAWYQQKPGQPPKLLIYWASTRESGVPDRFSGSGSGTDFTLTISSLQAEDVAVYYCQQYYSTPFTFGQGTRLEIK

SEQ ID NO: 3721 - protein, 108 aa, Artificial Sequence
  Description of Artificial Sequence: Synthetic polypeptide
  combination of PCR-generated and human sequence
DIQMTQSPGTLSLSPGERATLSCRASQSVSSSYLAWYQQKPGQAPRLLIYGASSRATGIPDRFSGSGSGTDFTLTISRLEPEDFAVYYCQQYGTSPLTFGGGTKVEIK

SEQ ID NO: 3722 - protein, 108 aa, Artificial Sequence
  Description of Artificial Sequence: Synthetic polypeptide
  combination of PCR-generated and human sequence
EIVLTQSPLSLPATLGQPASISCRSSAGLRNNDGDILLSWFHQRPGQSPRRLFYRVSRRDSGVPDRFNGSGSATDFTLRINSVEAEDVGIYYCMRGPYWGQGTRLEIK

SEQ ID NO: 3723 - protein, 113 aa, Artificial Sequence
  Description of Artificial Sequence: Synthetic polypeptide
  combination of PCR-generated and human sequence
DIQLTQSPDSLAVSLGERATINCKSSQTLLYKSNNENYLAWYQQKPGQPPKLLIYWASTRESGVPDRFSGSGSGTDFTLTISSLQAEDVAVYYCQQYFTTALTFGGGTKVEIK

SEQ ID NO: 3724 - protein, 113 aa, Artificial Sequence
  Description of Artificial Sequence: Synthetic polypeptide
  combination of PCR-generated and human sequence
AIQLTQSPDSLAVSLGERATINCKSSQSLLYTSNNKNYLAWYQQKPGQTPKLLIIWASTRESGVPDRFTGSGSGTDFTLTISSLQAEDVAVYYCQQYYNSPYTFGQGTRLEIK

SEQ ID NO: 3725 - protein, 113 aa, Artificial Sequence
  Description of Artificial Sequence: Synthetic polypeptide
  combination of PCR-generated and human sequence
EIVMTQSPESLAVSLGERATINCKSTQSLLWSANNKNYLAWYRQKPRQTPELLITWASTRESGVPDRFSGSGSGTDFTLTITSLQAEDVAVYYCQQYYNSPYTFGQGTRLEIK

SEQ ID NO: 3726 - protein, 112 aa, Artificial Sequence
  Description of Artificial Sequence: Synthetic polypeptide
  combination of PCR-generated and human sequence
EIVLTQSPDFLAVSLGERATINCKSSQSLFYSGNSKDFLAWYQQKPGQPPRLLVYWASTRDSGVPERFSGSGSGTDFTLTISRLQAEDVALYYCHQYHSTPLSFGGGTKVEI

SEQ ID NO: 3727 - protein, 98 aa, Homo sapiens
EIVLTQSPDTLSLSPGERATLSCRASQIISSNYLAWYQQQPGQAPRLLIYGASSRATGIPDRFSGSGSATDFTLTISRLEPEDFAVYYCQQYGTSPRT

SEQ ID NO: 3728 - protein, 103 aa, Homo sapiens
DIVMTQSPDSLAVSLGERATINCKSSQSVLYSSNNKNYLAWYQQKPGQPPKVLIYWASTRESGVPDRFSGSGSGTDFTLTISSLQAEDVAVYYCQQYYSPPLT

SEQ ID NO: 3729 - protein, 97 aa, Homo sapiens
EIVMTQSPATLSVSPGERATLSCRASQSVGANLAWYQQKPGQAPRLLIYSASTRATGVPARFSGSGSGTEFTLTISSLQSEDFAVYYCQQYNNWPRT

SEQ ID NO: 3730 - protein, 103 aa, Homo sapiens
DIVMTQSPDSLAVSLGERANINCKSSQSVLYSSNNKNYLAWYQQKSGQPPKLLIYWASTRESGVPDRFSGSGSGTDFTLTISSLQAEDVAVYYCQQYYSTPLT

SEQ ID NO: 3731 - protein, 103 aa, Homo sapiens
DIVMTQSPDSLAVSLGERATINCKSSQSLLYNSNNKNYLTWYQQKPGQPPKLLIYWASTRESGVPDRFSGSGSGTDFTLTISSLQAEDVAVYYCQQYYSSPLT

SEQ ID NO: 3732 - protein, 102 aa, Homo sapiens
DIVMTQSPLSLPVTPGEPASISCRSSQSLLHRSGHKYLHWYLQRPGQSPQVLIYLGSNRASGVPDRFSGSGSGTDFTLKISRVEAEDVGLYYCMQTLQTPWT

SEQ ID NO: 3733 - protein, 103 aa, Homo sapiens
DIVMTQSPDSLAVSLGERATINCKSSESLLYDSNNKNYLAWYQQKPGQPPKLLIYWASTRESGVPDRFSGSGSETDFTLTISSLQAEDVAVYHCQQYFSTPWT

SEQ ID NO: 3734 - protein, 103 aa, Homo sapiens
DIVMTQSPDSLAVSLGERATINCKSSQSVFSRDNNKNYLAWYQHKSGQPPKLLFFWASSRESGVSDRFSGSGSGTDFTLTIDNLQAEDVALYYCQHYFNTPHN

SEQ ID NO: 3735 - protein, 103 aa, Homo sapiens
DIVMTQSPDSLAVSLGERATINCESSQTLLYSSNEKNYLAWYQQKPGQPPKLLISWASTPESGVPDRFSGSGSGTSFTLTISSLQAEDVAVYYCQQYYNSPYT

SEQ ID NO: 3736 - protein, 103 aa, Homo sapiens
DIVMTQSPDSLAVSLGERVTITCESSHSLLYRSNNRNYLAWYQQKPRQPPKLLIYWASTRESGVPDRFSGSGSETDFTLTISSLRAEDVAVYYCQQFYTTPYT

SEQ ID NO: 3737 - protein, 103 aa, Homo sapiens
DIVMTQSPDSLAVSLGERVTISCESSHSLLYRSNNKNYLAWYQQKPRQPPKLLIYWASTRESGVPDRFSGSGSETDFTLTISSLRAEDVAVYYCQQFYTTPYT

SEQ ID NO: 3738 - protein, 103 aa, Homo sapiens
DIVMTQSPASLAVSLGERATINCKSSQSVLYSSNSENYLAWYQQKPGQPPKLLIYWASTRESGVPDRFSGSGSGTDFTLTISSLQAEDVAVYYCQQYYSTPFT

SEQ ID NO: 3739 - protein, 98 aa, Homo sapiens
EIVLTQSPGTLSLSPGERATLSCRASQSVSSSYLAWYQQKPGQAPRLLIYGASSRATGIPDRFSGSGSGTDFTLTISRLEPEDFAVYYCQQYGTSPLT

SEQ ID NO: 3740 - protein, 98 aa, Homo sapiens
DVVMTQSPLSLPATLGQPASISCRSSAGLRNNDGDILLSWFHQRPGQSPRRLFYRVSRRDSGVPDRFNGSGSATDFTLRINSVEAEDVGIYYCMRGPY

SEQ ID NO: 3741 - protein, 103 aa, Homo sapiens
DIVMTQSPDSLAVSLGERATINCKSSQTLLYKSNNENYLAWYQQKPGQPPKLLIYWASTRESGVPDRFSGSGSGTDFTLTISSLQAEDVAVYYCQQYFTTALT

SEQ ID NO: 3742 - protein, 103 aa, Homo sapiens
DIVMTQSPDSLAVSLGERATINCKSSQSLLYTSNNKNYLAWYQQKPGQTPKLLIIWASTRESGVPDRFTGSGSGTDFTLTISSLQAEDVAVYYCQQYYNSPYT

SEQ ID NO: 3743 - protein, 103 aa, Homo sapiens
DIVMTQSPESLAVSLGERATINCKSTQSLLWSANNKNYLAWYRQKPRQTPELLITWASTRESGVPDRFSGSGSGTDFTLTITSLQAEDVAVYYCQQYYNSPYT

SEQ ID NO: 3744 - protein, 103 aa, Homo sapiens
DIVMTQSPDFLAVSLGERATINCKSSQSLFYSGNSKDFLAWYQQKPGQPPRLLVYWASTRDSGVPERFSGSGSGTDFTLTISRLQAEDVALYYCHQYHSTPLS

SEQ ID NO: 3745 - protein, 114 aa, Mus musculus
ELDVQMTQTPLTLSVTIGQPASISCKSSQSLLYSNGKTYLNWLLQRPGQSPKRLIYLVSKLDSGVPDRFTGSGSGTDFTLKISRVEAEDLGVYYCVQGTHSPLTFGAGTKLELK

SEQ ID NO: 3746 - protein, 114 aa, Mus musculus
ELDVVMTQTPLTLSVTIGQPASISCKSSQSLLYSNGKTYLNWLLQRPGQSPKRLIYLVSKLDSGVPDRFTGSGSGTDFTLKISRVEAEDLGVYYCVQGTHSPLTFGAGTKLELK

SEQ ID NO: 3747 - protein, 112 aa, Mus sp.
DVLMTQTPLSLPVSLGDQASISCRSSQNIIHSNGSTYLEWYLQKPGQSPKLLIYKVSNRFSGVPDRFSGSGSGTDFTLKISRVEAEDLGIYYCFQGSHVPWTFGGGTKLEIK

SEQ ID NO: 3748 - protein, 114 aa, Mus sp.
DIVMSQSPSSLAVSIGEKVTMSCKSSQSLLYSNNQKNYLAWYQRKPGQSPKLLIYWASTRESGVPDRFTGSGSGTDFTLTITSVKAEDLAVYYCQQYYSYPLWTFGGGTKLEIK

SEQ ID NO: 3749 - protein, 104 aa, Artificial Sequence
  Description of Artificial Sequence: Synthetic polypeptide
  pT231/pS235_1 VL
ALTQPTSVSANLGGSVEITCSGSDYDYGWYQQKAPGSAPVTVIYWNDKRPSDIPSRFSGSTSGSTSTLTITGVQAEDEAVYYCGAYDGSAGGGIFGAGTTLTVL

SEQ ID NO: 3750 - protein, 103 aa, Artificial Sequence
  Description of Artificial Sequence: Synthetic polypeptide
  pT231/pS235_2 VL
ALTQPTSVSANPGETVKITCSGDSSWYGWYQQKSPGSAPVTLIYNNNNRPSNIPSRFSGSKSGSTATLTITGVQAEDEAVYFCGGHDSSYAGIFGAGTTLTVL

SEQ ID NO: 3751 - protein, 109 aa, Artificial Sequence
  Description of Artificial Sequence: Synthetic polypeptide
  pT212/pS214_1 VL
ALTQPTSVSANLGGTVKITCSGGGSYAGSYYYGWYQQKSPGSAPVTVIYDNTNRPSNIPSRFSGSLSGSTSTLTITGVQAEDEAVYFCGGYDSSTYAGIFGAGTTLTVL

SEQ ID NO: 3752 - protein, 105 aa, Artificial Sequence
  Description of Artificial Sequence: Synthetic polypeptide
  pT212/pS214_2 VL
ALTQPTSVSANPGETVKITCSGGGSGYGYGWFQQKSPGSAPVTVIYYNDKRPSDIPSRFSGSTSGSTSTLTITGVQVEDEAVYYCGSGDSSGAGIFGAGTTLTVL

SEQ ID NO: 3753 - protein, 103 aa, Artificial Sequence
  Description of Artificial Sequence: Synthetic polypeptide
  pS396/pS404_1 VL
ALTQPTSVSANLGETVKITCSGESGNYGWYQQKAPGSAPVTVIYQNTQRPSDIPSRFSGSKSGSTGTLTITGVQADDEAVYFCGSGDGNFVGIFGAGTTLTVL

SEQ ID NO: 3754 - protein, 103 aa, Artificial Sequence
  Description of Artificial Sequence: Synthetic polypeptide
  pS396/pS404_2 VL
ALTQPTSVSANPGETVKITCSGGDSYYGWYQQKSPGSAPVTVIYDNDKRPSDIPSRFSGSKSGSTGTLTITGVQADDEAVYFCGTEDRSGTPIFGAGTTLTVL

SEQ ID NO: 3755 - protein, 112 aa, Artificial Sequence
  Description of Artificial Sequence: Synthetic polypeptide
  VL amino acid sequence of 2H9
DVLMTQTPLSLPVSLGDQASISCRSSQNIVYGNGNTYLEWYLQRPGQSPKLLIYKVSNRFSGVPDRFSGSGSGTDFTLKITRVEAEDLGVYYCFQGSHVPLTFGAGTKLELK

SEQ ID NO: 3756 - protein, 122 aa, Artificial Sequence
  Description of Artificial Sequence: Synthetic polypeptide
DIVLTQTPLSLPVSLGDPASISCRSSQTIVHSNGNTYLEWYLQKPGQSPKLLIYKVSNRFSGVPDRFSGSGSGTDFTLKISRVEAEDLGVYYCFQGSHVPFTFGSGTKLEIKRADAAPTVST

SEQ ID NO: 3757 - protein, 121 aa, Artificial Sequence
  Description of Artificial Sequence: Synthetic polypeptide
DIVLTQSPTSLAVSLGQRATISCRASKSVSTSDYSYMHWYQQKPGQPPKLLIYLASNLESGVPARFSGSGSGTDFTLNIHPVEEEDAATYYCQHSRELPFTFGGGTKLEIKRADAAPTVST

SEQ ID NO: 3758 - protein, 122 aa, Artificial Sequence
  Description of Artificial Sequence: Synthetic polypeptide
DIVLTQTPLTLSVTIGQPASISCKSSQSLLYSDGKTFLNWLLQSPGQSPRLLIYLVSKLQSGVPDRFSGSGSGTDFTLKISRVEAEDLGVYYCVQGTHFPYTFGGGTKLEIKRADAAPTVST

SEQ ID NO: 3759 - protein, 122 aa, Artificial Sequence
  Description of Artificial Sequence: Synthetic polypeptide
DIVMTQSPLSLSVTIGQPASISCKSSQSLLYSDGKTYLNWLQQRPGQSPKRLVYQVSKLDPGIPDRFSGSGSETDFTLKLSRVEAEDLGVYYCLQGTYYPHTFGGGTKLEIKRADAAPTVST

SEQ ID NO: 3760 - protein, 122 aa, Artificial Sequence
  Description of Artificial Sequence: Synthetic polypeptide
DIVITQSPLSLSVTIGQPASISCKSSQSLLYSDGKTYLNWLQQRPGQSPKRLVYQVSKLDPGIPDRFSGSGSETDFTLKLSRVEAEDLGVYYCLQGTYYPHTFGGGTKLEIKRADAAPTVST

SEQ ID NO: 3761 - protein, 116 aa, Artificial Sequence
  Description of Artificial Sequence: Synthetic polypeptide
DIVLTQTPSSLSASLGGKVTITCKASQDINKYIAWYQHKPGKGPRLLIHYTSTLQSGIPSRFSGSGSGRDYSFSISNLEPEDIATYYCLQYDHLLTFGAGTKLELKRADAAPTVST

SEQ ID NO: 3762 - protein, 230 aa, Artificial Sequence
  Description of Artificial Sequence: Synthetic polypeptide
MDSQAQVLILLLLWVSGTCGNIVLSQSPSSLAVSPGEKVTMSCKSSQSLLNSRTRKNYLAWFQQKPGQSPKLLIYWASTRESGVPDRFTGSGSGTDFTLTISSVQAEDLAVYYCKQSYTLRTFGGGTNLEIKRADAAPTVSIFPPSSEQLTSGGASVVCFLNNFYPKDINVKWKIDGSERQNGVLNSWTDQDSKDSTYSMSSTLTLTKDEYERHNSYTCEATHKTSTSPI

SEQ ID NO: 3763 - protein, 114 aa, Artificial Sequence
  Description of Artificial Sequence: Synthetic polypeptide
DIVMTQSPDSLAVSLGERATINCKSSQSVLYSSNNKNYLAWYQQKPGQPPKLLIYWASTRESGVPDRFSGSGSGTDFTLTISSLQAEDVAVYYCQQYYSTPQTFGGGTKVEIKR

SEQ ID NO: 3764 - protein, 108 aa, Homo sapiens; identical to SEQ ID NO: 3278

SEQ ID NO: 3765 - protein, 111 aa, Artificial Sequence
  Description of Artificial Sequence: Synthetic polypeptide
  humanized sequence
AQVMTQSPSSLSASVGDRVTITCRSSQSVRTNKLAWFQQKPGQPPKRLIYSASTLDFGVPSRFSGSGSGTEFTLTISSLQPEDFATYYCLGYFDSSADIVAFGGGTKVEIK

SEQ ID NO: 3766 - protein, 111 aa, Artificial Sequence
  Description of Artificial Sequence: Synthetic polypeptide
  humanized sequence
AQVMTQSPSSLSASVGDRVTITCRSSQSVRTNRLAWFQQKPGQPPKRLIYSASTLDYGVPSRFSGSGSGTEFTLTISSLQPEDFATYYCLGYFDSSADIVAFGGGTKVEIK

SEQ ID NO: 3767 - protein, 112 aa, Artificial Sequence
  Description of Artificial Sequence: Synthetic polypeptide
  humanized sequence
DIQMTQSTSTLSASVGDRVTITCQSSQSVRTNKLAWFQQKPGKAPKRLIYSASTLDFGVPSRFSGSGSGTEFTLTISSLQPDDFATYYCLGYFDCSIADCVAFGGGTKVEIK

SEQ ID NO: 3768 - protein, 112 aa, Artificial Sequence
  Description of Artificial Sequence: Synthetic polypeptide
  humanized sequence
DIQMTQSPSTLSASVGDRVTITCRASQSVRTNKLAWYQQKPGKAPKRLIYSASTLESGVPSRFSGSGSGTEFTLTISSLQPDDFATYYCLGYFDCSIADCVAFGGGTKVEIK

SEQ ID NO: 3769 - protein, 112 aa, Artificial Sequence
  Description of Artificial Sequence: Synthetic polypeptide
  humanized sequence
DIQMTQSPSSLSASVGDRVTITCRASQGVRTNKLAWFQQKPGQPPKRLIYSASTLQSGVPSRFSGSGSGTEFTLTISSLQPEDFATYYCLGYFDCSIADCVAFGGGTKVEIK

SEQ ID NO: 3770 - protein, 112 aa, Artificial Sequence
  Description of Artificial Sequence: Synthetic polypeptide
  humanized sequence
DIQMTQSPSSLSASVGDRVTITCRASQGVRTNKLAWFQQKPGQPPKRLIYSASTLQSGVPSRFSGSGSGTEFTLTISSLQPEDFATYYCLGYFDSSIADSVAFGGGTKVEIK

SEQ ID NO: 3771 - protein, 112 aa, Artificial Sequence
  Description of Artificial Sequence: Synthetic polypeptide
  humanized sequence
DIQMTQSPSSLSASVGDRVTITCRASQGVRTNKLAWFQQKPGQPPKRLIYSASTLQSGVPSRFSGSGSGTEFTLTISSLQPEDFATYYCLGYFDSSIADRVAFGGGTKVEIK

SEQ ID NO: 3772 - protein, 112 aa, Artificial Sequence
  Description of Artificial Sequence: Synthetic polypeptide
  humanized sequence
DIQMTQSPSSLSASVGDRVTITCRSSQSVRTNKLAWFQQKPGQPPKRLIYSASTLDFGVPSRFSGSGSGTEFTLTISSLQPEDFATYYCLGYFDCSIADCVAFGGGTKVEIK

SEQ ID NO: 3773 - protein, 112 aa, Artificial Sequence
  Description of Artificial Sequence: Synthetic polypeptide
  humanized sequence
AQVMTQSPSSLSASVGDRVTITCRSSQSVRTNKLAWFQQKPGQPPKRLIYSASTLDFGVPSRFSGSGSGTEFTLTISSLQPEDFATYYCLGYFDCSIADCVAFGGGTKVEIK

SEQ ID NO: 3774 - protein, 111 aa, Artificial Sequence
  Description of Artificial Sequence: Synthetic polypeptide
  humanized sequence
AIQMTQSPSTLSASVGDRVTITCRSSQSVRTNRLAWFQQKPGKAPKRLIYSASTLDFGVPSRFSGSGSGTEFTLTISSLQPDDFATYYCLGYFDPSADPVAFGGGTKVEIK

SEQ ID NO: 3775 - protein, 112 aa, Artificial Sequence
  Description of Artificial Sequence: Synthetic polypeptide
  humanized sequence
AIQMTQSPSSLSASVGDRVTITCRSSQSVRTNRLAWFQQKPGQPPKRLIYSASTLDFGVPSRFSGSGSGTEFTLTISSLQPEDFATYYCLGYFDSSIADIVAFGGGTKVEIK

SEQ ID NO: 3776 - protein, 112 aa, Artificial Sequence
  Description of Artificial Sequence: Synthetic polypeptide
  humanized sequence
AIQMTQSTSSLSASVGDRVTITCRSSQSVRTNRLAWFQQKPGQPPKRLIYSASTLDFGVPSRFSGSGSGTEFTLTISSLQPEDFATYYCLGYFDSSIADIVAFGGGTKVEIK

SEQ ID NO: 3777 - protein, 112 aa, Artificial Sequence
  Description of Artificial Sequence: Synthetic polypeptide
  humanized sequence
DIQMTQSPSSLSASVGDRVTITCRSSQSVRTNRLAWFQQKPGQPPKRLIYSASTLDFGVPSRFSGSGSGTEFTLTISSLQPEDFATYYCLGYFDPSIADPVAFGGGTKVEIK

SEQ ID NO: 3778 - protein, 111 aa, Artificial Sequence
  Description of Artificial Sequence: Synthetic polypeptide
  humanized sequence
DIQMTQSPSSLSASVGDRVTITCRSSQSVRTNRLAWFQQKPGQPPKRLIYSASTLDFGVPSRFSGSGSGTEFTLTISSLQPEDFATYYCLGYFDPSADPVAFGGGTKVEIK

SEQ ID NO: 3779 - protein, 111 aa, Artificial Sequence
  Description of Artificial Sequence: Synthetic polypeptide
  humanized sequence
DIQMTQSPSSLSASVGDRVTITCRSSQSVRTNRLAWFQQKPGQPPKRLIYSASTLDFGVPSRFSGSGSGTEFTLTISSLQPEDFATYYCLGYFDPSADPIAFGGGTKVEIK

SEQ ID NO: 3780 - protein, 111 aa, Artificial Sequence
  Description of Artificial Sequence: Synthetic polypeptide
  humanized sequence
DIQMTQSPSSLSASVGDRVTITCRSSQSVRTNRLAWFQQKPGKAPKRLIYSASTLDFGVPSRFSGSGSGTEFTLTISSLQPEDFATYYCLGYFDPSADPIAFGGGTKVEIK

SEQ ID NO: 3781 - protein, 110 aa, Artificial Sequence
  Description of Artificial Sequence: Synthetic polypeptide
  humanized sequence
QQLVESGGGLVQPGGSLRLSCAASGFSLSSNAINWVRQAPGKGLEWVGYIAVSGNTYYASWAKGRFTISRDNSKNTLYLQMNSLRAEDTAVYYCGKSNIWGQGTLVTVSS

SEQ ID NO: 3782 - protein, 110 aa, Artificial Sequence
  Description of Artificial Sequence: Synthetic polypeptide
  humanized sequence
QSVLESGGGLVQPGGSLRLSCAASGFSLSSNAINWVRQAPGKGLEWVGYIAVSGNTYYASWAKGRFTISRDNSKNTLYLQMNSLRAEDTAVYYCGKSNIWGPGTLVTVSS

SEQ ID NO: 3783 - protein, 110 aa, Artificial Sequence
  Description of Artificial Sequence: Synthetic polypeptide
  humanized sequence
QSVLESGGGLVQPGGSLRLSCAVSGFSLSSNAINWVRQAPGKGLEWVGYIAVSGNTYYASWAKGRFTISRDNSKNTLYLQMNSLRAEDTAVYYCGKSNIWGPGTLVTVSS

SEQ ID NO: 3784 - protein, 108 aa, Artificial Sequence
  Description of Artificial Sequence: Synthetic polypeptide
  humanized sequence
QSVLESGGGLVQPGGSLRLSCAVSGFSLSSNAINWVRQAPGKGLEWVGYIAVSGNTYYASWAKGRFTISRDSTTLYLQMNSLRAEDTAVYYCGKSNIWGPGTLVTVSS

SEQ ID NO: 3785 - protein, 110 aa, Artificial Sequence
  Description of Artificial Sequence: Synthetic polypeptide
  humanized sequence
QQLVESGGGLVQPGGSLRLSCAASGFSLSSNAINWVRQAPGKGLEWVGYIAVSGNTYYASWAKGRFTISRDNSKNTLYLQMNSLRAEDTAVYYCGKSNIWGPGTLVTVSS

SEQ ID NO: 3786 - protein, 110 aa, Artificial Sequence
  Description of Artificial Sequence: Synthetic polypeptide
  humanized sequence
QSVVESGGGLVQPGGSLRLSCAASGFSLSSNAINWVRQAPGKGLEWVGYIAVSGNTYYASWAKGRFTISRDNSKNTLYLQMNSLRAEDTAVYYCGKSNIWGPGTLVTVSS

SEQ ID NO: 3787 - protein, 110 aa, Artificial Sequence
  Description of Artificial Sequence: Synthetic polypeptide
  humanized sequence
QQLVESGGGLVQPGGSLRLSCAASGFSLSSNAINWVRQAPGKGLEWVGYIAVSGNTYYADSVKGRFTISRDNSKNTLYLQMNSLRAEDTAVYYCGKSNIWGQGTLVTVSS

SEQ ID NO: 3788 - protein, 110 aa, Artificial Sequence
  Description of Artificial Sequence: Synthetic polypeptide
  humanized sequence
QQLVESGGGLVQPGGSLRLSCAASGFSLSSNAINWVRQAPGKGLEWVGYIAVSGNTYYADSVKGRFTISKDNSKNTLYLQMNSLRAEDTAVYYCGKSNIWGQGTLVTVSS

SEQ ID NO: 3789 - protein, 111 aa, Artificial Sequence
  Description of Artificial Sequence: Synthetic polypeptide
  humanized sequence
EVQLLESGGGLVQPGGSLRLSCAASGFSLSSNAINWVRQAPGKGLEWVGYIAVSGNTYYADSVKGRFTISRDNSKNTLYLQMNSLRAEDTAVYYCGKSNIWGQGTLVTVSS

SEQ ID NO: 3790 - protein, 111 aa, Artificial Sequence
  Description of Artificial Sequence: Synthetic polypeptide
  humanized sequence
EVQVLESGGGLVQPGGSLRLSCAVSGFSLSSNAINWVRQAPGKGLEWVGYIAVSGNTYYADSVKGRFTISKDNSKNTVYLQMNSLRAEDTAVYYCGKSNIWGQGTLVTVSS

SEQ ID NO: 3791 - protein, 111 aa, Artificial Sequence
  Description of Artificial Sequence: Synthetic polypeptide
  humanized sequence
EVQLLESGGGLVQPGGSLRLSCAASGFSLSSNAINWVRQAPGKGLEWVGYIAVSGNTYYADSVKGRFTISKDNSKNTVYLQMNSLRAEDTAVYYCGKSNIWGQGTLVTVSS

SEQ ID NO: 3792 - protein, 111 aa, Artificial Sequence
  Description of Artificial Sequence: Synthetic polypeptide
  humanized sequence
EVQVLESGGGLVQPGGSLRLSCAVSGFSLSSNAINWVRQAPGKGLEWVGYIAVSGNTYYASWAKGRFTISKDNSKNTVYLQMNSLRAEDTAVYYCGKSNIWGQGTLVTVSS

SEQ ID NO: 3793 - protein, 112 aa, Artificial Sequence; identical to SEQ ID NO: 3280
  Description of Artificial Sequence: Synthetic polypeptide

SEQ ID NO: 3794 - protein, 112 aa, Artificial Sequence; identical to SEQ ID NO: 3281
  Description of Artificial Sequence: Synthetic polypeptide

SEQ ID NO: 3795 - protein, 112 aa, Artificial Sequence; identical to SEQ ID NO: 3282
  Description of Artificial Sequence: Synthetic polypeptide

SEQ ID NO: 3796 - protein, 112 aa, Artificial Sequence; identical to SEQ ID NO: 3283
  Description of Artificial Sequence: Synthetic polypeptide

SEQ ID NO: 3797 - protein, 113 aa, Artificial Sequence
  Description of Artificial Sequence: Synthetic polypeptide
NIVLTQSPDSLAVSLGERATINCKSSQSLLNSRTRKNYLAWFQQKPGQPPKLLIYWASTRESGVPDRFSGSGSGTDFTLTISSLQAEDVAVYYCKQSYTLRTFGGGTKVEIKR

SEQ ID NO: 3798 - protein, 113 aa, Artificial Sequence
  Description of Artificial Sequence: Synthetic polypeptide
NIVLTQSPDSLAVSLGERATINCKSSQSLLNSRTRKNYLAWFQQKPGQSPKLLIYWASTRESGVPDRFSGSGSGTDFTLTISSLQAEDVAVYYCKQSYTLRTFGGGTKVEIKR

SEQ ID NO: 3799 - protein, 113 aa, Artificial Sequence
  Description of Artificial Sequence: Synthetic polypeptide
DIVLTQSPDSLAVSLGERATINCKSSQSLLNSRTRKNYLAWFQQKPGQSPKLLIYWASTRESGVPDRFSGSGSGTDFTLTISSLQAEDVAVYYCKQSYTLRTFGGGTKVEIKR

SEQ ID NO: 3800 - protein, 250 aa, Artificial Sequence
  Description of Artificial Sequence: Synthetic polypeptide
  amino acid sequence of scFv235
ELDVVMTQTPLTLSVTIGQPASISCKSSQSLLYSNGKTYLNWLLQRPGQSPKRLIYLVSKLDSGVPDRFTGSGSGTDFTLKISRVEAEDLGVYYCVQGTHSPLTFGAGTKLELKSSGGGGSGGGGGGSSRSSLEVQLQQSGPELVKPGASVKISCKTSEYTFTEYTKHWVKQSHGKSLEWIGSINPNNGDTYYNQKFTDKATLTVDKSSTTASMELRSLTFEDSAVYYCAMGDSAWFAYWGQGTLVTVSA

SEQ ID NO: 3801 - protein, 278 aa, Artificial Sequence
  Description of Artificial Sequence: Synthetic polypeptide
  scFv fusion protein comprising N-terminal leader peptide portion and scFv235
IQEEFKMKKTAIAIAVALAGFATVAQAAELDVVMTQTPLTLSVTIGQPASISCKSSQSLLYSNGKTYLNWLLQRPGQSPKRLIYLVSKLDSGVPDRFTGSGSGTDFTLKISRVEAEDLGVYYCVQGTHSPLTFGAGTKLELKSSGGGGSGGGGGGSSRSSLEVQLQQSGPELVKPGASVKISCKTSEYTFTEYTKHWVKQSHGKSLEWIGSINPNNGDTYYNQKFTDKATLTVDKSSTTASMELRSLTFEDSAVYYCAMGDSAWFAYWGQGTLVTVSA

SEQ ID NO: 3802 - protein, 265 aa, Artificial Sequence
  Description of Artificial Sequence: Synthetic polypeptide
  scFv funsion protein comprising scFv235 and c-terminal peptide portion
ELDVVMTQTPLTLSVTIGQPASISCKSSQSLLYSNGKTYLNWLLQRPGQSPKRLIYLVSKLDSGVPDRFTGSGSGTDFTLKISRVEAEDLGVYYCVQGTHSPLTFGAGTKLELKSSGGGGSGGGGGGSSRSSLEVQLQQSGPELVKPGASVKISCKTSEYTFTEYTKHWVKQSHGKSLEWIGSINPNNGDTYYNQKFTDKATLTVDKSSTTASMELRSLTFEDSAVYYCAMGDSAWFAYWGQGTLVTVSAAKTTPPSVTSGQAGQ

SEQ ID NO: 3803 - protein, 282 aa, Artificial Sequence
  Description of Artificial Sequence: Synthetic polypeptide
  ScFv fusion protein comprising scFv235 and preferred c-terminal peptide portion
ELDVVMTQTPLTLSVTIGQPASISCKSSQSLLYSNGKTYLNWLLQRPGQSPKRLIYLVSKLDSGVPDRFTGSGSGTDFTLKISRVEAEDLGVYYCVQGTHSPLTFGAGTKLELKSSGGGGSGGGGGGSSRSSLEVQLQQSGPELVKPGASVKISCKTSEYTFTEYTKHWVKQSHGKSLEWIGSINPNNGDTYYNQKFTDKATLTVDKSSTTASMELRSLTFEDSAVYYCAMGDSAWFAYWGQGTLVTVSAKTTPPSVTSGQAGQHHHHHHGAYPYDVPDYAS

SEQ ID NO: 3804 - protein, 293 aa, Artificial Sequence
  Description of Artificial Sequence: Synthetic polypeptide
  ScFv fusion protein comprising n-terminal leader peptide portion, scFv235, and c-terminal peptide portion
IQEEFKMKKTAIAIAVALAGFATVAQAAELDVVMTQTPLTLSVTIGQPASISCKSSQSLLYSNGKTYLNWLLQRPGQSPKRLIYLVSKLDSGVPDRFTGSGSGTDFTLKISRVEAEDLGVYYCVQGTHSPLTFGAGTKLELKSSGGGGSGGGGGGSSRSSLEVQLQQSGPELVKPGASVKISCKTSEYTFTEYTKHWVKQSHGKSLEWIGSINPNNGDTYYNQKFTDKATLTVDKSSTTASMELRSLTFEDSAVYYCAMGDSAWFAYWGQGTLVTVSAAKTTPPSVTSGQAGQ

SEQ ID NO: 3805 - protein, 311 aa, Artificial Sequence
  Description of Artificial Sequence: Synthetic polypeptide
  scFv fusion protein comprising n-terminal leader peptide portion, scFv235, and preferred c-terminal peptide portion
IQEEFKMKKTAIAIAVALAGFATVAQAAELDVVMTQTPLTLSVTIGQPASISCKSSQSLLYSNGKTYLNWLLQRPGQSPKRLIYLVSKLDSGVPDRFTGSGSGTDFTLKISRVEAEDLGVYYCVQGTHSPLTFGAGTKLELKSSGGGGSGGGGGGSSRSSLEVQLQQSGPELVKPGASVKISCKTSEYTFTEYTKHWVKQSHGKSLEWIGSINPNNGDTYYNQKFTDKATLTVDKSSTTASMELRSLTFEDSAVYYCAMGDSAWFAYWGQGTLVTVSAAKTTPPSVTSGQAGQHHHHHHGAYPYDVPDYAS

SEQ ID NO: 3806 - protein, 120 aa, Mus musculus
MDSQAQVLILLLLWVSGTCGDIVMSQSPSSLAVSAGEKVTMSCKSSQSLLNSRTRKNYLAWYQQKPGQSPKLLIYWASTRESGVPDRFTGSGSGTDFTLTISSVQAEDLAVYYCKQSYNL

SEQ ID NO: 3807 - protein, 101 aa, Mus musculus
DIVMTQSPSSLSVSAGDKVTMSCKSSQSLLNSRNQKNYLAWYQQKPWQPPKLLIYGASTRESGVPDRFTGSGSGTDFTLTISSVQAEDLAVYYCQNDYSYP

SEQ ID NO: 3808 - protein, 121 aa, Mus musculus
MESQTQVLMSLLFWVSGTCGDIVMTQSPSSLTVTAGEKVTMSCKSSQSLLNSGNQKNYLTWYQQKPGQPPKLLIYWASTRESGVPDRFTGSGSGTDFTLTISSVQAEDLAVYYCQNDYSYP

SEQ ID NO: 3809 - protein, 121 aa, Mus musculus
MDSQAQVLMLLLLWVSGTCGDIVMSQSPSSLAVSVGEKVTMSCKSSQSLLYSSNQKNYLAWYQQKPGQSPKLLIYWASTRESGVPDRFTGSGSGTDFTLTISSVKAEDLAVYYCQQYYSYP

SEQ ID NO: 3810 - protein, 121 aa, Mus musculus
MESQTQVLISLLFWVSGTCGDIVMTQSPSSLSVSAGEKVTMSCKSSQSLLNSGNQKNYLAWYQQKPGQPPKLLIYGASTRESGVPDRFTGSGSGTDFTLTISSVQAEDLAVYYCQNDHSYP

SEQ ID NO: 3811 - protein, 126 aa, Homo sapiens
QLLGLLMLWVSGSSGDIVMTQSPLSLPVTPGEPASISCRSSQSLLHINGYNYLDWYLQKPGQSPQLLIYLGSNRASGVPDRFTGSGSGTDFTLKISRVEAEDVGVYYCMQALQPWTFGQGTKVEIK

SEQ ID NO: 3812 - protein, 98 aa, Mus musculus
QVQLQQSGAELARPGASVKLSCKASGYTFTSYGISWVKQRTGQGLEWIGEIYPRSGNTYYNEKFKGKATLTADKSSSTAYMELRSLTSEDSAVYFCAR

SEQ ID NO: 3813 - protein, 98 aa, Mus musculus
QVQLKQSGAELVKPGASVKISCKASGYTFTDYYINWVKQRPGQGLEWIGKIGPGSGSTYYNEKFKGKATLTADKSSSTAYMQLSSLTSEDSAVYFCAR

SEQ ID NO: 3814 - protein, 97 aa, Mus musculus
VQLQQSGPELVKPGASVKMSCKASGYTFTDYYMHWVKQKPGKGLEWIGEIYPGSGNTYYNEKFKGKATLTADTSSSTAYMQLSSLTSEDSAVYFCAR

SEQ ID NO: 3815 - protein, 98 aa, Mus musculus
QVQLQQSGPELVKPGASVKISCKASGYTFTDYYINWVKQRPGQGLEWIGWIFPGSGSTYYNEKFKGKATLTVDKSSSTAYMLLSSLTSEDSAVYFCAR

SEQ ID NO: 3816 - protein, 98 aa, Mus musculus
QVQLQQSGAELVRPGTSVKVSCKASGYAFTNYLIEWVKQRPGQGLEWIGVINPGSGGTNYNEKFKGKATLTADKSSNTAYMQLSSLTSEDSAVYFCAR

SEQ ID NO: 3817 - protein, 139 aa, Homo sapiens
MDWTWRFLFVVAAVTGVQSQVQLVQSGAEVKKPGSSVKVSCKASGGTFSSYAISWVRQAPGQGLEWMGGIIPIFGTANYAQKFQGRVTITADKSTSTAYMELSSLRSEDTAVYYCARGSTVTTGDFDYWGQGTLVTVSS

SEQ ID NO: 3818 - protein, 330 aa, Artificial Sequence [sequence omitted]

SEQ ID NO: 3819 - protein, 326 aa, Artificial Sequence; identical to SEQ ID NO: 3559
  Description of Artificial Sequence: Synthetic polypeptide

SEQ ID NO: 3820 - protein, 327 aa, Artificial Sequence; identical to SEQ ID NO: 3442
  Description of Artificial Sequence: Synthetic polypeptide

SEQ ID NO: 3821 - protein, 326 aa, Artificial Sequence
  Description of Artificial Sequence: Synthetic polypeptide
ASTKGPSVFPLAPCSRSTSESTAALGCLVKDYFPEPVTVSWNSGALTSGVHTFPAVLQSSGLYSLSSVVTVTSSNFGTQTYTCNVDHKPSNTKVDKTVERKCCVECPPCPAPPVAGPSVFLFPPKPKDTLMISRTPEVTCVVVDVSQEDPEVQFNWYVDGVEVHNAKTKPREEQFNSTFRVVSVLTVLHQDWLNGKEYKCKVSNKGLPSSIEKTISKTKGQPREPQVYTLPPSREEMTKNQVSLTCLVKGFYPSDIAVEWESNGQPENNYKTTPPMLDSDGSFFLYSKLTVDKSRWQQGNVFSCSVMHEALHNHYTQKSLSLSPGK

SEQ ID NO: 3822 - protein, 111 aa, Artificial Sequence
  Description of Artificial Sequence: Synthetic polypeptide
DIVLTQSPASLAVSLGQRATISCRASQSVSTSRYSYIHWYQQKPGQPPKLLIKYASNLESGVPARFSGSGSGTDFTLNIHPLEEEDAATYYCHHSWEIPLTFGAGTKLELK

SEQ ID NO: 3823 - protein, 113 aa, Oryctolagus cuniculus
QSLEESGGRLVTPGTPLTLTCTVSGIDLNSAAMGWVRQPPGKGLEWIGIIGSDHNAFYASWAKGRFTISRTSTTVALKMTSLTTEDTATYFCSRVYLDRHDIWGPGTLVTVSS

SEQ ID NO: 3824 - protein, 112 aa, Oryctolagus cuniculus
AQVLTQTPSSVSAAVGGTVAINCQSSQSVSNSRLSWYQQKPGQPPKLLLYDVAKLASGVPSRFKGSGSGTHFTLTISGVQCDDAATYYCQGTYWSNVWYEAAFGGGTEVVVK

SEQ ID NO: 3825 - protein, 330 aa, Homo sapiens [sequence omitted]

SEQ ID NO: 3826 - protein, 725 aa, Artificial Sequence [sequence omitted]

SEQ ID NO: 3827 - protein, 705 aa, Artificial Sequence
  Description of Artificial Sequence: Synthetic polypeptide
  HC anti-TfR2 antibody conjugated to scFV anti-digoxigenin antibody fragment
EVQLQQSGPELVKPGASVKMSCKASGYTFTSYVMHWVKQKPGQGLEWIGYVNPYNDDTKYNEKFRGKATLTSDKSSSTAYMELSSLTSEDSAVYYCARSYYYYSMDNWGQGTSVTVSSASTKGPSVFPLAPSSKSTSGGTAALGCLVKDYFPEPVTVSWNSGALTSGVHTFPAVLQSSGLYSLSSVVTVPSSSLGTQTYICNVNHKPSNTKVDKKVEPKSCDKTHTCPPCPAPELLGGPSVFLFPPKPKDTLMISRTPEVTCVVVDVSHEDPEVKFNWYVDGVEVHNAKTKPREEQYNSTYRVVSVLTVLHQDWLNGKEYKCKVSNKALPAPIEKTISKAKGQPREPQVYTLPPSRDELTKNQVSLTCLVKGFYPSDIAVEWESNGQPENNYKTTPPVLDSDGSFFLYSKLTVDKSRWQQGNVFSCSVMHEALHNHYTQKSLSLSPGKGGGGSGGGGSQVQLVESGGGLVKPGGSLRLSCAASGFTFSDYAMSWIRQAPGKCLEWVSSINIGATYIYYADSVKGRFTISRDNAKNSLYLQMNSLRAEDTAVYYCARPGSPYEYDKAYYSMAYWGQGTTVTVSSGGGGSGGGGSGGGGSDIQMTQSPSSLSASVGDRVTITCRASQDIKNYLNWYQQKPGKAPKLLIYYSSTLLSGVPSRFSGSGSGTDFTLTISSLQPEDFATYYCQQSITLPPTFGCGTKVEIK

SEQ ID NO: 3828 - protein, 705 aa, Artificial Sequence
  Description of Artificial Sequence: Synthetic polypeptide
  HC anti-TfR1 antibody conjugated to scFv anti-digoxigenin antibody fragment
EVQLQQSGPELVKPGASMKISCKASGYSFTGYTMNWVKQSHGENLEWIGRINPHNGGTDYNQKFKDKAPLTVDKSSNTAYMELLSLTSEDSAVYYCARGYYYYSLDYWGQGTSVTVSSASTKGPSVFPLAPSSKSTSGGTAALGCLVKDYFPEPVTVSWNSGALTSGVHTFPAVLQSSGLYSLSSVVTVPSSSLGTQTYICNVNHKPSNTKVDKKVEPKSCDKTHTCPPCPAPELLGGPSVFLFPPKPKDTLMISRTPEVTCVVVDVSHEDPEVKFNWYVDGVEVHNAKTKPREEQYNSTYRVVSVLTVLHQDWLNGKEYKCKVSNKALPAPIEKTISKAKGQPREPQVYTLPPSRDELTKNQVSLTCLVKGFYPSDIAVEWESNGQPENNYKTTPPVLDSDGSFFLYSKLTVDKSRWQQGNVFSCSVMHEALHNHYTQKSLSLSPGKGGGGSGGGGSQVQLVESGGGLVKPGGSLRLSCAASGFTFSDYAMSWIRQAPGKCLEWVSSINIGATYIYYADSVKGRFTISRDNAKNSLYLQMNSLRAEDTAVYYCARPGSPYEYDKAYYSMAYWGQGTTVTVSSGGGGSGGGGSGGGGSDIQMTQSPSSLSASVGDRVTITCRASQDIKNYLNWYQQKPGKAPKLLIYYSSTLLSGVPSRFSGSGSGTDFTLTISSLQPEDFATYYCQQSITLPPTFGCGTKVEIK

SEQ ID NO: 3829 - protein, 108 aa, Oryctolagus cuniculus; identical to SEQ ID NO: 3151

SEQ ID NO: 3830 - protein, 125 aa, Mus musculus
EVQLVESGGGLVKPGGSLKLSCAVSGFTFSDYAMSWIRQTPENRLEWVASINIGATYAYYPDSVKGRFTISRDNAKNTLFLQMSSLGSEDTAMYYCARPGSPYEYDKAYYSMAYWGPGTSVTVSS

SEQ ID NO: 3831 - protein, 125 aa, Artificial Sequence
  Description of Artificial Sequence: Synthetic polypeptide
  humanized anti-digoxigenin antibody VH
QVQLVESGGGLVKPGGSLRLSCAASGFTFSDYAMSWIRQAPGKGLEWVSSINIGATYIYYADSVKGRFTISRDNAKNSLYLQMNSLRAEDTAVYYCARPGSPYEYDKAYYSMAYWGQGTTVTVSS

SEQ ID NO: 3832 - protein, 120 aa, Mus musculus
EVQLQQSGAELVKPGASVKLSCTSSGFNNKDTFFQWVKQRPEECLEWIGRIDPANGFTKYDPKFQGKATITVDTSSNTAYLQLNSLTSEDTALYYCTRWDTYGAAWFAYWGQGTLVTVSA

SEQ ID NO: 3833 - protein, 120 aa, Artificial Sequence
  Description of Artificial Sequence: Synthetic polypeptide
  humanized anti-biotin antibody VH
QVQLVQSGAEVKKPGSSVKVSCKSSGFNNKDTFFQWVRQAPGQGLEWMGRIDPANGFTKYAQKFQGRVTITADTSTSTAYMELSSLRSEDTAVYYCARWDTYGAAWFAYWGQGTLVTVSS

SEQ ID NO: 3834 - protein, 116 aa, Mus musculus
DVQLQESGPGLVKPSQSLSLTCAVTGYSITSDYAWNWIRQFPGNRLEWMGYIRYSGHTGYNPSLKSRISITRDTFKNQFFLQFNSVTTEDTATYYCARWVDYFDYWGQGTTLTVSS

SEQ ID NO: 3835 - protein, 116 aa, Artificial Sequence
  Description of Artificial Sequence: Synthetic polypeptide
  humanized anti-theophylline antibody VH
QVQLQESGPGLVKPSQTLSLTCTVSGYSITSDYAWNWIRQHPGKGLEWIGYIRYSGHTGYNPSLKSRVTISRDTSKNQFSLKLSSVTAADTAVYYCARWVDYFDYWGQGTLVTVSS

SEQ ID NO: 3836 - protein, 118 aa, Mus musculus
GVKLDETGGGLVQPGGAMKLSCVTSGFTFGHYWMNWVRQSPEKGLEWVAQFRNKPYNYETYYSDSVKGRFTISRDDSKSSVYLQMNNLRVEDTGIYYCTGASYGMEYLGQGTSVTVSS

SEQ ID NO: 3837 - protein, 119 aa, Artificial Sequence
  Description of Artificial Sequence: Synthetic polypeptide
  humanized heavy chain variable region
QVQLVQSGAEVKKPGASVKVSCKASGYTFPEYPIHWVRQAPGQGLEWMGGIVPNNGFTFYAQKLQGRVTMTTDTSTSTAYMELRSLRSDDTAVYYCARKNLGSSPLDYWGQGTTVTVSS

SEQ ID NO: 3838 - protein, 119 aa, Mus musculus
EVQLQQSGPELVKPGASVKISCKTSGYTFPEYPIHWVKQSHGKSLEWIGGIVPNNGFTFYNQKFKGKASLTVDKSSSTAYVEVRSLTSDDSAVYYCARKNLGSSPLDYWGQGTTLTVSS

SEQ ID NO: 3839 - protein, 109 aa, Artificial Sequence
  Description of Artificial Sequence: Synthetic polypeptide
  anti-helicar antibody VH
QAVVTQEPSLTVSPGGTVTLTCGSSTGAVTTSNYASWVQQKPGQAFTGLIGGTNNRAPWTPARFSGSLLGGKAALTLSGAQPEDEAEYYCALWYSNHWVFGGGTKLTVL

SEQ ID NO: 3840 - protein, 706 aa, Artificial Sequence
  Description of Artificial Sequence: Synthetic polypeptide
  HC anti-TfR1 antibody conjugated to scFV anti-biotin antibody fragment
EVQLQQSGPELVKPGASMKISCKASGYSFTGYTMNWVKQSHGENLEWIGRINPHNGGTDYNQKFKDKAPLTVDKSSNTAYMELLSLTSEDSAVYYCARGYYYYSLDYWGQGTSVTVSSASTKGPSVFPLAPSSKSTSGGTAALGCLVKDYFPEPVTVSWNSGALTSGVHTFPAVLQSSGLYSLSSVVTVPSSSLGTQTYICNVNHKPSNTKVDKKVEPKSCDKTHTCPPCPAPELLGGPSVFLFPPKPKDTLMISRTPEVTCVVVDVSHEDPEVKFNWYVDGVEVHNAKTKPREEQYNSTYRVVSVLTVLHQDWLNGKEYKCKVSNKALPAPIEKTISKAKGQPREPQVYTLPPSRDELTKNQVSLTCLVKGFYPSDIAVEWESNGQPENNYKTTPPVLDSDGSFFLYSKLTVDKSRWQQGNVFSCSVMHEALHNHYTQKSLSLSPGKGGGGSGGGGSDIQMTQSPSSLSASVGDRVTITCRASGNIHNYLSWYQQKPGKVPKLLIYSAKTLADGVPSRFSGSGSGTDFTLTISSLQPEDVATYYCQHFWSSIYTFGCGTKLEIKRGGGGSGGGGSGGGGSGGGGSQVQLVQSGAEVKKPGSSVKVSCKSSGFNNKDTFFQWVRQAPGQCLEWMGRIDPANGFTKYAQKFQGRVTITADTSTSTAYMELSSLRSEDTAVYYCARWDTYGAAWFAYWGQGTLVTVSS

SEQ ID NO: 3841 - protein, 244 aa, Artificial Sequence
  Description of Artificial Sequence: Synthetic polypeptide
  helicar motif amino acid sequence cystein variant 1 fused to pseudomonas exotoxin LR8M with a GGG-peptidic linker and the C-terminal K deleted
AHLENEVARLCKGGGRHRQPRGWEQLPTGAEFLGDGGAVSFSTRGTQNWTVERLLQAHRQLEEGGYVFVGYHGTFLEAAQSIVFGGVRARSQDLDAIWAGFYIAGDPALAYGYAQDQEPDAAGRIRNGALLRVYVPRSSLPGFYATSLTLAAPEAAGEVERLIGHPLPLRLDAITGPEESGGRLETILGWPLAERTVVIPSAIPTDPRNVGGDLDPSSIPDSEAAISALPDYASQPGKPPREDL

SEQ ID NO: 3842 - protein, 106 aa, Homo sapiens
GQPKAAPSVTLFPPSSEELQANKATLVCLISDFYPGAVTVAWKADSSPVKAGVETTTPSKQSNNKYAASSYLSLTPEQWKSHRSYSCQVTHEGSTVEKTVAPTECS

SEQ ID NO: 3843 - protein, 213 aa, Artificial Sequence
  Description of Artificial Sequence: Synthetic polypeptide
  LC anti-TfR2 antibody
QIVLTQSPAIMSASPGEKVTVTCSASSSIRYMHWYQQKPGTSPKRWIYDTSELASGVPARFSGSGSGTSYSLTINSMEAEDAATYYCHQRSSYPFTFGGGTKLEIKRTVAAPSVFIFPPSDEQLKSGTASVVCLLNNFYPREAKVQWKVDNALQSGNSQESVTEQDSKDSTYSLSSTLTLSKADYEKHKVYACEVTHQGLSSPVTKSFNRGEC

SEQ ID NO: 3844 - protein, 213 aa, Artificial Sequence
  Description of Artificial Sequence: Synthetic polypeptide
  LC anti-TfR1 antibody
QIVLTQSPAIMSASPGEKVTMTCSASSSIRYIHWYQQRPGTSPKRWIYDTSNLASGVPARFSGSGSGTSYSLTISSMEAEDAATYYCHQRNSYPWTFGGGTRLEIKRTVAAPSVFIFPPSDEQLKSGTASVVCLLNNFYPREAKVQWKVDNALQSGNSQESVTEQDSKDSTYSLSSTLTLSKADYEKHKVYACEVTHQGLSSPVTKSFNRGEC

SEQ ID NO: 3845 - protein, 112 aa, Oryctolagus cuniculus
AQVLTQTTSPVSAAVGSTVTISCQSSQSVRTNKLAWFQQKPGQPPKRLIYSASTLDFGVPSRFSASGSGTQFTLTISDVQCDDAATYYCLGYFDCSIADCVAFGGGTEVVVK

SEQ ID NO: 3846 - protein, 107 aa, Mus musculus
DVQMTQSTSSLSASLGDRVTISCRASQDIKNYLNWYQQKPGGTVKLLIYYSSTLLSGVPSRFSGRGSGTDFSLTITNLEREDIATYFCQQSITLPPTFGGGTKLEIK

SEQ ID NO: 3847 - protein, 108 aa, Artificial Sequence
  Description of Artificial Sequence: Synthetic polypeptide
  humanized anti-digoxigenin antibody VL
DIQMTQSPSSLSASVGDRVTITCRASQDIKNYLNWYQQKPGKAPKLLIYYSSTLLSGVPSRFSGSGSGTDFTLTISSLQPEDFATYYCQQSITLPPTFGGGTKVEIKR

SEQ ID NO: 3848 - protein, 107 aa, Mus musculus
DIQMTQSPASLSASVGETVTITCRASGNIHNYLSWFQQKQGKSPQLLVYSAKTLADGVPSRFSGSGSGTQYSLKINSLQPEDFGTYYCQHFWSSIYTFGCGTKLEIK

SEQ ID NO: 3849 - protein, 107 aa, Artificial Sequence
  Description of Artificial Sequence: Synthetic polypeptide
  humanized anti-biotin antibody VL
DIQMTQSPSSLSASVGDRVTITCRASGNIHNYLSWYQQKPGKVPKLLIYSAKTLADGVPSRFSGSGSGTDFTLTISSLQPEDVATYYCQHFWSSIYTFGQGTKLEIK

SEQ ID NO: 3850 - protein, 112 aa, Mus musculus
DVVMTQSPLSLPVSLGDQASISCRSSQSIVYNNRYTYLEWFVQKPGQSLKLLIYGVSNRFSGVPDRFSGSGSGTDFTLKISRVEAEDMGVYYCYQGTHAPYTFGGGTKLEIK

SEQ ID NO: 3851 - protein, 112 aa, Artificial Sequence
  Description of Artificial Sequence: Synthetic polypeptide
  Humanized anti-theophylline antibody VL
DVVMTQSPLSLPVTLGQPASISCRSSQSIVYNNRYTYLEWFQQRPGQSPRLLIYGVSNRFSGVPDRFSGSGSGTDFTLKISRVEAEDVGVYYCYQGTHAPYTFGQGTKLEIK

SEQ ID NO: 3852 - protein, 120 aa, Mus musculus
DVVMTQTPLSLPVSLGDQASISCRSSQSLVHSNGNTYLRWYLQKPGQSPKVLIYKVSNRVSGVPDRFSGSGSGTDFTLKINRVEAEDLGVYFCSQSTHVPWTFGGGTKLEIKRTVAAPSV

SEQ ID NO: 3853 - protein, 107 aa, Artificial Sequence
  Description of Artificial Sequence: Synthetic polypeptide
  humanized light chain variable domain
EIVMTQSPATLSVSPGERATLSCRASQSIGTSIHWYQQKPGQAPRLLIKYASESISGIPARFSGSGSGTEFTLTISSLQSEDFAVYYCQQSNRWPLTLGQGTKLEIK

SEQ ID NO: 3854 - protein, 107 aa, Mus musculus
DILLTQSPAILSVSPGERVSFSCRASQSIGTSIHWYQHRTNGSPRLLIKYASESISGIPSRFSGSGSGTDFTLSINSVESEDIADYYCQQSNRWPLTLGAGTKLELK

SEQ ID NO: 3855 - protein, 109 aa, Artificial Sequence
  Description of Artificial Sequence: Synthetic polypeptide
  anti-helicar antibody VL51C
DAVVTQESALTTSPGETVTLTCRSSTGAVTTSNYASWVQEKPDHLFTGLICGTNNRAPGVPARFSGSLIGDKAALTITGAQTEDEAIYFCALWYSNHWVFGGGTKLTVL

SEQ ID NO: 3856 - protein, 109 aa, Artificial Sequence
  Description of Artificial Sequence: Synthetic polypeptide
  anti-helicar antibody VL 5 5c
DAVVTQESALTTSPGETVTLTCRSSTGAVTTSNYASWVQEKPDHLFTGLIGGTNCRAPGVPARFSGSLIGDKAALTITGAQTEDEAIYFCALWYSNHWVFGGGTKLTVL

SEQ ID NO: 3857 - protein, 109 aa, Artificial Sequence
  Description of Artificial Sequence: Synthetic polypeptide
  anti-helicar antibody VL
DAVVTQESALTTSPGETVTLTCRSSTGAVTTSNYASWVQEKPDHLFTGLIGGTNNRAPGVPARFSGSLIGDKAALTITGAQTEDEAIYFCALWYSNHWVFGGGTKLTVL

SEQ ID NO: 3858 - protein, 330 aa, Homo sapiens [sequence omitted]

SEQ ID NO: 3859 - protein, 330 aa, Homo sapiens; identical to SEQ ID NO: 3441

SEQ ID NO: 3860 - protein, 327 aa, Homo sapiens
ASTKGPSVFPLAPCSRSTSESTAALGCLVKDYFPEPVTVSWNSGALTSGVHTFPAVLQSSGLYSLSSVVTVPSSSLGTKTYTCNVDHKPSNTKVDKRVESKYGPPCPSCPAPEFLGGPSVFLFPPKPKDTLMISRTPEVTCVVVDVSQEDPEVQFNWYVDGVEVHNAKTKPREEQFNSTYRVVSVLTVLHQDWLNGKEYKCKVSNKGLPSSIEKTISKAKGQPREPQVYTLPPSQEEMTKNQVSLTCLVKGFYPSDIAVEWESNGQPENNYKTTPPVLDSDGSFFLYSRLTVDKSRWQEGNVFSCSVMHEALHNHYTQKSLSLSLGK

SEQ ID NO: 3861 - protein, 327 aa, Homo sapiens
ASTKGPSVFPLAPCSRSTSESTAALGCLVKDYFPEPVTVSWNSGALTSGVHTFPAVLQSSGLYSLSSVVTVPSSSLGTKTYTCNVDHKPSNTKVDKRVESKYGPPCPPCPAPEFEGGPSVFLFPPKPKDTLMISRTPEVTCVVVDVSQEDPEVQFNWYVDGVEVHNAKTKPREEQFNSTYRVVSVLTVLHQDWLNGKEYKCKVSNKGLPSSIEKTISKAKGQPREPQVYTLPPSQEEMTKNQVSLTCLVKGFYPSDIAVEWESNGQPENNYKTTPPVLDSDGSFFLYSRLTVDKSRWQEGNVFSCSVMHEALHNHYTQKSLSLSLGK

SEQ ID NO: 3862 - protein, 121 aa, Mus musculus; identical to SEQ ID NO: 3146

SEQ ID NO: 3863 - protein, 108 aa, Oryctolagus cuniculus; identical to SEQ ID NO: 3147

SEQ ID NO: 3864 - protein, 114 aa, Oryctolagus cuniculus; identical to SEQ ID NO: 3148

SEQ ID NO: 3865 - protein, 109 aa, Oryctolagus cuniculus; identical to SEQ ID NO: 3149

SEQ ID NO: 3866 - protein, 108 aa, Oryctolagus cuniculus; identical to SEQ ID NO: 3150

SEQ ID NO: 3867 - protein, 109 aa, Oryctolagus cuniculus; identical to SEQ ID NO: 3152

SEQ ID NO: 3868 - protein, 112 aa, Mus musculus; identical to SEQ ID NO: 3305

SEQ ID NO: 3869 - protein, 112 aa, Oryctolagus cuniculus; identical to SEQ ID NO: 3306

SEQ ID NO: 3870 - protein, 107 aa, Oryctolagus cuniculus; identical to SEQ ID NO: 3307

SEQ ID NO: 3871 - protein, 112 aa, Oryctolagus cuniculus; identical to SEQ ID NO: 3308

SEQ ID NO: 3872 - protein, 111 aa, Oryctolagus cuniculus; identical to SEQ ID NO: 3309

SEQ ID NO: 3873 - protein, 111 aa, Oryctolagus cuniculus; identical to SEQ ID NO: 3310

SEQ ID NO: 3874 - protein, 109 aa, Oryctolagus cuniculus; identical to SEQ ID NO: 3311

SEQ ID NO: 3875 - protein, 123 aa, Artificial Sequence
  Description of Artificial Sequence: Synthetic polypeptide
  Sequence 3F.5
EVQLVESGGGLVQAGGSLRLSCAASGRTFSGYGMGWFRQAPGKEREFVAAISWRGGNTYYADSVKGRFTISRDNAKNTVWLQMNSLKPEDTAVYYCSGFVRTRDDPSRIRNYWGQGTQVTVST

SEQ ID NO: 3876 - protein, 118 aa, Artificial Sequence
  Description of Artificial Sequence: Synthetic polypeptide
  Sequence 3A.9
QVQLVESGGDLVQAGGSLRLSCAASGHTFDSYGMGWFRQRPGKGREFVAAITMIGGSTHYADSAKGRFTISRDNTKNTISLQMNSLKPEDTAVYYCHAFSRSRFEGYWGQGIQVTVSS

SEQ ID NO: 3877 - protein, 113 aa, Artificial Sequence
  Description of Artificial Sequence: Synthetic polypeptide
  Sequence 3E.9
QVQLQESGGGLVQPGGSLRLSCVASGFTFSDNAMSWVRRAPGKGLEWVSAINRAGDSARYADSVKGRFTISRDNAKNTLYLQMNSLKPEDTAVYYCTNGGNYRGQGTQVTVSA

SEQ ID NO: 3878 - protein, 115 aa, Artificial Sequence
  Description of Artificial Sequence: Synthetic polypeptide
  Sequence #08
EVQLVESGGGLVQPGGSLRLSCVASGRTSRISRMAWFRQVPGNERELVATMSSSGITSYAGSVKGRFTISRDNAKNTVDLQMNSLKPEDTAVYYCKYSSRWNIYWGQGTQVTVSS

SEQ ID NO: 3879 - protein, 114 aa, Artificial Sequence
  Description of Artificial Sequence: Synthetic polypeptide
  VHH29
QVQLVESGGGLVQAGDSLRLSCAASGRTFSSYVMGWFRQAPGKEREFVAAVTGGGISTYYADSVKGRFTISRDNAKNTVYLQMNSLTPEDTAVYYCYARRLNSWGQGTQVTISS

SEQ ID NO: 3880 - protein, 124 aa, Artificial Sequence
  Description of Artificial Sequence: Synthetic polypeptide
  VHH07
QVQLQESGGGLVQPGGSLRLSCAASRFTLDNYAVGWFRQAAGKEREAVSCSSSGDGRTYYADSVKGRFTISRDNAKDTVYLQMNSLKPEDTAVYYCATGFFVRSCSSPDSYDYWGQGTQVIVSS

SEQ ID NO: 3881 - protein, 124 aa, Artificial Sequence
  Description of Artificial Sequence: Synthetic polypeptide
  VHH15; VHH33; VHH31
QVQLQESGGGAVQPGGSLRLSCAASRFTLDNYAVGWFRQAPGKEREAVSCSSSSDGRTYYADSVKGRFTISRDNAKDTVYLQMNSLKPEDTAVYYCATGFFVRSCRSPDSYDYWGQGTQVIVSS

SEQ ID NO: 3882 - protein, 124 aa, Artificial Sequence
  Description of Artificial Sequence: Synthetic polypeptide
  VHH01
QVQLQESGGGLVQPGGSLRLSCAASRFTLDNYAVGWFRQAPGKEREAVSCSSSSDGPTYYADSVKGRFTISRDNAKDTVYLQMNSLKPEDTAVYYCATGFFVRSCSSPDSYDYWGQGTQVIVSS

SEQ ID NO: 3883 - protein, 124 aa, Artificial Sequence
  Description of Artificial Sequence: Synthetic polypeptide
  VHH04
QVQLQESGGGLVQPGGSLRLSCAASRFTLDYYAVGWFRQAPGKEREAVSCSSSSDGRTYYADSVKGRFTISRDNAKDTVYLQMNSLKPEDTAVYYCATGFFVRSCSSPDSYDYWGQGTQVIVSS

SEQ ID NO: 3884 - protein, 124 aa, Artificial Sequence
  Description of Artificial Sequence: Synthetic polypeptide
  VHH19
QVQLQESGGGLVQPGGSLRLSCAASRFTLDYYAVGWFRQAPGKEREAVSCSSSSDGHTYYADSVKGRFTISRDNAKDTVYLQMNSLKPEDTAVYYCATGFFVRSCSSPDSYDYWGQGTQVIVSS

SEQ ID NO: 3885 - protein, 124 aa, Artificial Sequence
  Description of Artificial Sequence: Synthetic polypeptide
  VHH21
AVQLVESGGGLVQAGGSLRLSCAASGFTFDYYAVGWFRQAPGKEREAVSCSSSSDGRTYYADSVKGRFTISRDNAKDTVYLQMNSLKPEDTAVYYCATGFFVRSCSSPDSYDYWGQGTRVTVSS

SEQ ID NO: 3886 - protein, 125 aa, Artificial Sequence
  Description of Artificial Sequence: Synthetic polypeptide
  VHH05
AVQLVESGGGLVQAGGSLRLSCAASGFTFDDYAIGWFRQAPGKEREGISCISKSDGNTNYADSVKGRFTISSDNAKNTVFLQMNSLKPEDTAVYYCAVGVLGSCPIMVYLLYDDWGQGTRVTVSS

SEQ ID NO: 3887 - protein, 117 aa, Artificial Sequence
  Description of Artificial Sequence: Synthetic polypeptide
  VHH23
AVQLVESGGDLVQPGGSLRLSCTASGFTFNTYGMSWVRQAPGKGLVWVSSISSGGVPMYADSVKGRFTISRDNTKNTLYLQMNSLKPEDTAVYYCVKGYYTGSFLPPGQGTRVTVSS

SEQ ID NO: 3888 - protein, 117 aa, Artificial Sequence
  Description of Artificial Sequence: Synthetic polypeptide
  VHH34
QVQLQESGGGLVQPGGSLRLSCAASGFTFSTYGMSWVRQAPGKGLRWVSSISSGGVPMYASSVKGRFTISRDNAKNTLYLQMNSLKPEDTAVYYCVKGYYTGDFLPPGQGTQVAVSS

SEQ ID NO: 3889 - protein, 117 aa, Artificial Sequence
  Description of Artificial Sequence: Synthetic polypeptide
  VHH26
QVQLQESGGGLVQPGGSLRLSCAASGFTFSTYGMSWVRQAPGKGVEWVSSINSGGVVPMYAASVKGRFTISRDNANNTLTLQMNSLKPEDTAVYYCVKGYYTGNPPLGQGTQVTVSS

SEQ ID NO: 3890 - protein, 115 aa, Artificial Sequence
  Description of Artificial Sequence: Synthetic polypeptide
  VHH18
AVQLVESGGGLVQAGGSLRLSCAASGSIVSLATMGWYRQAPGNQRELVATMSSSGITSYAGSVKGRFTISRDNAKNTVDLQMNSLKPEDTAVYYCKYSSRWNIYWGQGTLVTVSS

SEQ ID NO: 3891 - protein, 115 aa, Artificial Sequence
  Description of Artificial Sequence: Synthetic polypeptide
  VHH09
QVQLQDSGGGLVQPGGSLRLSCAASGSIFSFSTMGWYRQAPGKQRELVAAITRTGTTNYADSVKGRFTISRDNTKNTVYLQMNSLKPEDTSAYYCKLTHPVYLVWGQGTQVTVSS

SEQ ID NO: 3892 - protein, 115 aa, Artificial Sequence
  Description of Artificial Sequence: Synthetic polypeptide
  VHH20
QVQLQESGGGLVQPGGSLRLSCAASGSIFSFSTMGWYRQAPGKQRELVAAITRTGTTNYADSVKGRFTISRDNTKNTVYLQMNSLKPEDTSAYYCKLTHPVYLVWGQGTQVTVSS

SEQ ID NO: 3893 - protein, 124 aa, Artificial Sequence
  Description of Artificial Sequence: Synthetic polypeptide
  VHH32
EVQLVESGGGLVQPGGSLRLSCAASGSIFRINTMAWYRQAPGKQRELVATITNGGNTNYADSVKGRFTISRDNAKNTVYLQMNSLKPEDTAVYYCKAEIGSTRIRDTYYYRDYWGQGIQVTVSS

SEQ ID NO: 3894 - protein, 122 aa, Artificial Sequence
  Description of Artificial Sequence: Synthetic polypeptide
  VHH30
EVQLVESGGGLVQPGGSLRLSCAGSLDIFSVYVMGWYRQVPGGQRDLVATITKEGMPDYADSVKGRFTISRDNAENTVYLQMNSLKPEDTGVYYCALDRFYGSVLRGSPDYWGQGTQVTVSS

SEQ ID NO: 3895 - protein, 127 aa, Artificial Sequence
  Description of Artificial Sequence: Synthetic polypeptide
  VHH28
  MOD_RES (99)..(99): Any naturally occurring amino acid
  MOD_RES (122)..(122): Any naturally occurring amino acid
QVQLQESGGGLVQAGGSLRLSCAASGLAFSRTAMAWFRQAPGKEREFVAAIAWSAGNTLYEESVKGRFTISRDNAKNTVYLQMNNLKPEDTAVYYCAAXRGGSYYSWDGSLTDFGSWGQGTXFTVSS

SEQ ID NO: 3896 - protein, 128 aa, Artificial Sequence
  Description of Artificial Sequence: Synthetic polypeptide
  VHH14
QVQLQESGGGLVQAGGSLRLSCTASGHTLSSYAMGWFRQAPGKEREFVAAISWSDITYYEDSVKGRFTISRDNAKNTVYLQMNSLNPEDTAVYYCAAAPVFAPLTAQHIRLISMYEYWGQGTQVTVSS

SEQ ID NO: 3897 - protein, 122 aa, Artificial Sequence
  Description of Artificial Sequence: Synthetic polypeptide
  VHH12
QVQLQESGGGLVQAGGSLRLSCTVSGFTVDAYAMGWFRQTPGKGHEVVACISSPDGITTYADSVKGRFTISRDSVQNTVSLQMDSLKPEDTAVYVCAAHSDYDCFSVEYGYWGQGTQVTVSS

SEQ ID NO: 3898 - protein, 124 aa, Artificial Sequence
  Description of Artificial Sequence: Synthetic polypeptide
  amyloid 42 VHH sequence 1B
QVQLQESGGGLVQAGGSLRLSCAASGRTFSSYVMGWFRQAPGKEREFVAAIGWSGGSTAYADSVKGRFTISRDDARNTVYLQMNSLKPEDTAVYYCASAPTRWVPRDSRFYDRWGQGTQVTVSS

SEQ ID NO: 3899 - protein, 126 aa, Artificial Sequence
  Description of Artificial Sequence: Synthetic polypeptide
  amyloid 42 VHH sequence 1D
QVQLQDSGGGLVQAGGSLRLSCAASGRTFSNYAMGWFRQAPEKEREFVAAINGSGGSTYYADSVKGRFTISRDDAKNTVYLQMNSLKPEDTAVYYCASKLYGSGTPRDTGDKYSNWGQGTQVTVSS

SEQ ID NO: 3900 - protein, 124 aa, Artificial Sequence
  Description of Artificial Sequence: Synthetic polypeptide
  amyloid 42 VHH sequence 2A
QVQLQDSGGGLVQAGGSLRLSCAASGRTFSSYVMGWFRQAPGKEREFVAAIGWSGGSTAYADSVKGRFTISRDNARNTVYLQMNSLKPEDTAVYYCASAPTRWVPRDSRFYDRWGQGTQVTVSS

SEQ ID NO: 3901 - protein, 115 aa, Artificial Sequence
  Description of Artificial Sequence: Synthetic polypeptide
  amyloid 42 VHH sequence 2B
QVKLEESGGGLVQPGGSLRLSCAASGRTRTIRAMAWFRQALGKQREFIARITVGGTNYADSVKDRFTISRDDAKNTVYLQMNSLKPEDTAVYYCYSKTWGDRNYWGQGTQVTVPS

SEQ ID NO: 3902 - protein, 124 aa, Artificial Sequence
  Description of Artificial Sequence: Synthetic polypeptide
  amyloid 42 VHH sequence 2F
QVQLQESGGGLVQAGGSLRLSCAASGRTFSSYVMGWFRQAPGKEREFVAAIGWSGGSTAYADSVKGRFTISRDNARNTVYLQMNSLKPEDTAVYYCASAPTRWVPRDSRFYDRWGQGTQVTVSS

SEQ ID NO: 3903 - protein, 124 aa, Artificial Sequence
  Description of Artificial Sequence: Synthetic polypeptide
  amyloid 42 VHH sequence 3A
AVQLVESGGGLVRDGGSLRLSCAASGRTFSSYVMGWFRQAPGKEREFVAAIGWSGGSTAYADSVKGRFTISRDNARNTVYLQMNSLKPEDTAVYYCASAPTRWVPRDSRFYDRWGQGTQVTVSS

SEQ ID NO: 3904 - protein, 123 aa, Artificial Sequence
  Description of Artificial Sequence: Synthetic polypeptide
  amyloid 42 VHH sequence 3H
QVQLQESGGGLVQAGGSLRLSCTASGRTFSSWAMAWFRQAPGKEREFLAASWSGGNTAYANSVKGRFTISRDNAKNTVYLQMNSLKPEDTAVYYCASTGTRWVPRDSRFYDRWGQGTRVTVSS

SEQ ID NO: 3905 - protein, 119 aa, Artificial Sequence
  Description of Artificial Sequence: Synthetic polypeptide
  amyloid 42 VHH sequence 4C
QVQLQESGGGLVQAGGSLRLSCAASGRTFSRYAMGWFRQAPGKEREFVARIRWSGGSTYYADSVKGRFTISRDNAKNTVYLQMNSLKPEDTAVYYCAAGGTSGLSFDYWGQGTQVTVSS

SEQ ID NO: 3906 - protein, 124 aa, Artificial Sequence
  Description of Artificial Sequence: Synthetic polypeptide
  amyloid 42 VHH sequence 8F
QVQLQDSGGGLVQAGGSLRLSCAASGRTFSSLVMGWFRQASGKEREFVAAIGWSGGSTAYADSVKGRFTISRDNARNTVYLQMNSLKPEDTAVYYCASAPTRWVPRDSRFYDRWGQGTQVTVSS

SEQ ID NO: 3907 - protein, 124 aa, Artificial Sequence
  Description of Artificial Sequence: Synthetic polypeptide
  amyloid 42 VHH sequence 11D
AVQLVESGGGLVQAGGSLRLSCAASGRTFSSYVMGWFRQAPGKEREFVAAIGWSGGSTAYADSVKGRFTISRDNARNTVYLQMNSLKPEDTAVYYCASAPTRWVPRDSRFYDRWGQGTQVTVSS

SEQ ID NO: 3908 - protein, 118 aa, Artificial Sequence
  Description of Artificial Sequence: Synthetic polypeptide
  amino acid sequence EME7E of the isolated VHH for emerin
QVQLVESGGGLVQAGGSLRLSCAASGRTFSSYTMGWFRQAPGKEREFVAGINWSGVRTYYGDSVKGRFTISRDNAKNTMYLQMNSLKAEDTAVYYCNVRGRYSNTDYWGQGIQVTVSS

SEQ ID NO: 3909 - protein, 125 aa, Artificial Sequence
  Description of Artificial Sequence: Synthetic polypeptide
  amino acid sequence EME1C of the isolated VHH for emerin
DVQLVESGGGLVQPGGSLRLSCAASGSIFRLNDMGWYRQPPGKQREMVATITKGGTTNYADSVKARFTISRDNAKNTVYLQMNSLKPEDTAVYYCNADISTYSAFGLFTPPKNYWGQGTQVTVSS

SEQ ID NO: 3910 - protein, 125 aa, Artificial Sequence
  Description of Artificial Sequence: Synthetic polypeptide
  amino acid sequence VHH01 of the isolated VHH for emerin
QVQLVESGGGLVQPGGSLRLSCAASGSIFRLNDMGWYRQPPGKQREMVATITKGGTTNYADSVKARFTISRDNAKNTVYLQMNSLKPEDTAVYYCNADISTYSAFGLFTPPKNYWGQGTQVTVSS

SEQ ID NO: 3911 - protein, 125 aa, Artificial Sequence
  Description of Artificial Sequence: Synthetic polypeptide
  amino acid sequence VHH03/VHH23 of the isolated VHH for emerin
QVQLQESGGGLVQPGGSLRLSCAASGSIFRLNDMGWYRQPPGKQREMVATITKGGTTNYADSVKARFTISRDNAKNTVYLQMNSLKPEDTAVYYCNADISTYSAFGLFTPPKNYWGQGTQVTVSS

SEQ ID NO: 3912 - protein, 124 aa, Artificial Sequence
  Description of Artificial Sequence: Synthetic polypeptide
  amino acid sequence EME3H of the isolated VHH for emerin
VQLQESGGSLVQPGGSLRLSCAASGSIFRLNDMRWYRQAPGKQREVVATITSGGTTNYADSVKARFTISRDNAKNTVYLQMNSLKPEDTAVYYCNADISLYSAFGLFSPPKNYWGQGTQVTVSS

SEQ ID NO: 3913 - protein, 125 aa, Artificial Sequence
  Description of Artificial Sequence: Synthetic polypeptide
  amino acid sequence VHH09 of the isolated VHH for emerin
QVQLQESGGSLVQPGGSLRLSCAASGSIFRLNDMRWYRQAPGKQREMVATITSGGTTNYADSVKARFTISRDNAKSTVYLQMNSLKPEDTAVYYCNADISLYSAFGLFSPPKNYWGQGTQVTVSS

SEQ ID NO: 3914 - protein, 125 aa, Artificial Sequence
  Description of Artificial Sequence: Synthetic polypeptide
  amino acid sequence VHH12 of the isolated VHH for emerin
QVQLQESGGSLVQPGGSLRLSCAASGSIFRLNDMRWYRQAPGKQREMVATITSGGTTNYADSVKARFTISRDNAKNTVYLQMNSLKPEDTAVYYCNADISLYSAFGLFSPPKNYWGQGTQVTVSS

SEQ ID NO: 3915 - protein, 125 aa, Artificial Sequence
  Description of Artificial Sequence: Synthetic polypeptide
  amino acid sequence VHH05 of the isolated VHH for emerin
QVQLVESGGSLVQPGGSLRLSCAASGSIFRLNDMRWYRQAPGKQREMVATITSGGTTNYADSVKARFTISRDNAKSTVYLQMNSLKPEDTAVYYCNADISLYSAFGLFSPPKNYWGQGIQVTVSS

SEQ ID NO: 3916 - protein, 125 aa, Artificial Sequence
  Description of Artificial Sequence: Synthetic polypeptide
  amino acid sequence VHH11 of the isolated VHH for emerin
AVQLVESGGSLVQPGGGLRLSCAASGSIFRLNDMRWYRQAPGKQREMVATITSGGTTNYADPVKARFTISRDNAKSTVYLQMNSLKPEDTAVYYCNADISLYSAFGLFSPPKNYWGQGIQVTVSS

SEQ ID NO: 3917 - protein, 125 aa, Artificial Sequence
  Description of Artificial Sequence: Synthetic polypeptide
  amino acid sequence EME8A of the isolated VHH for emerin
DVQLVESGGSLVQPGGGLRLSCAASGSIFRLNDMRWYRQAPGKQREMVATITSGGTTNYADSVKARFTISRDNAKSTVYLQMNSLKPEDTAVYYCNADISLYSAFGLFSPPKNYWGQGTQVTVPS

SEQ ID NO: 3918 - protein, 117 aa, Artificial Sequence
  Description of Artificial Sequence: Synthetic polypeptide
  amino acid sequence VHH02 of the isolated VHH for emerin
QVQLVESGGGLVQPGGSLRLSCAASGSGFSINVMGWYRQYPGKQREVVAALSAGGSFYYTDSVKGRFTITRDNAKNTMYLQMNSLKPEDTALYYCAAGLLGQRPDYWGQGTQVTISS

SEQ ID NO: 3919 - protein, 117 aa, Artificial Sequence
  Description of Artificial Sequence: Synthetic polypeptide
  amino acid sequence VHH15 of the isolated VHH for emerin
QVQLVESGGGLVQAGGSLRLSCAASESIFSFKVMGWYRQYPGKQREVVAALSAGGSFYYTDSVKGRFTITRDNAKNTMYLQMNSLKPEDTALYYCAAGLLGQRPDYWGQGTRVTVSS

SEQ ID NO: 3920 - protein, 120 aa, Artificial Sequence
  Description of Artificial Sequence: Synthetic polypeptide
  amino acid sequence VHH10 of the isolated VHH for emerin
QVQLVESGGGLAQPGGSLSLSCAASGDIFSIYAMGWYRQAPGKKRELVADITNYGSTNYADSVKGRFTISRDNAKTTIYLQMNSLKPEDTAVYYCNADSYSKLRGWVVYWGQGTQVTVST

SEQ ID NO: 3921 - protein, 118 aa, Artificial Sequence
  Description of Artificial Sequence: Synthetic polypeptide
  amino acid sequence EME4B of the isolated VHH for emerin
EVQLVESGGGLVQTGDSLRLSCAVSGRTLSSFALGWFRQSPGKEREFVAALTWDGDRTSYSESVKGRFTISRDHAKNTVYLQMNSLKPEDTAVYYCAAGDLGRVPHYWGQGTRVTVSS

SEQ ID NO: 3922 - protein, 122 aa, Artificial Sequence
  Description of Artificial Sequence: Synthetic polypeptide
  amino acid sequence VHH13 of the isolated VHH for emerin
EVQLVESGGGLAQAGGSLRLSCAASGRTSEIYTMGWFRQAPGKEREFVAGIRWRSDRAAYEDSVKGRFTISRDNANNRVYLQMNSLKPEDTAVYYCAASSIAYRNDMSVSIWGQGTRVTVSS

SEQ ID NO: 3923 - protein, 116 aa, Artificial Sequence
  Description of Artificial Sequence: Synthetic polypeptide
  amino acid sequence EME7F of the isolated VHH for emerin
AVQLVESGGGLVQAGGSLRLSCAASGRTLRSYAVGWFRQAPGKEREFVAGINWNGDSTYYSDSVKGRFTISRDNAKNTVYLQMNSLKPDDTAVYYCNAGYIGNYYWGQGTQVTVSS

SEQ ID NO: 3924 - protein, 116 aa, Artificial Sequence
  Description of Artificial Sequence: Synthetic polypeptide
  amino acid sequence VHH14 of the isolated VHH for emerin
AVQLVESGGGLVQAGGSLRLSCAASGRTFSSYAVGWFRQAPGKDREFVAGINWTGANTYHADSVAGRVTISRDNAKNVVYLQMNSLKPEDTAVYYCNAGTQGGWYWGQGIQVTVSS

SEQ ID NO: 3925 - protein, 122 aa, Artificial Sequence
  Description of Artificial Sequence: Synthetic polypeptide
  amino acid sequence EME2G of the isolated VHH for emerin
DVQLVESGGGLVQAGGSLRLSCATSGRSLSSYAMAWFRQAPGKEREFVAGINFSGRRTYYTDSVKGRFNITRDNAKNTVYLQMNSLKPEDTAVYYCNVGGRKVLAGTFFNDWGQGTQVTVST

SEQ ID NO: 3926 - protein, 120 aa, Artificial Sequence
  Description of Artificial Sequence: Synthetic polypeptide
  amino acid sequence EME8D of the isolated VHH for emerin
EVQLVESGGGLVQAGGSLTLSCAASGRTLSSYAMGWFRQAPGKEREFVAGINWSGGSTYYADSVKGRFAISRDNAKNTVYLRMNSLKPEDTAVYYCNAGRFERLRLISYWGQGTQVTVST

SEQ ID NO: 3927 - protein, 120 aa, Artificial Sequence
  Description of Artificial Sequence: Synthetic polypeptide
  amino acid sequence VHH04 of the isolated VHH for emerin
QVQLVESGGGLVQAGGSLRLSCAASGRTFSDYTMGWFRQAPGKEREFVAGINGSGGRTYYADSVKDRFTISRDNAKNTVYLQMNNLKLEDTAVYYCNAGRFERLRLISYWGQGTQVTVPS

SEQ ID NO: 3928 - protein, 116 aa, Artificial Sequence
  Description of Artificial Sequence: Synthetic polypeptide
  amino acid sequence VHH07/08 of the isolated VHH for emerin
QVQLVESGGGLVQAGDSLRLSCAASGRTFSSYAMGWFRQAPGKEREFVAGISWSGGNTYYSDSVKGRFTISRDNTKNTVYLQMNSLKPEDTAVYSCNAGTYYKNYWGQGTQVTVSS

SEQ ID NO: 3929 - protein, 125 aa, Artificial Sequence
  Description of Artificial Sequence: Synthetic polypeptide
  amino acid sequence VHH16 of the isolated VHH for emerin
QVQLVESGGGLVQPGGSLRLSCAASGSIFRLNDMGWYRQPPGKQREMVATITKGGTTNYADSVKARFTISRDNAKNTVYLQMNSLKPEDTAVYYCNADISTYSAFGLFTPPKNYWGQGIQVTVSS

SEQ ID NO: 3930 - protein, 125 aa, Artificial Sequence
  Description of Artificial Sequence: Synthetic polypeptide
  amino acid sequence 3.6B of the isolated VHH for emerin
QVQLVESGGSLVQPGGSLRLSCAASGSIFRLNDMRWYRQAPGKQREMVATITSGGTTNYADSVKARFTISRDNAKSTVYLQMNSLKPEDTAVYYCNADISLYSAFGLFSPPKNYWGQGTQVTVST

SEQ ID NO: 3931 - protein, 125 aa, Artificial Sequence
  Description of Artificial Sequence: Synthetic polypeptide
  amino acid sequence 3.8B of the isolated VHH for emerin
DVQLVESGGSLVQPGGSLRLSCAASGSIFRLNDMRWYRQAPGKQREMVATITSGGTTNYADSVKARFTISRDNAKSTVYLQMNSLKPEDTAVYYCNADISLYSAFGLFSPPKNYWGQGIQVTVSS

SEQ ID NO: 3932 - protein, 125 aa, Artificial Sequence
  Description of Artificial Sequence: Synthetic polypeptide
  amino acid sequence VHH24 of the isolated VHH for emerin
QVQLVESGGSLVQPGGSLRLSCAASGSIFRLNDMRWYRQAPGKQREMVATITSGGTTNYADSVKARFTISRDNAKSTVYLQMNSLKPEDTAVYYCNADISLYSAFGLFSPPKNYWGQGTQVTVSS

SEQ ID NO: 3933 - protein, 125 aa, Artificial Sequence
  Description of Artificial Sequence: Synthetic polypeptide
  amino acid sequence VHH21 of the isolated VHH for emerin
QVQLQESGGSLVQPGGSLRLSCAASGSIFRLNDMRWYRQAPGKQREMVATITSGGTTNYADSVKARFTISRDNAKSTVYLQMNSLKPEDTAVYYCNADISLYSAFGLFSPPKNYWGQGIQVTVSS

SEQ ID NO: 3934 - protein, 128 aa, Artificial Sequence
  Description of Artificial Sequence: Synthetic polypeptide
  amino acid sequence 3.8E of the isolated VHH for emerin
QVQLQESGGELVQAGGSLRLSCAASGRTLSSYTIGWFRQAPGNVREFVAHHFASGGVTDYADFVKGRFTISRDNAKNTVYLEMNSLKPEDTAVYYCAASTFTIPGYRNLKAAYEYDYWGQGTQVTVSS

SEQ ID NO: 3935 - protein, 122 aa, Artificial Sequence
  Description of Artificial Sequence: Synthetic polypeptide
  amino acid sequence of VHH domains which can translocate via blood brain barrier to the brain
EVQLQASGGGLVQAGGSLRLSCAASGFKITHYTMGWFRQAPGKEREFVSRITWGGDNTFYSNSVKGRFTISRDNAKNTVYLQMNSLKPEDTADYYCAAGSTSTATPLRVDYWGKGTQVTVSS

SEQ ID NO: 3936 - protein, 125 aa, Artificial Sequence
  Description of Artificial Sequence: Synthetic polypeptide
  amino acid sequence of VHH domains which can translocate via blood brain barrier to the brain
EVQLQASGGGLVQAGGSLRLSCSASVRTFSIYTMGWFRQAPGKEREFVAGINRSGDVTKYADFVKGRFSISRDHAKNMVYLQMNSLKPEDTALYYCAATWAYDTVGALTSGYNFWGQGTQVTVSS

SEQ ID NO: 3937 - protein, 474 aa, Artificial Sequence
  Description of Artificial Sequence: Synthetic polypeptide
AMDWTWSILFLVAAATGAHSQVQLVQSGAEVKKPGASVKVSCKASGYTFSSNGIIWVRQAPGQGLEWLGWISGYNGKTRYAQKVQGRVTITTDTSTSTAYMELRSLRSDDTAVYYCAREKTMVRGAISGYSDYWGQGTLVTVSSASTKGPSVFPLAPSSKSTSGGTAALGCLVKDYFPEPVTVSWNSGALTSGVHTFPAVLQSSGLYSLSSVVTVPSSSLGTQTYICNVNHKPSNTKVDKRVEPKSCDKTHTCPPCPAPELLGGPSVFLFPPKPKDTLMISRTPEVTCVVVDVSHEDPEVKFNWYVDGVEVHNAKTKPREEQYNSTYRVVSVLTVLHQDWLNGKEYKCKVSNKALPAPIEKTISKAKGQPREPQVYTLPPSREEMTKNQVSLTCLVKGFYPSDIAVEWESNGQPENNYKTTPPVLDSDGSFFLYSKLTVDKSRWQQGNVFSCSVMHEALHNHYTQKSLSLSPGK

SEQ ID NO: 3938 - protein, 474 aa, Homo sapiens
AMDWTWSILFLVAAATGAHSQVQLVQSGAEVKKPGASVKVSCKASGYTFSSNGIIWVRQAPGQGLEWLGWISGYNGKTRYAQKVQGRVTITTDTSTSTAYMELRSLRSDDTAVYYCAREKTMVRGAISGYSDYWGQGTLVTVSSASTKGPSVFPLAPSSKSTSGGTAALGCLVKDYFPEPVTVSWNSGALTSGVHTFPAVLQSSGLYSLSSVVTVPSSSLGTQTYICNVNHKPSNTKVDKKVEPKSCDKTHTCPPCPAPELLGGPSVFLFPPKPKDTLMISRTPEVTCVVVDVSHEDPEVKFNWYVDGVEVHNAKTKPREEQYNSTYRVVSVLTVLHQDWLNGKEYKCKVSNKALPAPIEKTISKAKGQPREPQVYTLPPSRDELTKNQVSLTCLVKGFYPSDIAVEWESNGQPENNYKTTPPVLDSDGSFFLYSKLTVDKSRWQQGNVFSCSVMHEALHNHYTQKSLSLSPGK

SEQ ID NO: 3939 - protein, 16 aa, Artificial Sequence
  Description of Artificial Sequence: Synthetic peptide
  LCDR1 of exemplified tau monoclonal antibody of Example 1
RSSQSLVHSNQNTYLH

SEQ ID NO: 3940 - protein, 8 aa, Artificial Sequence
  Description of Artificial Sequence: Synthetic peptide
  LCDR2 of exemplified tau monoclonal antibody of Example 1
YKVDNRFS

SEQ ID NO: 3941 - protein, 9 aa, Artificial Sequence
  Description of Artificial Sequence: Synthetic peptide
  LCDR3 of exemplified tau monoclonal antibody of Example 1
SQSTLVPLT

SEQ ID NO: 3942 - protein, 13 aa, Artificial Sequence
  Description of Artificial Sequence: Synthetic peptide
  HCDR1 of exemplified tau monoclonal antibody of Example 1
KGSGYTFSNYWIE

SEQ ID NO: 3943 - protein, 17 aa, Artificial Sequence
  Description of Artificial Sequence: Synthetic peptide
  HCDR2 of exemplified tau monoclonal antibody of Example 1
EILPGSDSIKYEKNFKG

SEQ ID NO: 3944 - protein, 9 aa, Artificial Sequence
  Description of Artificial Sequence: Synthetic peptide
  HCDR3 of exemplified tau monoclonal antibody of Example 1
ARRGNYVDD

SEQ ID NO: 3945 - protein, 16 aa, Artificial Sequence
  Description of Artificial Sequence: Synthetic peptide
KSSQSLLYSDGKTFLN

SEQ ID NO: 3946 - protein, 16 aa, Artificial Sequence
  Description of Artificial Sequence: Synthetic peptide
KSSQSLLYSDGKTYLN

SEQ ID NO: 3947 - protein, 15 aa, Artificial Sequence
  Description of Artificial Sequence: Synthetic peptide
RASQSVSTSRYSYIH

SEQ ID NO: 3948 - protein, 7 aa, Artificial Sequence
  Description of Artificial Sequence: Synthetic peptide
YASNLES

SEQ ID NO: 3949 - protein, 9 aa, Artificial Sequence
  Description of Artificial Sequence: Synthetic peptide
HHSWEIPLT

SEQ ID NO: 3950 - protein, 5 aa, Artificial Sequence
  Description of Artificial Sequence: Synthetic peptide
NYWVN

SEQ ID NO: 3951 - protein, 16 aa, Artificial Sequence
  Description of Artificial Sequence: Synthetic peptide
QIRLKSDNYATHYEES

SEQ ID NO: 3952 - protein, 4 aa, Artificial Sequence
  Description of Artificial Sequence: Synthetic peptide
WEDY

SEQ ID NO: 3953 - protein, 159 aa, Artificial Sequence
  Description of Artificial Sequence: Synthetic polypeptide
  DH-Tau15
QVKLEESGGGLVQPGGSLRLSCAASGFTFSNFAMTWVRQSPGKGLEWVSAIDNDGGRTSYSDSVKGRFTISRDNAKNTLYLQMNSLKPEDTAMYYCAAMNLATRKWELWGQGTQVTVSSETSSPAEPKSCDKTHTCPPCPGSEQKLISEEDLNHHHHHH

SEQ ID NO: 3954 - protein, 224 aa, Artificial Sequence
  Description of Artificial Sequence: Synthetic polypeptide
  Fc-Tau15
QVKLEESGGGLVQPGGSLRLSCAASGFTFSNFAMTWVRQSPGKGLEWVSAIDNDGGRTSYSDSVKGRFTISRDNAKNTLYLQMNSLKPEDTAMYYCAAMNLATRKWELWGQGTQVTVSSAEPISCDKTHTCPPCPAPELLGGPSVFLFPPKPKDTLMISRTPEVTCVVVDVSHEDPEVKFNWYVDGVEVHNAKTKPREEQYNSTYRVVSVLTVLHQDWLNGKEY

SEQ ID NO: 3955 - DNA, 2168 bp, Artificial Sequence
  Description of Artificial Sequence: Synthetic polynucleotide
gaggagccaccatggaatggacctgggtctttctcttcctcctgtcagtaactgcaggtgtccactcccaggttcagctgcagcagtctggagctgagctgatgaagcctggggcctcagtgaagatatcctgcaaggctactggctacacattcagtaactactggatagagtgggtaaagcagaggcctggacatggccttgagtggattggagagattttacctggaagtgatagtattaagtacaatgagaatttcaagggcaaggccacattcactgcagatacatcctccaacacagcctacatgcaactcagcagcctgacatctgaggactctgccgtctattactgtgcaagaagggggaactacccagactactggggccaaggcaccactctcacagtctcctcagccaaaacgacacccccatctgtctatccactggcccctggatctgctgcccaaactaactccatggtgaccctgggatgcctggtcaagggctatttccctgagccagtgacagtgacctggaactctggatccctgtccagcggtgtgcacaccttcccagctgtcctgcagtctgacctctacactctgagcagctcagtgactgtcccctccagcacctggcccagcgagaccgtcacctgcaacgttgcccacccggccagcagcaccaaggtggacaagaaaattgtgcccagggattgtggttgtaagccttgcatatgtacagtcccagaagtatcatctgtcttcatcttccccccaaagcccaaggatgtgctcaccattactctgactcctaaggtcacgtgtgttgtggtagacatcagcaaggatgatcccgaggtccagttcagctggtttgtagatgatgtggaggtgcacacagctcagacgcaaccccgggaggagcagttcaacagcactttccgctcagtcagtgaacttcccatcatgcaccaggactggctcaatggcaaggagttcaaatgcagggtcaacagtgcagctttccctgcccccatcgagaaaaccatctccaaaaccaaaggcagaccgaaggctccacaggtgtacaccattccacctcccaaggagcagatggccaaggataaagtcagtctgacctgcatgataacagacttcttccctgaagacattactgtggagtggcagtggaatgggcagccagcggagaactacaagaacactcagcccatcatggacacagatggctcttacttcgtctacagcaagctcaatgtgcagaagagcaactgggaggcaggaaatactttcacctgctctgtgttacatgagggcctgcacaaccaccatactgagaagagcctctcccactctcctggtagaaagaggcgagagggcagaggaagtcttctaacatgcggtgacgtggaggagaatcccggccctatgaagttgcctgttaggctgttggtgctgatgttctggattcctgcttccagcagtgatgttgtgatgacccaaactccactctccctgcctgtcagtcttggagatcaagcctccatctcttgcagatctagtcagagccttgtacacagtaatggaaacacctatttacattggtacctgcagaagccaggccagtctccaaagctcctgatctacaaagtttccaaccgattttctggggtcccagacaggttcagtggcagtggatcagggacagatttcacactcaagatcagcagagtggaggctgaggatctgggagtttatttctgctctcaaagtacacatgttccgctcacgttcggtgctgggaccaagctggagctgaaacgggctgatgctgcaccaactgtatccatcttcccaccatccagtgagcagttaacatctggaggtgcctcagtcgtgtgcttcttgaacaacttctaccccaaagacatcaatgtcaagtggaagattgatggcagtgaacgacaaaatggcgtcctgaacagttggactgatcaggacagcaaagacagcacctacagcatgagcagcaccctcacgttgaccaaggacgagtatgaacgacataacagctatacctgtgaggccactcacaagacatcaacttcacccattgtcaagagcttcaacaggaatgagtgttag

SEQ ID NO: 3956 - protein, 718 aa, Artificial Sequence
  Description of Artificial Sequence: Synthetic polypeptide
MEWTWVFLFLLSVTAGVHSQVQLQQSGAELMKPGASVKISCKATGYTFSNYWIEWVKQRPGHGLEWIGEILPGSDSIKYNENFKGKATFTADTSSNTAYMQLSSLTSEDSAVYYCARRGNYPDYWGQGTTLTVSSAKTTPPSVYPLAPGSAAQTNSMVTLGCLVKGYFPEPVTVTWNSGSLSSGVHTFPAVLQSDLYTLSSSVTVPSSTWPSETVTCNVAHPASSTKVDKKIVPRDCGCKPCICTVPEVSSVFIFPPKPKDVLTITLTPKVTCVVVDISKDDPEVQFSWFVDDVEVHTAQTQPREEQFNSTFRSVSELPIMHQDWLNGKEFKCRVNSAAFPAPIEKTISKTKGRPKAPQVYTIPPPKEQMAKDKVSLTCMITDFFPEDITVEWQWNGQPAENYKNTQPIMDTDGSYFVYSKLNVQKSNWEAGNTFTCSVLHEGLHNHHTEKSLSHSPGRKRREGRGSLLTCGDVEENPGPMKLPVRLLVLMFWIPASSSDVVMTQTPLSLPVSLGDQASISCRSSQSLVHSNGNTYLHWYLQKPGQSPKLLIYKVSNRFSGVPDRFSGSGSGTDFTLKISRVEAEDLGVYFCSQSTHVPLTFGAGTKLELKRADAAPTVSIFPPSSEQLTSGGASVVCFLNNFYPKDINVKWKIDGSERQNGVLNSWTDQDSKDSTYSMSSTLTLTKDEYERHNSYTCEATHKTSTSPIVKSFNRNEC

SEQ ID NO: 3957 - DNA, 2168 bp, Artificial Sequence
  Description of Artificial Sequence: Synthetic polynucleotide
gaggagccaccatggagtggacctgggtgttcctgttcctgctgagcgtgaccgccggcgtgcactcccaagtccagctgcagcagagcggcgccgagctgatgaagcccggcgccagcgtgaagatcagctgcaaggccaccggctacaccttcagcaactactggatcgagtgggtgaagcagcggcccggccacggcctggagtggatcggcgagatcctgcccggcagcgacagcatcaagtacaacgagaacttcaagggcaaggccaccttcaccgccgacaccagcagcaacaccgcctacatgcagctgagcagcctgaccagcgaggacagcgccgtgtactactgcgcccggcggggcaactaccccgactactggggccagggcaccaccctgaccgtctccagcgccaagaccacaccacccagcgtgtacccactggctccaggcagcgctgcccagaccaacagcatggtgaccctgggctgcctggtgaagggctacttccccgagcccgtgaccgtgacctggaacagcggcagcctgagcagcggcgtgcacaccttcccagccgtgctccaaagcgacctgtacacactgagcagcagcgtgaccgtgcccagcagcacctggcccagcgagaccgtgacctgcaacgtggcccaccccgccagcagcaccaaggtggacaagaagatcgtgccccgggactgcggctgcaagccctgcatctgcaccgtgcccgaagtcagcagcgtgttcatcttcccacccaagcccaaggacgtgctgaccatcaccctgacacccaaagtcacctgcgtggtggtggacatcagcaaggacgaccccgaggtgcagttcagctggttcgtggacgacgtggaggtgcacaccgcccagacccagccccgggaggagcagttcaacagcaccttccggagcgtgagcgagctgcccatcatgcaccaggactggctgaacggcaaggagttcaagtgccgggtgaacagcgccgccttccccgcccccatcgagaagaccatcagcaagaccaagggacggcccaaggctccccaggtgtacaccatcccaccacccaaggagcagatggccaaggacaaagtcagcctgacctgcatgatcaccgacttcttccccgaggacatcaccgtggagtggcagtggaacggccagcccgccgagaactacaagaacacccagcccatcatggacaccgacggcagctacttcgtgtacagcaagctgaacgtgcagaagagcaactgggaggccggcaacaccttcacctgcagcgtgctgcacgagggcctgcacaaccatcacaccgagaagagcctgagccacagcccaggacggaagcgccgcgagggcaggggcagcctgctgacctgcggcgacgtggaggagaacccaggccccatgaagctgcccgtgcggctgctggtgctgatgttctggatccccgccagcagcagcgacgtggtgatgacccagaccccactgagcctgcccgtgagcctgggcgaccaggccagcatcagctgccggagcagccagagcctggtgcacagcaacggcaacacctacctgcactggtacctgcagaagcccggccagagccccaagctgctgatctacaaagtcagcaaccggttcagcggcgtgcccgaccggttcagcggcagcggcagcggcaccgacttcaccctgaagatcagccgggtggaggccgaggacctgggcgtgtacttctgcagccagagcacccacgtgcccctgaccttcggcgccggcaccaagctggagctgaagcgggccgacgccgctcccaccgtcagcatcttcccaccctcctccgagcagctgaccagcggaggcgccagcgtggtgtgcttcctgaacaacttctaccccaaggacatcaacgtgaagtggaagatcgacggcagcgagcggcagaacggcgtgctgaacagctggaccgaccaggacagcaaggacagcacctacagcatgagcagcaccctgaccctgaccaaggacgagtacgagcggcacaacagctacacctgcgaggccacccacaagaccagcaccagccccatcgtgaagagcttcaaccggaacgagtgctga

SEQ ID NO: 3958 - DNA, 2174 bp, Artificial Sequence
  Description of Artificial Sequence: Synthetic polynucleotide
gaggagccaccatgggatggagctggatctttctctttctcctgtcaggaactacaggtgtcctctctgaggtccagctgcaacagtctggacctgagctggtgaagcctggggcttcagtgaagatatcctgcaagacttctggatacacattcactgaatacaccatacactgggtgaagcagagccatggagagagccttgagtggattggaggtattaatccaaacgatggtggtactatttacaaccagaagttcaagggcaaggccacattgactgtagacaagtcctccaaaacagcctacatggagctccgcagcctgacatctgaggattctgcagtcttttactgtgcaagagggccctccgccaggtttccttactggggccaagggactctggtcactgtctctgcagccaaaacgacacccccatctgtctatccactggcccctggatctgctgcccaaactaactccatggtgaccctgggatgcctggtcaagggctatttccctgagccagtgacagtgacctggaactctggatccctgtccagcggtgtgcacaccttcccagctgtcctgcagtctgacctctacactctgagcagctcagtgactgtcccctccagcacctggcccagcgagaccgtcacctgcaacgttgcccacccggccagcagcaccaaggtggacaagaaaattgtgcccagggattgtggttgtaagccttgcatatgtacagtcccagaagtatcatctgtcttcatcttccccccaaagcccaaggatgtgctcaccattactctgactcctaaggtcacgtgtgttgtggtagacatcagcaaggatgatcccgaggtccagttcagctggtttgtagatgatgtggaggtgcacacagctcagacgcaaccccgggaggagcagttcaacagcactttccgctcagtcagtgaacttcccatcatgcaccaggactggctcaatggcaaggagttcaaatgcagggtcaacagtgcagctttccctgcccccatcgagaaaaccatctccaaaaccaaaggcagaccgaaggctccacaggtgtacaccattccacctcccaaggagcagatggccaaggataaagtcagtctgacctgcatgataacagacttcttccctgaagacattactgtggagtggcagtggaatgggcagccagcggagaactacaagaacactcagcccatcatggacacagatggctcttacttcgtctacagcaagctcaatgtgcagaagagcaactgggaggcaggaaatactttcacctgctctgtgttacatgagggcctgcacaaccaccatactgagaagagcctctcccactctcctggtagaaagaggcgagagggcagaggaagtcttctaacatgcggtgacgtggaggagaatcccggccctatgatgagtcctgcccagttcctgtttctgttagtgctctggattcgggaaaccaacggtgatgttgtgatgacccagactccactcactttgtcggttaccattggacaaccagcctccatctcttgcaagtcaagtcagagcctcttagatagtgatggaaagacatatttgaattggttgttacagaggccaggccagtctccaaagcgcctaatctatctggtgtctaaactggactctggagtccctgacagattcactggcagtggatcagggacagatttcacactgaaaattagcagagtggaggctgaggatttgggagtttattattgctggcaaggtacacattttcctcggacgttcggtggaggcaccaagctggaaatcaaacgggctgatgctgcaccaactgtatccatcttcccaccatccagtgagcagttaacatctggaggtgcctcagtcgtgtgcttcttgaacaacttctaccccaaagacatcaatgtcaagtggaagattgatggcagtgaacgacaaaatggcgtcctgaacagttggactgatcaggacagcaaagacagcacctacagcatgagcagcaccctcacgttgaccaaggacgagtatgaacgacataacagctatacctgtgaggccactcacaagacatcaacttcacccattgtcaagagcttcaacaggaatgagtgttag

SEQ ID NO: 3959 - protein, 720 aa, Artificial Sequence
  Description of Artificial Sequence: Synthetic polypeptide
MGWSWIFLFLLSGTTGVLSEVQLQQSGPELVKPGASVKISCKTSGYTFTEYTIHWVKQSHGESLEWIGGINPNDGGTIYNQKFKGKATLTVDKSSKTAYMELRSLTSEDSAVFYCARGPSARFPYWGQGTLVTVSAAKTTPPSVYPLAPGSAAQTNSMVTLGCLVKGYFPEPVTVTWNSGSLSSGVHTFPAVLQSDLYTLSSSVTVPSSTWPSETVTCNVAHPASSTKVDKKIVPRDCGCKPCICTVPEVSSVFIFPPKPKDVLTITLTPKVTCVVVDISKDDPEVQFSWFVDDVEVHTAQTQPREEQFNSTFRSVSELPIMHQDWLNGKEFKCRVNSAAFPAPIEKTISKTKGRPKAPQVYTIPPPKEQMAKDKVSLTCMITDFFPEDITVEWQWNGQPAENYKNTQPIMDTDGSYFVYSKLNVQKSNWEAGNTFTCSVLHEGLHNHHTEKSLSHSPGRKRREGRGSLLTCGDVEENPGPMMSPAQFLFLLVLWIRETNGDVVMTQTPLTLSVTIGQPASISCKSSQSLLDSDGKTYLNWLLQRPGQSPKRLIYLVSKLDSGVPDRFTGSGSGTDFTLKISRVEAEDLGVYYCWQGTHFPRTFGGGTKLEIKRADAAPTVSIFPPSSEQLTSGGASVVCFLNNFYPKDINVKWKIDGSERQNGVLNSWTDQDSKDSTYSMSSTLTLTKDEYERHNSYTCEATHKTSTSPIVKSFNRNEC

SEQ ID NO: 3960 - DNA, 2174 bp, Artificial Sequence
  Description of Artificial Sequence: Synthetic polynucleotide
gaggagccaccatgggctggagctggatcttcctgttcctgctgagcggcaccaccggcgtgctgagcgaggtgcagctgcagcagagcggccccgagctggtgaagcccggcgccagcgtgaagatcagctgcaagaccagcggctacaccttcaccgagtacaccatccactgggtgaagcagagccacggcgagagcctggagtggatcggcggcatcaaccccaacgacggcggcaccatctacaaccagaagttcaagggcaaggccaccctgaccgtggacaagagcagcaagaccgcctacatggagctgcggagcctgaccagcgaggacagcgccgtgttctactgcgctcggggccccagcgcccggttcccctactggggccagggcaccctggtgaccgtgagcgccgccaagaccacaccacccagcgtgtacccactggctccaggcagcgctgcccaaaccaacagcatggtgaccctgggctgcctggtgaagggctacttccccgagcccgtgaccgtgacctggaacagcggcagcctgagcagcggcgtgcacaccttcccagctgtgctccagtccgacctgtacaccctgagcagcagcgtgaccgtgcccagcagcacctggcccagcgagaccgtgacctgcaacgtggcccaccccgccagcagcaccaaggtggacaagaagatcgtgccccgggactgcggctgcaagccctgcatctgcaccgtgcctgaggtctccagcgtgttcatcttcccccccaagcccaaggacgtgctgaccatcaccctgacccctaaagtcacctgcgtggtggtggacatcagcaaggacgaccccgaggtgcagttcagctggttcgtggacgacgtggaggtgcacaccgcccagacccagccccgggaggagcagttcaacagcaccttccggagcgtgagcgagctgcccatcatgcaccaggactggctgaacggcaaggagttcaagtgccgggtgaacagcgccgccttccccgcccccatcgagaagaccatcagcaagaccaagggccgacccaaggccccacaggtgtacaccatcccaccacccaaggagcagatggccaaggacaaagtcagcctgacctgcatgatcaccgacttcttccccgaggacatcaccgtggagtggcagtggaacggccagccagccgagaactacaagaacacccagcccatcatggacaccgacggcagctacttcgtgtacagcaagctgaacgtgcagaagagcaactgggaggccggcaacaccttcacctgcagcgtgctgcacgagggcctgcacaaccaccacaccgagaagagcctgagccacagccccggacggaagcggcgcgagggacggggcagcctgctgacctgcggcgacgtggaggagaacccaggccccatgatgagcccagcccagttcctgttcctgctggtgctgtggatccgggagaccaacggcgacgtggtgatgacccagaccccactgaccctgagcgtgaccatcggccagcccgccagcatcagctgcaagagcagccagagcctgctggacagcgacggcaagacctacctgaactggctgctgcagcggccaggccagagccccaagcggctgatctatctcgtcagcaagctggacagcggcgtgcccgaccggttcaccggcagcggcagcggcaccgacttcaccctgaagatcagccgggtggaggccgaggacctgggcgtgtactactgctggcagggcacccactttccccggaccttcggcggcggcaccaagctggagatcaagcgggccgacgccgccccaacagtcagcatctttccaccatcctccgagcagctcaccagcggcggcgccagcgtggtgtgcttcctgaacaacttctaccccaaggacatcaacgtgaagtggaagatcgacggcagcgagcggcagaacggcgtgctgaacagctggaccgaccaggacagcaaggacagcacctacagcatgagcagcaccctgaccctgaccaaggacgagtacgagcggcacaacagctacacctgcgaggccacccacaagaccagcaccagccccatcgtgaagagcttcaaccggaacgagtgctga

SEQ ID NO: 3961 - protein, 118 aa, Mus musculus
DVQLVESGGGLVQPGGSRKLSCAASGFTFSSFGMHWVRQVPEKGLEWVAYISSGSSTIYYADTVKGRFTISRDNPKNTLFLQMTSLRSEDTAMYYCASNQSPTGFAYWGQGTLVTVSA

SEQ ID NO: 3962 - protein, 115 aa, Artificial Sequence
  Description of Artificial Sequence: Synthetic polypeptide
  Synthetic: 113F5-F7 heavy chain variable region (VH)
EVKLEESGGGLVQPGGSMRLSCVASEFTFSNYWMNWIRQSPEKGLEWVAQIRLKSDNYATHYAESVKGRFTISRDASNFSVYLQMNNLRAEDTGIYYCTGGTSYWGQGTTLTVSS

SEQ ID NO: 3963 - protein, 117 aa, Artificial Sequence
  Description of Artificial Sequence: Synthetic polypeptide
  Synthetic: 11E10-B8 heavy chain variable region (VH)
EVQLVESGGDLVKPGGSLKLSCAASGFTFRSYGMSWVRQTPDKRLEWVATISGGGSYTYYPDSVKGRFTISRDNAKNTLYLQMSSLKSEDTAMYYCAVSYDGAMDYWGQGTSVTVSS

SEQ ID NO: 3964 - protein, 119 aa, Artificial Sequence
  Description of Artificial Sequence: Synthetic polypeptide
  Synthetic: 123E9-A1 heavy chain variable region (VH)
EVQLQQSGPELVKPGASVKMSCKASGYTFTDYYMKWVKQSHGKSLEWIGDIDPNNGGTSYNQKFKGKATLTVDKSSSTAYMQLNSLTSEDSAVYYCARSAGFGDSFSFWGLGTLVTVSA

SEQ ID NO: 3965 - protein, 115 aa, Artificial Sequence
  Description of Artificial Sequence: Synthetic polypeptide
  Synthetic: 125B11-H3 heavy chain variable region (VH)
EVKLEESGGGLVQPGGSMKLSCVASRFIFSNYWMNWVRQSPEKGLEWVAQIRLKSDNYATHYAESVKGRFTISRDDSKSSVYLQMNNLRAEDTGIYYCTGGTTYWGQGTTLTVSS

SEQ ID NO: 3966 - protein, 114 aa, Artificial Sequence
  Description of Artificial Sequence: Synthetic polypeptide
  Synthetic: 126F11-G11 heavy chain variable region (VH)
EVQLQQSGAELVRPGASVKLSCTASGFNIKDDYMHWVKQRPEQGLEWIGWIDPENGDTEYASKFQGKATITTDTSSNTAYLQLSSLTSEDTAVYYCLDFAYGYWGQGTTLTVSS

SEQ ID NO: 3967 - protein, 115 aa, Artificial Sequence
  Description of Artificial Sequence: Synthetic polypeptide
  Synthetic: 12A10-E8 heavy chain variable region (VH)
QIQLVQSGPELKKPGETVKISCKASGYTFTNYGMNWVKQAPGKGLKWMGWINMYTGEPTYGDDFKGRFVFSLETSVSTVYLQINNLKKEDTATFFCARGGRPDYWGQGTSVTVSS

SEQ ID NO: 3968 - protein, 120 aa, Artificial Sequence
  Description of Artificial Sequence: Synthetic polypeptide
  Synthetic: 14F5-D9 heavy chain variable region (VH)
EVKLVESGGGLVQPGGSLRLSCATSGFTFSDFYMEWVRQSPGKRLEWIAASKNKANDYTTEYNASVKDRFFVSRDTSQSILYLQMNALRAEDTAIYYCARDALGTVFAYWGQGTLVTVSA

SEQ ID NO: 3969 - protein, 119 aa, Artificial Sequence
  Description of Artificial Sequence: Synthetic polypeptide
  Synthetic: 15C6-A7 heavy chain variable region (VH)
EVQLQQSGPELVKPGASVMMTCKASGYTFTDYYMKWVKQSNGKSLEWIGDLDPYTGGANYNQKFKGKATLTVDKSSSTAYMHLNSLTSEDSAVYYCARSRGYGDSFAYWGQGTLVTVSA

SEQ ID NO: 3970 - protein, 118 aa, Artificial Sequence
  Description of Artificial Sequence: Synthetic polypeptide
  17H3.2_VH
EVQLVESGGGLVQPGGSLRLSCAASGFTFSSYAMHWVRQAPGKGLEWVSAISGSGGRTYYADSVKGRFTISRDNSKNTLYLQMNSLRAEDTAVYYCAKRGLDYAFDYWGQGTLVTVSS

SEQ ID NO: 3971 - protein, 119 aa, Artificial Sequence
  Description of Artificial Sequence: Synthetic polypeptide
  Synthetic: 19F8-B1  heavy chain variable region (VH)
EVQLQQSGPELVKPGASVKMSCKASGYTFTDYYMKWVKQSHGKSLEWIGDLNPNNGGTLYNQKFKGQATLTVDKSSSTAYMQFNSLTSEDSAVYYCARSAGYGDSFAYWGQGTLVTVSA

SEQ ID NO: 3972 - protein, 117 aa, Artificial Sequence
  Description of Artificial Sequence: Synthetic polypeptide
  Synthetic: 19H6-F7 heavy chain variable region (VH)
EVQLVESGGDLVKPGGSLKLSCAASGFTFSSYGMSWVRQTPDKRLEWVATISSGGTYTYYPDSVKGRFTISRDNAKNTLYLQMSSLKSEDTAMYYCAPSYDGAMDYWGQGTSVTVSS

SEQ ID NO: 3973 - protein, 120 aa, Artificial Sequence
  Description of Artificial Sequence: Synthetic polypeptide
  Synthetic: 22G7-C9 heavy chain variable region (VH)
QIQLVQSGPELKKPGETVKISCKASGYTFTDCSIHWVKQAPGEGLKWMGWINTETGEPSYADDFKGRFAFSLETSASTAFLQINNLKSEDTASYFCGTAYYRYDGALDYWGQGTSVTVSS

SEQ ID NO: 3974 - protein, 119 aa, Artificial Sequence
  Description of Artificial Sequence: Synthetic polypeptide
  Synthetic: 24A11-D5 heavy chain variable region (VH)
EVQLQQSGPELVKPGASVKMSCKASGYTFTDYYMKWVKQSHGKSLEWIGDLNPKNGGIIYNQKFKGQATLTVDKSSSTAYMQLNSLTSEDSAVFYCARSGGYGDSFAYWGQGTLVTVSA

SEQ ID NO: 3975 - protein, 121 aa, Artificial Sequence
  Description of Artificial Sequence: Synthetic polypeptide
  Synthetic: 26C1-B11 heavy chain variable region (VH)
EVHLQQSGAELVRSGASVKLSCTASGFNIKDYYMYWVKQRPEQGLEWIGWIDPENGDTEYFPKFQGKATMTADTSSKTAYLQLSSLTSEDTAVYYCNAWRARATNSALDYWGQGTSVTVSS

SEQ ID NO: 3976 - protein, 117 aa, Artificial Sequence
  Description of Artificial Sequence: Synthetic polypeptide
  29H2.10_VH
EVQLVESGGGLVKPGGSLRLSCVVSGFTFSNYSMNWVRQAPGKGLEWVSSISRSSSYIYYADSVKGRFTIARDNAKNSLYLQMNSLRAEDTAVYYCARWFMGGMDVWGQGTTVTVSS

SEQ ID NO: 3977 - protein, 117 aa, Artificial Sequence
  Description of Artificial Sequence: Synthetic polypeptide
  29H2.10N31S_VH (Mutant)
EVQLVESGGGLVKPGGSLRLSCVVSGFTFSSYSMNWVRQAPGKGLEWVSSISRSSSYIYYADSVKGRFTIARDNAKNSLYLQMNSLRAEDTAVYYCARWFMGGMDVWGQGTTVTVSS

SEQ ID NO: 3978 - protein, 117 aa, Artificial Sequence
  Description of Artificial Sequence: Synthetic polypeptide
  Synthetic: 30G1-B2  heavy chain variable region (VH)
QVQLQQSGAELVRPGASVTLSCKASGYTFTDYEMYWVKQTPVHGLEWIGAIDPETGDTAYNQKFKGKATLTADKSSNTAYMELRSLTSEDSAVYYCIRQYGNWFPYWGQGTLVTVSA

SEQ ID NO: 3979 - protein, 117 aa, Artificial Sequence
  Description of Artificial Sequence: Synthetic polypeptide
  Synthetic: 37D3-H9 heavy chain variable region (VH)
EVQLVESGGDLAKPGGSLKLSCTASGLIFRSYGMSWVRQTPDKRLEWVATINSGGTYTYYPDSVKGRFTISRDNAKNTLYLQMSSLKSEDTAMYYCANSYSGAMDYWGQGTSVTVSS

SEQ ID NO: 3980 - protein, 117 aa, Artificial Sequence
  Description of Artificial Sequence: Synthetic polypeptide
  Synthetic: 3A4-H4 heavy chain variable region (VH)
EVQLVESGGDLVKPGGSLKLSCAASGFTFSSYGMSWVRQTPDKRLEWVATISSGGTYTYYPDSVKGRFTISRDNAKNTLYLQMSSLKSEDTAMYFCATSYDGAMDYWGQGTSVTVSS

SEQ ID NO: 3981 - protein, 119 aa, Mus musculus
EVQLVESGGGLVQPKGSLKLSCAASGFTFNIYAMNWVRQAPGKGLEWVARIRSKSNNYATYYADSMKDRFTISRDDSQSMLYLQMNNLKTEDTAMYYCVRHGNYYFDYWGQGTTLTVSS

SEQ ID NO: 3982 - protein, 117 aa, Artificial Sequence
  Description of Artificial Sequence: Synthetic polypeptide
  Synthetic: 52F6-F11 heavy chain variable region (VH)
QVQLQQSGTELAKPGASVKLSCKASGYTFTHYWMHWIKQRPGQGLEWIGYIYPTNDYTKYNQNFRDKATLTADESSNSAYMQLNSLTYEDSAVYYCARAGNRVFDFWGQGTTLTVSS

SEQ ID NO: 3983 - protein, 117 aa, Artificial Sequence
  Description of Artificial Sequence: Synthetic polypeptide
  Synthetic: 54C1-H11 and 61E7-C4 heavy chain variable region (VH)
EVQLVESGGDLVKPGGSLKVSCVASGFTFRSYGMSWVRQTPDKRLDWVATISSGGNYTYYPDSVKGRFTISRDNAKNTLYLQMSSLKSEDTAMYYCASSYSGAMDYWGQGTSVTVSS

SEQ ID NO: 3984 - protein, 120 aa, Artificial Sequence
  Description of Artificial Sequence: Synthetic polypeptide
  Synthetic: 55E7-F11 heavy chain variable region (VH)
EVKLEESGGGLVQPGGSMKLSCVASGFTFSNYWMNWVRQSPEKGLEWVAQIRLKSDNYATHYAESVKGRFTISRDDSKSSVYLQMNNLRAEDTGIYYCAGYFYGGYFDVWGTGTTVTVSS

SEQ ID NO: 3985 - protein, 114 aa, Artificial Sequence
  Description of Artificial Sequence: Synthetic polypeptide
  Synthetic: 66F5-A1 heavy chain variable region (VH)
QVQLQQSGAELVRPGASVTLSCKASGYTFIDYEMNWVKQTPVHGLEWIGAIDPENGGTAYNQKFKGKAIVTADKSSSTAYMELRSLTSEDSAVYYCSGPHFDYWGQGTTLTVSS

SEQ ID NO: 3986 - protein, 122 aa, Artificial Sequence
  Description of Artificial Sequence: Synthetic polypeptide
  Synthetic: 73H6-B8 heavy chain variable region (VH)
QVQLKESGPGLVAPSQSLSITCTISGFSLTSYGVHWVRQPPGKGLEWLVVIWSDGSTTYNSALKSRLSISKDNSKSQVFLKMNSLQTDDTAMYYCARQGGFITTAYYAMDYWGQGTSVTVSS

SEQ ID NO: 3987 - protein, 116 aa, Artificial Sequence
  Description of Artificial Sequence: Synthetic polypeptide
  Synthetic: 7A11-C12 heavy chain variable region (VH)
QIQLVQSGPDLKKPGETVKISCKASGYTFTNYGMNWVKQAPGKGLKWMGWINTNTGEPTYAEEFKGRFAFSLETSASTAYLQIDNLKNEDTATYFCARGTVSFPYWGQGTLVTVSA

SEQ ID NO: 3988 - protein, 120 aa, Artificial Sequence
  Description of Artificial Sequence: Synthetic polypeptide
  Synthetic: 89F4-A1 heavy chain variable region (VH)
EVQLVESGGGLVQPKGSLKLSCAASGFTFNTYAMNWVRQAPGKGLEWVARIRSKSNNYAAYFADSVKDRFTISRDDSQTMLYLQMNNLKSEDTAMYYCVSGGNYVPFAYWGQGTLVTVSA

SEQ ID NO: 3989 - protein, 115 aa, Artificial Sequence
  Description of Artificial Sequence: Synthetic polypeptide
  Synthetic: 93A8-D2 heavy chain variable region (VH)
EVQLQQSGPVLVKPGASVKMSCKASGYTFTDYYVNWVKQSHGKGLEWIGLINPNNGRTSYNQNFNDKATLTVDKSSSTAFMDLNSLTSEDSAVYYCTREGGTGYWGQGTTLSVSS

SEQ ID NO: 3990 - protein, 113 aa, Artificial Sequence
  Description of Artificial Sequence: Synthetic polypeptide
  Synthetic: 94B2-C1 heavy chain variable region (VH)
EVQLQQSGPELVKPGASMKISCKASGYSLTGYTMNWVKQSHGKNLEWIGLISPYNGVTSYNQKFKGKATLTVDKSSNTAYMELLSLTFEDSAVYYCARQGAYWGQGTLVTVSA

SEQ ID NO: 3991 - DNA, 2850 bp, Artificial Sequence
  Description of Artificial Sequence: Synthetic polynucleotide
aagcttgccgccaccatgggatggagctgtatcatcctcttcttggtagcaacagctacaggtaaggggctcacagtagcaggcttgaggtctggacatatatatgggtgacaatgacatccactttgcctttctctccacaggtgtccactcccaggtccagctggtgcaatctggagccgaagtgaagaagcctgggtcctcagtgaaggtgtcctgtaaggcttctggatataccttcactgactactacatgaactgggtgaggcaggcccctggacagggccttgagtggattggagatattaatcctaaccgcggtggaactacttacaaccagaagttcaagggcagggtgaccatcactgtggacaagtccaccagcacagcctacatggaactcagcagcctgagatctgaggacaccgcagtctattactgtgcaagttactacgccgtgggctactggggccaaggcaccactgtgacagtctcctcaggtgagtccttacaacctctctcttctattcagcttaaatagattttactgcatttgttgggggggaaatgtgtgtatctgaatttcaggtcatgaaggactagggacaccttgggagtcagaaagggtcattgggagcccgggctgatgcagacagacatcctcagctcccagacttcatggccagagatttataggatccagctttctggggcaggccaggcctgaccttggctgggggcagggagggggctaaggtgacgcaggtggcgccagccaggtgcacacccaatgcccatgagcccagacactggaccctgcatggaccatcgcggatagacaagaaccgaggggcctctgcgccctgggcccagctctgtcccacaccgcggtcacatggcaccacctctcttgcagcttccaccaagggcccatccgtcttccccctggcgccctgctccagatcgacctccgagagcacagccgccctgggctgcctggtcaaggactacttccccgaaccggtgacggtgtcgtggaactcaggcgccctgaccagcggcgtgcacaccttcccggctgtcctacagtcctcaggactctactccctcagcagcgtggtgaccgtgccctccagcagcttgggcacgaagacctacacctgcaacgtagatcacaagcccagcaacaccaaggtggacaagagagttggtgagaggccagcacagggagggagggtgtctgctggaagccaggctcagccctcctgcctggacgcaccccggctgtgcagccccagcccagggcagcaaggcatgccccatctgtctcctcacccggaggcctctgaccaccccactcatgctcagggagagggtcttctggatttttccaccaggctccgggcagccacaggctggatgcccctaccccaggccctgcgcatacaggggcaggtgctgcgctcagacctgccaagagccatatccgggaggaccctgcccctgacctaagcccaccccaaaggccaaactctccactccctcagctcagacaccttctctcctcccagatcgatctgagtaactcccaatcttctctctgcagagtccaaatatggtcccccgtgtcccccatgcccaggtaagccaacccaggcctcgccctccagctcaaggcgggacaggtgccctagagtagcctgcatccagggacaggccccagccgggtgctgacgcatccacctccatctcttcctcagcacctgagttcctggggggaccatcagtcttcctgttccccccaaaacccaaggacactctcatgatctcccggacccctgaggtcacgtgcgtggtggtggacgtgagccaggaagaccccgaggtccagttcaactggtacgtggatggcgtggaggtgcataatgccaagacaaagccgcgggaggagcagttcaacagcacgtaccgtgtggtcagcgtcctcaccgtcctgcaccaggactggctgaacggcaaggagtacaagtgcaaggtctccaacaaaggcctcccgtcctccatcgagaaaaccatctccaaagccaaaggtgggacccacggggtgcgagggccacatggacagaggtcagctcggcccaccctctgccctgggagtgaccgctgtgccaacctctgtccctacagggcagccccgagagccacaggtgtacaccctgcccccatcccaggaggagatgaccaagaaccaggtcagcctgacctgcctggtcaaaggcttctaccccagcgacatcgccgtggagtgggagagcaatgggcagccggagaacaactacaagaccacgcctcccgtcctcgattccgacggctccttcttcctctacagcaggctaaccgtggacaagagcaggtggcaggaggggaatgtcttctcatgctccgtgatgcatgaggctctgcacaaccactacacacagaagagcctctccctgtctctgggttgatgagtgccagggccggcaagcccccgctccccgggctctcggggtcgcgcgaggatgcttggcacgtaccccgtctacatacttcccaggcacccagcatggaaataaagcacccaccactgccctgggcccctgtgagactgtgatggttctttccacgggtcaggccgagtctgaggcctgagtgacatgagggaggcagagcgggtcccactgtccccacactggcccaggctgtgcaggtgtgcctgggccgcctagggtggggctcagccaggggctgccctcggcagggtgggggatttgccagcgtggccctccctccagcagcaggtacctcgag

SEQ ID NO: 3992 - protein, 115 aa, Artificial Sequence
  Description of Artificial Sequence: Synthetic polypeptide
  Synthetic: hu125B11.v17 heavy chain variable region (VH)
EVQLVESGGGLVQPGGSLRLSCAASRFIFSNYWMNWVRQAPGKGLEWVAQIRLKSDNYATHYAESVKGRFTISRDDSKNTLYLQMNSLRAEDTAVYYCTGGTTYWGQGTLVTVSS

SEQ ID NO: 3993 - protein, 107 aa, Artificial Sequence
  Description of Artificial Sequence: Synthetic polypeptide
  Synthetic: hu125B11.v17 light chain variable region (VH)
DIQMTQSPSSLSASVGDRVTITCKASQNVGTAVAWYQQKPGKSPKLLIYSASIRYTGVPSRFSGSGSGTDFTLTISSLQPEDFATYFCQQFRTYPYTFGQGTKVEIK

SEQ ID NO: 3994 - protein, 115 aa, Artificial Sequence
  Description of Artificial Sequence: Synthetic polypeptide
  Synthetic: hu125B11.v26 heavy chain variable region (VH)
EVQLVESGGGLVQPGGSLRLSCAASRFIFSNYWMNWVRQAPGKGLEWVAQIRLKSDNYATHYAESVKGRFTISRDNSKNTLYLQMNSLRAEDTAVYYCTGGTTYWGQGTLVTVSS

SEQ ID NO: 3995 - protein, 107 aa, Artificial Sequence
  Description of Artificial Sequence: Synthetic polypeptide
  Synthetic: hu125B11.v26 light chain variable region (VH)
DIQMTQSPSSLSASVGDRVTITCKASQNVGTAVAWYQQKPGKAPKLLIYSASIRYTGVPSRFSGSGSGTDFTLTISSLQPEDFATYFCQQFRTYPYTFGQGTKVEIK

SEQ ID NO: 3996 - protein, 115 aa, Artificial Sequence; identical to SEQ ID NO: 3994
  Description of Artificial Sequence: Synthetic polypeptide
  Synthetic: hu125B11.v28 heavy chain variable region (VH)

SEQ ID NO: 3997 - protein, 107 aa, Artificial Sequence
  Description of Artificial Sequence: Synthetic polypeptide
  Synthetic: hu125B11.v28 light chain variable region (VH)
DIQMTQSPSSLSASVGDRVTITCKASQNVGTAVAWYQQKPGKAPKLLIYSASIRYTGVPSRFSGSGSGTDFTLTISSLQPEDFATYYCQQFRTYPYTFGQGTKVEIK

SEQ ID NO: 3998 - protein, 115 aa, Artificial Sequence
  Description of Artificial Sequence: Synthetic polypeptide
  Synthetic: hu125B11-H3.HC1
EVQLVESGGGLVQPGGSLRLSCAASRFIFSNYWMNWVRQAPGKGLEWVAQIRLKSDNYATHYAESVKGRFTISRDDSKNTVYLQMNSLRAEDTAVYYCTGGTTYWGQGTLVTVSS

SEQ ID NO: 3999 - protein, 115 aa, Artificial Sequence
  Description of Artificial Sequence: Synthetic polypeptide
  Synthetic: hu125B11-H3.HC2
EVQLVESGGGLVQPGGSLRLSCAASRFIFSNYWMNWVRQAPGKGLEWVAQIRLKSDNYATHYAESVKGRFTISRDNSKNTVYLQMNSLRAEDTAVYYCTGGTTYWGQGTLVTVSS

SEQ ID NO: 4000 - protein, 115 aa, Artificial Sequence; identical to SEQ ID NO: 3994
  Description of Artificial Sequence: Synthetic polypeptide
  Synthetic: hu125B11-H3.HC4

SEQ ID NO: 4001 - protein, 115 aa, Artificial Sequence
  Description of Artificial Sequence: Synthetic polypeptide
  Synthetic: hu125B11-H3.HC5
EVQLVESGGGLVQPGGSLRLSCAASRFIFSNYYMNWVRQAPGKGLEWVAQIRLKSDNYATHYAESVKGRFTISRDDSKNTVYLQMNSLRAEDTAVYYCTGGTTYWGQGTLVTVSS

SEQ ID NO: 4002 - protein, 115 aa, Artificial Sequence
  Description of Artificial Sequence: Synthetic polypeptide
  Synthetic: hu125B11-H3.HC6
EVQLVESGGGLVQPGGSLRLSCAASRFIFSNYFMNWVRQAPGKGLEWVAQIRLKSDNYATHYAESVKGRFTISRDDSKNTVYLQMNSLRAEDTAVYYCTGGTTYWGQGTLVTVSS

SEQ ID NO: 4003 - protein, 117 aa, Artificial Sequence
  Description of Artificial Sequence: Synthetic polypeptide
  Synthetic: Hu37D3.v39 heavy chain variable region (VH)
EVQLVESGGGLVQPGGSLRLSCAASGLIFRSYGMSWVRQAPGKGLEWVATINSGGTYTYYPDSVKGRFTISRDNSKNTLYLQMNSLRAEDTAVYYCANSYSGAMDYWGQGTLVTVSS

SEQ ID NO: 4004 - protein, 117 aa, Artificial Sequence; identical to SEQ ID NO: 4003
  Description of Artificial Sequence: Synthetic polypeptide
  Synthetic: Hu37D3-H9.v1 heavy chain variable region (VH)

SEQ ID NO: 4005 - protein, 117 aa, Artificial Sequence; identical to SEQ ID NO: 4003
  Description of Artificial Sequence: Synthetic polypeptide
  Synthetic: Hu37D3-H9.v28.A4 heavy chain variable region (VH)

SEQ ID NO: 4006 - protein, 444 aa, Artificial Sequence
  Description of Artificial Sequence: Synthetic polypeptide
  Synthetic: Hu37D3-H9.v28.A4 IgG4-S228P.YTE heavy chain
EVQLVESGGGLVQPGGSLRLSCAASGLIFRSYGMSWVRQAPGKGLEWVATINSGGTYTYYPDSVKGRFTISRDNSKNTLYLQMNSLRAEDTAVYYCANSYSGAMDYWGQGTLVTVSSASTKGPSVFPLAPCSRSTSESTAALGCLVKDYFPEPVTVSWNSGALTSGVHTFPAVLQSSGLYSLSSVVTVPSSSLGTKTYTCNVDHKPSNTKVDKRVESKYGPPCPPCPAPEFLGGPSVFLFPPKPKDTLYITREPEVTCVVVDVSQEDPEVQFNWYVDGVEVHNAKTKPREEQFNSTYRVVSVLTVLHQDWLNGKEYKCKVSNKGLPSSIEKTISKAKGQPREPQVYTLPPSQEEMTKNQVSLTCLVKGFYPSDIAVEWESNGQPENNYKTTPPVLDSDGSFFLYSRLTVDKSRWQEGNVFSCSVMHEALHNHYTQKSLSLSLGK

SEQ ID NO: 4007 - protein, 443 aa, Artificial Sequence
  Description of Artificial Sequence: Synthetic polypeptide
  Synthetic: Hu37D3-H9.v28.A4 IgG4-S228P.YTE des-K heavy chain
EVQLVESGGGLVQPGGSLRLSCAASGLIFRSYGMSWVRQAPGKGLEWVATINSGGTYTYYPDSVKGRFTISRDNSKNTLYLQMNSLRAEDTAVYYCANSYSGAMDYWGQGTLVTVSSASTKGPSVFPLAPCSRSTSESTAALGCLVKDYFPEPVTVSWNSGALTSGVHTFPAVLQSSGLYSLSSVVTVPSSSLGTKTYTCNVDHKPSNTKVDKRVESKYGPPCPPCPAPEFLGGPSVFLFPPKPKDTLYITREPEVTCVVVDVSQEDPEVQFNWYVDGVEVHNAKTKPREEQFNSTYRVVSVLTVLHQDWLNGKEYKCKVSNKGLPSSIEKTISKAKGQPREPQVYTLPPSQEEMTKNQVSLTCLVKGFYPSDIAVEWESNGQPENNYKTTPPVLDSDGSFFLYSRLTVDKSRWQEGNVFSCSVMHEALHNHYTQKSLSLSLG

SEQ ID NO: 4008 - protein, 117 aa, Artificial Sequence; identical to SEQ ID NO: 4003
  Description of Artificial Sequence: Synthetic polypeptide
  Synthetic: Hu37D3-H9.v5 heavy chain variable region (VH)

SEQ ID NO: 4009 - protein, 113 aa, Artificial Sequence
  Description of Artificial Sequence: Synthetic polypeptide
  Synthetic: Hu94B2.HC1
EVQLVQSGAEVKKPGASVKVSCKASGYSLTGYTMNWVRQAPGQGLEWIGLISPYNGVTSYNQKFKGRATLTVDKSTSTAYLELSSLRSEDTAVYYCARQGAYWGQGTLVTVSS

SEQ ID NO: 4010 - protein, 113 aa, Artificial Sequence
  Description of Artificial Sequence: Synthetic polypeptide
  Synthetic: Hu94B2.HC2
EVQLVQSGAEVKKPGASVKVSCKASGYSLTGYTMNWVRQAPGQGLEWIGLISPYNGVTSYNQKFKGRVTLTVDKSTSTAYLELSSLRSEDTAVYYCARQGAYWGQGTLVTVSS

SEQ ID NO: 4011 - protein, 113 aa, Artificial Sequence
  Description of Artificial Sequence: Synthetic polypeptide
  Synthetic: Hu94B2.HC3
EVQLVQSGAEVKKPGASVKVSCKASGYSLTGYTMNWVRQAPGQGLEWIGLISPYNGVTSYNQKFKGRATITVDKSTSTAYLELSSLRSEDTAVYYCARQGAYWGQGTLVTVSS

SEQ ID NO: 4012 - protein, 113 aa, Artificial Sequence
  Description of Artificial Sequence: Synthetic polypeptide
  Synthetic: Hu94B2.HC4
EVQLVQSGAEVKKPGASVKVSCKASGYSLTGYTMNWVRQAPGQGLEWIGLISPYNGVTSYNQKFKGRATLTRDKSTSTAYLELSSLRSEDTAVYYCARQGAYWGQGTLVTVSS

SEQ ID NO: 4013 - protein, 113 aa, Artificial Sequence
  Description of Artificial Sequence: Synthetic polypeptide
  Synthetic: Hu94B2.HC5
EVQLVQSGAEVKKPGASVKVSCKASGYSLTGYTMNWVRQAPGQGLEWIGLISPYNGVTSYNQKFKGRATLTVDTSTSTAYLELSSLRSEDTAVYYCARQGAYWGQGTLVTVSS

SEQ ID NO: 4014 - protein, 113 aa, Artificial Sequence
  Description of Artificial Sequence: Synthetic polypeptide
  Synthetic: Hu94B2.HC6
EVQLVQSGAEVKKPGASVKVSCKASGYSLTGYTMNWVRQAPGQGLEWIGLISPYNGVTSYNQKFKGRVTITVDKSTSTAYLELSSLRSEDTAVYYCARQGAYWGQGTLVTVSS

SEQ ID NO: 4015 - protein, 113 aa, Artificial Sequence
  Description of Artificial Sequence: Synthetic polypeptide
  Synthetic: Hu94B2.HC7
EVQLVQSGAEVKKPGASVKVSCKASGYSLTGYTMNWVRQAPGQGLEWIGLISPYNGVTSYNQKFKGRVTITRDKSTSTAYLELSSLRSEDTAVYYCARQGAYWGQGTLVTVSS

SEQ ID NO: 4016 - protein, 113 aa, Artificial Sequence
  Description of Artificial Sequence: Synthetic polypeptide
  Synthetic: Hu94B2.HC8
EVQLVQSGAEVKKPGASVKVSCKASGYSLTGYTMNWVRQAPGQGLEWIGLISPYNGVTSYNQKFKGRVTITVDTSTSTAYLELSSLRSEDTAVYYCARQGAYWGQGTLVTVSS

SEQ ID NO: 4017 - protein, 113 aa, Artificial Sequence; identical to SEQ ID NO: 4009
  Description of Artificial Sequence: Synthetic polypeptide
  Synthetic: Hu94B2.v105 heavy chain variable region (VH)

SEQ ID NO: 4018 - protein, 108 aa, Oryctolagus cuniculus; identical to SEQ ID NO: 3151

SEQ ID NO: 4019 - protein, 442 aa, Artificial Sequence
  Description of Artificial Sequence: Synthetic polypeptide
  HC of exemplified tau monoclonal antibody of Example 1
EVQLVQSGAEVKKPGESLKISCKGSGYTFSNYWIEWVRQMPGKGLEWMGEILPGSDSIKYEKNFKGQVTISADKSISTAYLQWSSLKASDTAMYYCARRGNYVDDWGQGTLVTVSSASTKGPSVFPLAPCSRSTSESTAALGCLVKDYFPEPVTVSWNSGALTSGVHTFPAVLQSSGLYSLSSVVTVPSSSLGTKTYTCNVDHKPSNTKVDKRVESKYGPPCPPCPAPEAAGGPSVFLFPPKPKDTLMISRTPEVTCVVVDVSQEDPEVQFNWYVDGVEVHNAKTKPREEQFNSTYRVVSVLTVLHQDWLNGKEYKCKVSNKGLPSSIEKTISKAKGQPREPQVYTLPPSQEEMTKNQVSLTCLVKGFYPSDIAVEWESNGQPENNYKTTPPVLDSDGSFFLYSRLTVDKSRWQEGNVFSCSVMHEALHNHYTQKSLSLSLG

SEQ ID NO: 4020 - DNA, 1326 bp, Artificial Sequence
  Description of Artificial Sequence: Synthetic polynucleotide
  Nucleotide Sequence Encoding the Exemplified HC (SEQ ID NO: 2)
gaggtgcagctggtgcagtctggagcagaggtgaaaaagcccggggagtctctgaagatctcctgtaagggttctggctacacattcagtaactactggatagagtgggtgcgccagatgcccgggaaaggcctggagtggatgggggagattttacctggaagtgatagtattaagtacgaaaagaatttcaagggccaggtcaccatctcagccgacaagtccatcagcaccgcctacctgcagtggagcagcctgaaggcctcggacaccgccatgtattactgtgcgagaagggggaactacgtggacgactggggccagggcaccctggtcaccgtctcctcagcttctaccaagggcccatcggtcttcccgctagcgccctgctccaggagcacctccgagagcacagccgccctgggctgcctggtcaaggactacttccccgaaccggtgacggtgtcgtggaactcaggcgccctgaccagcggcgtgcacaccttcccggctgtcctacagtcctcaggactctactccctcagcagcgtggtgaccgtgccctccagcagcttgggcacgaagacctacacctgcaacgtagatcacaagcccagcaacaccaaggtggacaagagagttgagtccaaatatggtcccccatgcccaccctgcccagcacctgaggccgccgggggaccatcagtcttcctgttccccccaaaacccaaggacactctcatgatctcccggacccctgaggtcacgtgcgtggtggtggacgtgagccaggaagaccccgaggtccagttcaactggtacgtggatggcgtggaggtgcataatgccaagacaaagccgcgggaggagcagttcaacagcacgtaccgtgtggtcagcgtcctcaccgtcctgcaccaggactggctgaacggcaaggagtacaagtgcaaggtctccaacaaaggcctcccgtcctccatcgagaaaaccatctccaaagccaaagggcagccccgagagccacaggtgtacaccctgcccccatcccaggaggagatgaccaagaaccaggtcagcctgacctgcctggtcaaaggcttctaccccagcgacatcgccgtggagtgggaaagcaatgggcagccggagaacaactacaagaccacgcctcccgtgctggactccgacggctccttcttcctctacagcaggctaaccgtggacaagagcaggtggcaggaggggaatgtcttctcatgctccgtgatgcatgaggctctgcacaaccactacacacagaagagcctctccctgtctctgggt

SEQ ID NO: 4021 - protein, 330 aa, Homo sapiens [sequence omitted]

SEQ ID NO: 4022 - protein, 120 aa, Artificial Sequence; identical to SEQ ID NO: 3099
  Description of Artificial Sequence: Synthetic polypeptide

SEQ ID NO: 4023 - protein, 112 aa, Artificial Sequence; identical to SEQ ID NO: 3775
  Description of Artificial Sequence: Synthetic polypeptide
  Humanized Sequence

SEQ ID NO: 4024 - protein, 116 aa, Artificial Sequence
  Description of Artificial Sequence: Synthetic polypeptide
  HCVR of exemplified tau monoclonal antibody of Example 1
EVQLVQSGAEVKKPGESLKISCKGSGYTFSNYWIEWVRQMPGKGLEWMGEILPGSDSIKYEKNFKGQVTISADKSISTAYLQWSSLKASDTAMYYCARRGNYVDDWGQGTLVTVSS

SEQ ID NO: 4025 - protein, 253 aa, Artificial Sequence
  Description of Artificial Sequence: Synthetic polypeptide
MAEVQLVVSGGGLVKPGGSMILSCAASGFTFSNYSMNWVRQAPGKGLEWVSSISSSSEYIYYADFVKGRFTISRDNAKNSLYLQMDSLRAEDTAVYYCAHWPRLWRFPLWGRGTLVTVSSGGGGSGGGGSGGGGSQSVLTQPASVSGSPGQSITISCAGTSSDVGGYNYVSWYQQHPGKAPKLMIYEDSKRPSGVSNRFSGSKSGNTASLTISGLRAEDEADYYCVLNMHWANFGGGTKLAVLGAAAEQKLIS

SEQ ID NO: 4026 - protein, 252 aa, Artificial Sequence
  Description of Artificial Sequence: Synthetic polypeptide
MAEVQLVVSGGGLVKPGGSMILSCAASGFTFSNYSMNWVRQAPGKGLEWVSSISSSSEYIYYADFVKGRFTISRDNAKNSLYLQMDSLRAEDTAVYYCAITGCECTWGRGTLVTVSSGGGGSGGGGSGGGGSQSVLTQPASVSGSPGQSITISCAGTSSDVGGYNYVSWYQQHPGKAPKLMIYEDSKRPSGVSNRFSGSKSGNTASLTISGLRAEDEADYYCSCIRGLKAAYFGGGTKLAVLGAAAEQKLIS

SEQ ID NO: 4027 - protein, 253 aa, Artificial Sequence
  Description of Artificial Sequence: Synthetic polypeptide
MAEVQLVVSGGGLVKPGGSMILSCAASGFTFSNYSMNWVRQAPGKGLEWVSSISSSSEYIYYADFVKGRFTISRDNAKNSLYLQMDSLRAEDTAVYYCAAAVCNGRPDTWGRGTLVTVSSGGGGSGGGGSGGGGSQSVLTQPASVSGSPGQSITISCAGTSSDVGGYNYVSWYQQHPGKAPKLMIYEDSKRPSGVSNRFSGSKSGNTASLTISGLRAEDEADYYCGYSLLPVLFGGGTKLAVLGAAAEQKLIS

SEQ ID NO: 4028 - protein, 252 aa, Artificial Sequence
  Description of Artificial Sequence: Synthetic polypeptide
MAEVQLVVSGGGLVKPGGSMILSCAASGFTFSNYSMNWVRQAPGKGLEWVSSISSSSEYIYYADFVKGRFTISRDNAKNSLYLQMDSLRAEDTAVYYCAWPGYRKAWGRGTLVTVSSGGGGSGGGGSGGGGSQSVLTQPASVSGSPGQSITISCAGTSSDVGGYNYVSWYQQHPGKAPKLMIYEDSKRPSGVSNRFSGSKSGNTASLTISGLRAEDEADYYCSYCASKGHWLFGGGTKLAVLGAAAEQKLIS

SEQ ID NO: 4029 - protein, 254 aa, Artificial Sequence
  Description of Artificial Sequence: Synthetic polypeptide
  MOD_RES (100)..(100): His, Ile, Ala or not present
  MOD_RES (104)..(104): Leu, Tyr, Glu or Asn
  MOD_RES (105)..(105): Trp, Arg, Cys or Gly
  MOD_RES (106)..(106): May or may not be present
  MOD_RES (107)..(107): Pro, Lys, Asp or not present
  MOD_RES (226)..(226): May or may not be present
  MOD_RES (227)..(227): Val, Ala, Ile or not present
  MOD_RES (228)..(228): Leu, Ser, Arg or Tyr
  MOD_RES (229)..(229): Asn, Lys, Gly or Ser
  MOD_RES (234)..(234): Asn, Tyr, Leu or not present
MAEVQLVVSGGGLVKPGGSMILSCAASGFTFSNYSMNWVRQAPGKGLEWVSSISSSSEYIYYADFVKGRFTISRDNAKNSLYLQMDSLRAEDTAVYYCAXWPCXXRXTWGRGTLVTVSSGGGGSGGGGSGGGGSQSVLTQPASVSGSPGQSITISCKNSSSDVGGYNYVSWYQQHPGKAPKLMIYEDSKRPSGVSNRFSGSKSGNTASLTISGLRAEDEADYYCSCXXXLHWAXFGGGTKLAVLGAAAEQKLIS

SEQ ID NO: 4030 - protein, 107 aa, Homo sapiens [sequence omitted]

SEQ ID NO: 4031 - protein, 106 aa, Homo sapiens; identical to SEQ ID NO: 3842

SEQ ID NO: 4032 - protein, 112 aa, Mus musculus; identical to SEQ ID NO: 3223

SEQ ID NO: 4033 - protein, 107 aa, Artificial Sequence
  Description of Artificial Sequence: Synthetic polypeptide
  Synthetic: 113F5-F7 light chain variable region (VL)
DIVMTQSQKIMSTSVGDRVSITCKASQNVGTAVAWYQQRPGHSPKLLIYSASRRFSGVPDRFTGSGSGTDFTLTIINVQSEDLADYFCQQFSTYPYTFGVGTKLEIK

SEQ ID NO: 4034 - protein, 112 aa, Artificial Sequence
  Description of Artificial Sequence: Synthetic polypeptide
  Synthetic: 11E10-B8 light chain variable region (VL)
DVLMTQTPLSLPVSLGDQASISCRSSQSIVHSNGNTYLEWYLQKPGQSPKLLIYKVSNRFSGVPDRFSGSGSGTDFTLKISRVEAEDLGLYYCFQGSHVPWTFGGGTKLEIK

SEQ ID NO: 4035 - protein, 112 aa, Artificial Sequence
  Description of Artificial Sequence: Synthetic polypeptide
  Synthetic: 123E9-A1 light chain variable region (VL)
DVLMTQTPLSLPVSLGDQASISCRSSQSIVHSNGNTYLEWYLQKPGQSPKLLIYKVSNRFSGVPDRFSGSGSGTDFTLKISRVEAEDLGFYYCFQGSHVPPTFGGGTKLEIK

SEQ ID NO: 4036 - protein, 107 aa, Artificial Sequence
  Description of Artificial Sequence: Synthetic polypeptide
  Synthetic: 125B11-H3 light chain variable region (VL)
DIVMTQSQKFLSTSVGDRVNITCKASQNVGTAVAWYQQKPGQSPGLLIYSASIRYTGVPDRFTGNGSGTDFTLTISDMQSEDLADYFCQQFRTYPYTFGGGTKLEIK

SEQ ID NO: 4037 - protein, 106 aa, Artificial Sequence
  Description of Artificial Sequence: Synthetic polypeptide
  Synthetic: 126F11-G11 light chain variable region (VL)
DVLMTQTPLSLPVSLGDQASISCRSSQSIVHSNGNTYLEWYLQKPGQSPKLLIYKVSNRFSGVPDRFSGSGSGTDFTLKISRVEAEDLGVYYCFQGSHVPPAFGGG

SEQ ID NO: 4038 - protein, 112 aa, Artificial Sequence
  Description of Artificial Sequence: Synthetic polypeptide
  Synthetic: 12A10-E8 light chain variable region (VL)
DVLMTQTPLSLPVSLGDQASISCRSSQSIVHSNGNTYLEWYLQKPGQSPKLLIYKVFNRFSGVPDRFSGSGSGTDFTLKINRVEAEDLGVYYCLQGSHVPYTFGGGTKLEIK

SEQ ID NO: 4039 - protein, 112 aa, Artificial Sequence
  Description of Artificial Sequence: Synthetic polypeptide
  Synthetic: 14F5-D9 light chain variable region (VL)
DVVMTQTPLSLPVSLGDQASISCRSSQSLVHSNGNTYLHWYLQKPGQSPKLLIYKVFNRFSGVPDRFSGSGSGTDFTLKISRVEAEDLGVYFCSQSTLVPLTFGAGTKLELK

SEQ ID NO: 4040 - protein, 112 aa, Artificial Sequence
  Description of Artificial Sequence: Synthetic polypeptide
  Synthetic: 15C6-A7 light chain variable region (VL)
DVLMTQTPLSLPVSLGDQASISCRSSQNIVHSNGNTYLEWYLQKPGQSPKLLIYKVSNRFSGVPDKFSGSGSGTDFTLKISRVEAEDLGVYFCFQGSHVPPTFGGGTKLEIK

SEQ ID NO: 4041 - protein, 108 aa, Artificial Sequence
  Description of Artificial Sequence: Synthetic polypeptide
  17H3.2_VL
EIVLTQSPGTLSLSPGERATLSCRASQSVSSSYLAWYQQKPGQAPRLLIYGASSRATGIPDRFSGSGSGTDFTLTINRLEPEDFAVYYCQQYGSSPWTFGQGTKVEIK

SEQ ID NO: 4042 - protein, 112 aa, Artificial Sequence
  Description of Artificial Sequence: Synthetic polypeptide
  Synthetic: 19F8-B1  light chain variable region (VL)
DVLMTQTPLSLPVSLGDQASISCRSSQNIVHSNGNTYLEWYLQKPGQSPKLLIYKVSNRFSGVPDRFSGSGSGTDFTLKISRVEAEDLGIYFCFQGSHVPPTFGGGTKLEIK

SEQ ID NO: 4043 - protein, 112 aa, Artificial Sequence
  Description of Artificial Sequence: Synthetic polypeptide
  Synthetic: 19H6-F7 light chain variable region (VL)
DVLMTQTPLSLPVSLGDQASISCRSSQSIVHSNGNTYLEWYLQKPGQSPKLLIYKVSNRFSGVPDRFSGSGSGTDFTLKISRVEAEDLGVYYCFQGSLVPWTFGGGTKLEIK

SEQ ID NO: 4044 - protein, 111 aa, Artificial Sequence
  Description of Artificial Sequence: Synthetic polypeptide
  Synthetic: 22G7-C9 light chain variable region (VL)
DIVLTQSPASLAVSLGQRATISCRASQSVSTSSYSYMHWFQQKPGQPPKLLIKYASNLESGVPARFSGSGSGTDFTLNIHPVEEEDTATYYCQHSWELPWTFGGGTKLEIK

SEQ ID NO: 4045 - protein, 112 aa, Artificial Sequence; identical to SEQ ID NO: 4042
  Description of Artificial Sequence: Synthetic polypeptide
  Synthetic: 24A11-D5 light chain variable region (VL)

SEQ ID NO: 4046 - protein, 112 aa, Artificial Sequence
  Description of Artificial Sequence: Synthetic polypeptide
  Synthetic: 26C1-B11 light chain variable region (VL)
DVVMTQTPLTLSVTIGQPASISCKSSQSLLDSDGKTYLNWLLRRPGQSPKRLIYLVSKLDSGVPDRFTGSGSGTDFTLKISRVEAEDLGVYYCWQGTHFPWTFGGGTKLEIK

SEQ ID NO: 4047 - protein, 112 aa, Artificial Sequence; identical to SEQ ID NO: 4046
  Description of Artificial Sequence: Synthetic polypeptide
  Synthetic: 26C1-C8 light chain variable region (VL)

SEQ ID NO: 4048 - protein, 107 aa, Artificial Sequence
  Description of Artificial Sequence: Synthetic polypeptide
  29H2.10_VL
EIVLTQSPATLSLSPGERATLSCRASQSVSSYLAWYQQKPGQAPRLLIYDASNRATGIPARFSGSGSGTDFTLTISSLEPEDFAVYYCLQRRTWPPTFGQGTKVEIK

SEQ ID NO: 4049 - protein, 112 aa, Artificial Sequence
  Description of Artificial Sequence: Synthetic polypeptide
  Synthetic: 30G1-B2 light chain variable region (VL)
DVVMTQTPLSLPVSLGDQASISCRSSQSLVHANGNTYLHWFLQKPGLSPKLLIYKVSNRFSGVPDRFSGGGSGTDFTLKITRLEAEDLGVYFCSQSTHVPFTFGSGTKLEIK

SEQ ID NO: 4050 - protein, 112 aa, Artificial Sequence
  Description of Artificial Sequence: Synthetic polypeptide
  Synthetic: 37D3-H9 light chain variable region (VL)
DDLLTQTPLSLPVSLGDPASISCRSSQSIVHSNGNTYFEWYLQKPGQSPKLLIYKVSNRFSGVPDRFSGSGSGTDFTLKISRVEAEDLGVYYCFQGSLVPWTFGGGTKLEIK

SEQ ID NO: 4051 - protein, 112 aa, Artificial Sequence
  Description of Artificial Sequence: Synthetic polypeptide
  Synthetic: 37D3-H9b light chain variable region (VL)
EDLLTQTPLSLPVSLGDPASISCRSSQSIVHSNGNTYFEWYLQKPGQSPKLLIYKVSNRFSGVPDRFSGSGSGTDFTLKISRVEAEDLGVYYCFQGSLVPWTFGGGTKLEIK

SEQ ID NO: 4052 - protein, 112 aa, Artificial Sequence
  Description of Artificial Sequence: Synthetic polypeptide
  Synthetic: 3A4-H4 light chain variable region (VL)
DVLMTQTPLSLPVSLGDQASISCRSSQNIVHSNGNTYLEWYLQKPGQSPKLLIYKVSNRFSGVPDRFSGSGSGTDFTLKISRVEAEDLGVYYCFQGTLVPWTFGGGTKLEIK

SEQ ID NO: 4053 - protein, 110 aa, Mus musculus
ENVLTQSPAIMAASLGQKVTMTCSADSSVSSSYLNWYQQKSGASPKPLIHRTSNLASGVPARFSGSGSGTSYSLTISSVEAEDDATYYCQQWSGYPFIFTFGSGTKLEIK

SEQ ID NO: 4054 - protein, 109 aa, Artificial Sequence
  Description of Artificial Sequence: Synthetic polypeptide
  Synthetic: 52F6-F11 light chain variable region (VL)
QAVVTQESALTTSPGETVTLTCRSSTGAVTTSNFANWVQEKPDHLFTGLIGGTNNRAPGVPARFSGSLIGDKAALTITGAQTEDEAIYFCALWYSNLWVFGGGTKLTVL

SEQ ID NO: 4055 - protein, 112 aa, Artificial Sequence
  Description of Artificial Sequence: Synthetic polypeptide
  Synthetic: 54C1-H11 and 61E7-C4 light chain variable region (VL)
DTVMTQSPLSLPVSLGDQASISCRSSQSIVHSNGNTYLEWYLQKPGQSPKLLIYTVSNRFSGVPDRFSGSGSGTDFTLKISRVEAEDLGVYYCFQGSHVPWTFGGGTKLEIK

SEQ ID NO: 4056 - protein, 108 aa, Artificial Sequence
  Description of Artificial Sequence: Synthetic polypeptide
  Synthetic: 55E7-F11 light chain variable region (VL)
ELVLTQSPTTMAASPGKKITITCSASSSISSNYLHWYQQKPGFSPKLLIYRTSNLASGVPARFSGSGSGTSYSLTIGTMEAEDVATYYCQQGSSLPFTFGSGTKLEIK

SEQ ID NO: 4057 - protein, 113 aa, Artificial Sequence
  Description of Artificial Sequence: Synthetic polypeptide
  Synthetic: 66F5-A1 light chain variable region (VL)
DIVMTQSPSSLAMSVGQKVTMSCKSSQSLLNSSTQKNYLAWYQQKPGQSPKLLVYFASTRESGVPDRFIGSGSGTDFTLTISSVQAEDLADYFCQQHYSTPYTFGGGTKLEIK

SEQ ID NO: 4058 - protein, 112 aa, Artificial Sequence
  Description of Artificial Sequence: Synthetic polypeptide
  Synthetic: 73H6-B8 light chain variable region (VL)
DIVMSQSPSSLAVSAGEKVTMSCKSSQSLLNSRTRKNYLAWYQQKPGQSPKLLIYWASTRESGVPDRFTGSGSGTDFTLTISSVQAEDLAVYYCKQSYNLYTFGGGTKLEIK

SEQ ID NO: 4059 - protein, 112 aa, Artificial Sequence
  Description of Artificial Sequence: Synthetic polypeptide
  Synthetic: 7A11-C12 light chain variable region (VL)
DVVMSQTPLSLPVSLGDHASISCRSSQNLVHSDGNTYLHWYLQKPGQSPKLLIYKVSNRFSGVPDRFSGSGSGTDFTLKISRVEAEDLGVYFCSQSTHVIFTFGSGTKLEIK

SEQ ID NO: 4060 - protein, 112 aa, Artificial Sequence
  Description of Artificial Sequence: Synthetic polypeptide
  Synthetic: 89F4-A1 light chain variable region (VL)
NIMMTQSPSSLAVSAGEKVTMSCKSSQSVFYSSEQRNYLAWYQQKPGQSPKLLISWASTRESGVPDRFTGSGSGTDFTLTISSVQGEDLAVYYCHQYLSSFTFGSGTKLEIK

SEQ ID NO: 4061 - protein, 112 aa, Artificial Sequence
  Description of Artificial Sequence: Synthetic polypeptide
  Synthetic: 93A8-D2 light chain variable region (VL)
DVVMTQTPLTLSVTIGQPASISCKSSQSLLDSDGKTYLNWLLQRPGQSPRRLIYLVSKLDSGVPDRFTGSGSGTDFTLKISRVAAEDLGVYYCWQGTHFPRTFGGGTKLEIK

SEQ ID NO: 4062 - protein, 112 aa, Artificial Sequence
  Description of Artificial Sequence: Synthetic polypeptide
  Synthetic: 94B2-C1 light chain variable region (VL)
DVVMTQTPLTLSVTIGQPASISCKSSQSLLDSDGKTYLNWLLQRPGQSPKRLIYLVSKLDSGVPDRFTGSGSGTDFTLKISRVEAEDLGVYYCWQGTHFPWTFGGGTKLEIK

SEQ ID NO: 4063 - DNA, 2067 bp, Artificial Sequence
  Description of Artificial Sequence: Synthetic polynucleotide
aagcttgccgccaccatgggatggagctgtatcatcctcttcttggtagcaacagctacaggtaaggggctcacagtagcaggcttgaggtctggacatatatatgggtgacaatgacatccactttgcctttctctccacaggtgtccactccgatatcgtgatgacccaaactccactctccctgcctgtcacccctggagagcccgcctccatctcttgcagatctagtcagaggcttgtgcacagtcatggaaaaacctatctgcattggtacctgcagaagccaggccagtctccacagctcctgatctacaaagtttccaaccggttttctggggtcccagacaggttcagtggcagtggatcagggacagatttcacactcaagatcagcagagtggaggctgaggatgtgggagtttatttctgttctcaaactgcacattttccctacaccttcggaggggggaccaaggtggaaatcaaacgtgagtagaatttaaactttgcttcctcagttggatccactagtccagtgtggtggaattctaaactctgagggggtcggatgacgtggccattctttgcctaaagcattgagtttactgcaaggtcagaaaagcatgcaaagccctcagaatggctgcaaagagctccaacaaaacaatttagaactttattaaggaatagggggaagctaggaagaaactcaaaacatcaagattttaaatacgcttcttggtctccttgctataattatctgggataagcatgctgttttctgtctgtccctaacatgccctgtgattatccgcaaacaacacacccaagggcagaactttgttacttaaacaccatcctgtttgcttctttcctcaggaactgtggctgcaccatctgtcttcatcttcccgccatctgatgagcagttgaaatctggaactgcctctgttgtgtgcctgctgaataacttctatcccagagaggccaaagtacagtggaaggtggataacgccctccaatcgggtaactcccaggagagtgtcacagagcaggacagcaaggacagcacctacagcctcagcagcaccctgacgctgagcaaagcagactacgagaaacacaaagtctacgcctgcgaagtcacccatcagggcctgagctcgcccgtcacaaagagcttcaacaggggagagtgttagagggagaagtgcccccacctgctcctcagttccagcctgaccccctcccatcctttggcctctgaccctttttccacaggggacctacccctattgcggtcctccagctcatctttcacctcacccccctcctcctccttggctttaattatgctaatgttggaggagaatgaataaataaagtgaatctttgcacctgtggtttctctctttcctcatttaataattattatctgttgttttaccaactactcaatttctcttataagggactaaatatgtagtcatcctaaggcgcataaccatttataaaaatcatccttcattctattttaccctatcatcctctgcaagacagtcctccctcaaacccacaagccttctgtcctcacagtcccctgggccatggtaggagagacttgcttccttgttttcccctcctcagcaagccctcatagtcctttttaagggtgacaggtcttacagtcatatatcctttgattcaattccctgagaatcaaccaaagcaaatttttcaaaagaagaaacctgctataaagagaatcattcattgcaacatgatataaaataacaacacaataaaagcaattaaataaacaaacaatagggaaatgtttaagttcatcatggtacttagacttaatggaatgtcatgccttatttacatttttaaacaggtactgagggactcctgtctgccaagggccgtattgagtactttccacaacctaatttaatccacactatactgtgagattaaaaacattcattaaaatgttgcaaaggttctataaagctgagagacaaatatattctataactcagcaatcccacttctaga

SEQ ID NO: 4064 - protein, 107 aa, Artificial Sequence; identical to SEQ ID NO: 3993
  Description of Artificial Sequence: Synthetic polypeptide
  Synthetic: hu125B11-H3.LC1

SEQ ID NO: 4065 - protein, 107 aa, Artificial Sequence; identical to SEQ ID NO: 3995
  Description of Artificial Sequence: Synthetic polypeptide
  Synthetic: hu125B11-H3.LC2

SEQ ID NO: 4066 - protein, 107 aa, Artificial Sequence
  Description of Artificial Sequence: Synthetic polypeptide
  Synthetic: hu125B11-H3.LC3
DIQMTQSPSSLSASVGDRVTITCKASQNVGTAVAWYQQKPGKSPKLLIYSASIRYTGVPSRFSGSGSGTDFTLTISSLQPEDFATYYCQQFRTYPYTFGQGTKVEIK

SEQ ID NO: 4067 - protein, 107 aa, Artificial Sequence; identical to SEQ ID NO: 3997
  Description of Artificial Sequence: Synthetic polypeptide
  Synthetic: hu125B11-H3.LC4

SEQ ID NO: 4068 - protein, 112 aa, Artificial Sequence
  Description of Artificial Sequence: Synthetic polypeptide
  Synthetic: Hu37D3.v39 light chain variable region (VL)
EDQLTQSPSSLSASVGDRVTITCRSSQSIVHSNGNTYLEWYQQKPGKSPKLLIYKVSNRFSGVPSRFSGSGSGTDFTLTISSLQPEDFATYYCFQGSLVPWTFGQGTKVEIK

SEQ ID NO: 4069 - protein, 112 aa, Artificial Sequence
  Description of Artificial Sequence: Synthetic polypeptide
  Synthetic: Hu37D3.v40 light chain variable region (VL)
EDQLTQSPSSLSASVGDRVTITCRSSQSIVHSNTNTYFEWYQQKPGKSPKLLIYKVSNRFSGVPSRFSGSGSGTDFTLTISSLQPEDFATYYCFQGSLVPWTFGQGTKVEIK

SEQ ID NO: 4070 - protein, 112 aa, Artificial Sequence
  Description of Artificial Sequence: Synthetic polypeptide
  Synthetic: Hu37D3.v41 light chain variable region (VL)
EDQLTQSPSSLSASVGDRVTITCRSSQSIVHSNGQTYFEWYQQKPGKSPKLLIYKVSNRFSGVPSRFSGSGSGTDFTLTISSLQPEDFATYYCFQGSLVPWTFGQGTKVEIK

SEQ ID NO: 4071 - protein, 112 aa, Artificial Sequence
  Description of Artificial Sequence: Synthetic polypeptide
  Synthetic: Hu37D3-H9.v1 light chain variable region (VL)
EDQLTQSPSSLSASVGDRVTITCRSSQSIVHSNGNTYFEWYQQKPGKSPKLLIYKVSNRFSGVPSRFSGSGSGTDFTLTISSLQPEDFATYYCFQGSLVPWTFGQGTKVEIK

SEQ ID NO: 4072 - protein, 112 aa, Artificial Sequence
  Description of Artificial Sequence: Synthetic polypeptide
  Synthetic: Hu37D3-H9.v28.A4 light chain variable region (VL)
DDVLTQTPLSLPVTPGQPASISCRSSQSIVHSNGNTYLEWYLQKPGQSPQLLIYKVSNRFSGVPDRFSGSGSGTDFTLKISRVEAEDVGVYYCFQGSLVPWTFGQGTKVEIK

SEQ ID NO: 4073 - protein, 219 aa, Artificial Sequence
  Description of Artificial Sequence: Synthetic polypeptide
  Synthetic: Hu37D3-H9.v28.A4 IgG4-S228P.YTE light chain
DDVLTQTPLSLPVTPGQPASISCRSSQSIVHSNGNTYLEWYLQKPGQSPQLLIYKVSNRFSGVPDRFSGSGSGTDFTLKISRVEAEDVGVYYCFQGSLVPWTFGQGTKVEIKRTVAAPSVFIFPPSDEQLKSGTASVVCLLNNFYPREAKVQWKVDNALQSGNSQESVTEQDSKDSTYSLSSTLTLSKADYEKHKVYACEVTHQGLSSPVTKSFNRGEC

SEQ ID NO: 4074 - protein, 112 aa, Artificial Sequence
  Description of Artificial Sequence: Synthetic polypeptide
  Synthetic: Hu37D3-H9.v5 light chain variable region (VL)
EDVLTQTPLSLPVTPGQPASISCRSSQSIVHSNGNTYFEWYLQKPGQSPQLLIYKVSNRFSGVPDRFSGSGSGTDFTLKISRVEAEDVGVYYCFQGSLVPWTFGQGTKVEIK

SEQ ID NO: 4075 - protein, 112 aa, Artificial Sequence
  Description of Artificial Sequence: Synthetic polypeptide
  Synthetic: Hu94B2.LC10
DVVMTQTPLSLPVTPGQPASISCKSSQSLLDSDGKTYLNWLLQKPGQSPQLLIYLVSKLDSGVPDRFSGSGSGTDFTLKISRVEAEDVGVYYCWQGTHFPWTFGQGTKVEIK

SEQ ID NO: 4076 - protein, 112 aa, Artificial Sequence
  Description of Artificial Sequence: Synthetic polypeptide
  Synthetic: Hu94B2.LC11
DVVMTQTPLSLPVTPGQPASISCKSSQSLLDSDGKTYLNWYLQKPGQSPQRLIYLVSKLDSGVPDRFSGSGSGTDFTLKISRVEAEDVGVYYCWQGTHFPWTFGQGTKVEIK

SEQ ID NO: 4077 - protein, 112 aa, Artificial Sequence
  Description of Artificial Sequence: Synthetic polypeptide
  Synthetic: Hu94B2.LC12
DVVMTQTPLSLPVTPGQPASISCKSSQSLLDSDGKTYLNWYLQKPGQSPQLLIYLVSKLDSGVPDRFSGSGSGTDFTLKISRVEAEDVGVYYCWQGTHFPWTFGQGTKVEIK

SEQ ID NO: 4078 - protein, 112 aa, Artificial Sequence
  Description of Artificial Sequence: Synthetic polypeptide
  Synthetic: Hu94B2.LC13
DIVMTQTPLSLPVTPGQPASISCKSSQSLLDSDGKTYLNWLLQKPGQSPQRLIYLVSKLDSGVPDRFSGSGSGTDFTLKISRVEAEDVGVYYCWQGTHFPWTFGQGTKVEIK

SEQ ID NO: 4079 - protein, 112 aa, Artificial Sequence
  Description of Artificial Sequence: Synthetic polypeptide
  Synthetic: Hu94B2.LC14
DIVMTQTPLSLPVTPGQPASISCKSSQSLLDSDGKTYLNWLLQKPGQSPQLLIYLVSKLDSGVPDRFSGSGSGTDFTLKISRVEAEDVGVYYCWQGTHFPWTFGQGTKVEIK

SEQ ID NO: 4080 - protein, 112 aa, Artificial Sequence
  Description of Artificial Sequence: Synthetic polypeptide
  Synthetic: Hu94B2.LC15
DIVMTQTPLSLPVTPGQPASISCKSSQSLLDSDGKTYLNWYLQKPGQSPQRLIYLVSKLDSGVPDRFSGSGSGTDFTLKISRVEAEDVGVYYCWQGTHFPWTFGQGTKVEIK

SEQ ID NO: 4081 - protein, 112 aa, Artificial Sequence
  Description of Artificial Sequence: Synthetic polypeptide
  Synthetic: Hu94B2.LC16
DIVMTQTPLSLPVTPGQPASISCKSSQSLLDSDGKTYLNWYLQKPGQSPQLLIYLVSKLDSGVPDRFSGSGSGTDFTLKISRVEAEDVGVYYCWQGTHFPWTFGQGTKVEIK

SEQ ID NO: 4082 - protein, 112 aa, Artificial Sequence
  Description of Artificial Sequence: Synthetic polypeptide
  Synthetic: Hu94B2.LC9
DVVMTQTPLSLPVTPGQPASISCKSSQSLLDSDGKTYLNWLLQKPGQSPQRLIYLVSKLDSGVPDRFSGSGSGTDFTLKISRVEAEDVGVYYCWQGTHFPWTFGQGTKVEIK

SEQ ID NO: 4083 - protein, 112 aa, Artificial Sequence; identical to SEQ ID NO: 4078
  Description of Artificial Sequence: Synthetic polypeptide
  Synthetic: Hu94B2.v105 light chain variable region (VL)

SEQ ID NO: 4084 - protein, 112 aa, Oryctolagus cuniculus; identical to SEQ ID NO: 3845

SEQ ID NO: 4085 - protein, 219 aa, Artificial Sequence
  Description of Artificial Sequence: Synthetic polypeptide
  LC of exemplified tau monoclonal antibody of Example 1
EIVLTQSPGTLSLSPGERATLSCRSSQSLVHSNQNTYLHWYQQKPGQAPRLLIYKVDNRFSGIPDRFSGSGSGTDFTLTISRLEPEDFAVYYCSQSTLVPLTFGGGTKVEIKRTVAAPSVFIFPPSDEQLKSGTASVVCLLNNFYPREAKVQWKVDNALQSGNSQESVTEQDSKDSTYSLSSTLTLSKADYEKHKVYACEVTHQGLSSPVTKSFNRGEC

SEQ ID NO: 4086 - DNA, 657 bp, Artificial Sequence
  Description of Artificial Sequence: Synthetic polynucleotide
  Nucleotide Sequence Encoding the Exemplified LC (SEQ ID NO:1)
gaaattgtgttgacgcagtctccaggcaccctgtctttgtctccaggggaaagagccaccctctcctgcagatctagtcagagccttgtacacagtaatcagaacacctatttacattggtaccagcagaaacctggccaggctcccaggctcctcatctataaagttgacaaccgattttctggcatcccagacaggttcagtggcagtgggtctgggacagacttcactctcaccatcagcagactggagcctgaagattttgcagtgtattactgttctcaaagtacactggttccgctcacgttcggcggagggaccaaggtggagatcaaacggaccgtggctgcaccatctgtcttcatcttcccgccatctgatgagcagttgaaatctggaactgcctctgttgtgtgcctgctgaataacttctatcccagagaggccaaagtacagtggaaggtggataacgccctccaatcgggtaactcccaggagagtgtcacagagcaggacagcaaggacagcacctacagcctcagcagcaccctgacgctgagcaaagcagactacgagaaacacaaagtctacgcctgcgaagtcacccatcagggcctgagctcgcccgtcacaaagagcttcaacaggggagagtgc

SEQ ID NO: 4087 - protein, 107 aa, Homo sapiens; identical to SEQ ID NO: 3252

SEQ ID NO: 4088 - DNA, 2067 bp, Artificial Sequence
  Description of Artificial Sequence: Synthetic polynucleotide
aagcttgccgccaccatgggatggagctgtatcatcctcttcttggtagcaacagctacaggtaaggggctcacagtagcaggcttgaggtctggacatatatatgggtgacaatgacatccactttgcctttctctccacaggtgtccactccgatatcgtgatgacccaaactccactctccctgcctgtcacccctggagagcccgcctccatctcttgcagatctagtcagagccttgtgcacagtcatggaaaaacctatctgcattggtacctgcagaagccaggccagtctccacagctcctgatctacaaagtttccaaccggttttctggggtcccagacaggttcagtggcagtggatcagggacagatttcacactcaagatcagcagagtggaggctgaggatgtgggagtttatttctgttctcaaactgcacattttccctacaccttcggaggggggaccaaggtggaaatcaaacgtgagtagaatttaaactttgcttcctcagttggatccactagtccagtgtggtggaattctaaactctgagggggtcggatgacgtggccattctttgcctaaagcattgagtttactgcaaggtcagaaaagcatgcaaagccctcagaatggctgcaaagagctccaacaaaacaatttagaactttattaaggaatagggggaagctaggaagaaactcaaaacatcaagattttaaatacgcttcttggtctccttgctataattatctgggataagcatgctgttttctgtctgtccctaacatgccctgtgattatccgcaaacaacacacccaagggcagaactttgttacttaaacaccatcctgtttgcttctttcctcaggaactgtggctgcaccatctgtcttcatcttcccgccatctgatgagcagttgaaatctggaactgcctctgttgtgtgcctgctgaataacttctatcccagagaggccaaagtacagtggaaggtggataacgccctccaatcgggtaactcccaggagagtgtcacagagcaggacagcaaggacagcacctacagcctcagcagcaccctgacgctgagcaaagcagactacgagaaacacaaagtctacgcctgcgaagtcacccatcagggcctgagctcgcccgtcacaaagagcttcaacaggggagagtgttagagggagaagtgcccccacctgctcctcagttccagcctgaccccctcccatcctttggcctctgaccctttttccacaggggacctacccctattgcggtcctccagctcatctttcacctcacccccctcctcctccttggctttaattatgctaatgttggaggagaatgaataaataaagtgaatctttgcacctgtggtttctctctttcctcatttaataattattatctgttgttttaccaactactcaatttctcttataagggactaaatatgtagtcatcctaaggcgcataaccatttataaaaatcatccttcattctattttaccctatcatcctctgcaagacagtcctccctcaaacccacaagccttctgtcctcacagtcccctgggccatggtaggagagacttgcttccttgttttcccctcctcagcaagccctcatagtcctttttaagggtgacaggtcttacagtcatatatcctttgattcaattccctgagaatcaaccaaagcaaatttttcaaaagaagaaacctgctataaagagaatcattcattgcaacatgatataaaataacaacacaataaaagcaattaaataaacaaacaatagggaaatgtttaagttcatcatggtacttagacttaatggaatgtcatgccttatttacatttttaaacaggtactgagggactcctgtctgccaagggccgtattgagtactttccacaacctaatttaatccacactatactgtgagattaaaaacattcattaaaatgttgcaaaggttctataaagctgagagacaaatatattctataactcagcaatcccacttctaga

SEQ ID NO: 4089 - protein, 112 aa, Artificial Sequence; identical to SEQ ID NO: 3255
  Description of Artificial Sequence: Synthetic polypeptide

SEQ ID NO: 4090 - protein, 112 aa, Artificial Sequence
  Description of Artificial Sequence: Synthetic polypeptide
  LCVR of exemplified tau monoclonal antibody of Example 1
EIVLTQSPGTLSLSPGERATLSCRSSQSLVHSNQNTYLHWYQQKPGQAPRLLIYKVDNRFSGIPDRFSGSGSGTDFTLTISRLEPEDFAVYYCSQSTLVPLTFGGGTKVEIK

SEQ ID NO: 4091 - protein, 119 aa, Artificial Sequence
  Description of Artificial Sequence: Synthetic polypeptide
  Tau15
QVKLEESGGGLVQPGGSLRLSCAASGFTFSNFAMTWVRQSPGKGLEWVSAIDNDGGRTSYSDSVKGRFTISRDNAKNTLYLQMNSLKPEDTAMYYCAAMNLATRKWELWGQGTQVTVSS

SEQ ID NO: 4092 - protein, 119 aa, Artificial Sequence
  Description of Artificial Sequence: Synthetic polypeptide
  Tau81
QVQLVESGGGLVQPGGSLKLSCAASGFTGDHYAMSWVRQAPGKGLEWVSTIYSYSPNTYYVDSVKDRFTISLDNAKNTLYLQMNSLKPEDTAVYYCAADLEVAEYYAYWGQGTQVTVSS

SEQ ID NO: 4093 - protein, 117 aa, Oryctolagus cuniculus
  MOD_RES (100)..(100): Ala, Gln, Asn, Asp or Ser
QSLEESGGRLVTPGTPLTLTCTVSGIDLSTWRMNWVRQAPGKGLEWIGIIGTGGRTYYANWAKGRFTISKTSTTVDLKVTSPTTEDTATYFCARLGANNXGYPLDLWGPGTLVTVSS

SEQ ID NO: 4094 - protein, 118 aa, Artificial Sequence
  Description of Artificial Sequence: Synthetic polypeptide
  murinised
QVQLKESGPGLVAPSQSLSITCTVSGIDLSTWRMNWVRQPPGKGLEWIGIIGTGGRTYYANWAKGRFSISKDSTQVFLKMNSLQTEDTATYFCARLGANNNGYPLDLWGAGTTVTVSS

SEQ ID NO: 4095 - protein, 120 aa, Artificial Sequence
  Description of Artificial Sequence: Synthetic polypeptide
  humanized
ELQLQESGPGLVKPSETLSLTCTVSGIDLSTWRMNWIRQPPGKGLEWIGIIGTGGRTYYANWAKGRVTISKDTSKNQVSLKLSSVTAADTAVYYCARLGANNQGYPLDLWGQGTLVTVSS

SEQ ID NO: 4096 - protein, 120 aa, Artificial Sequence
  Description of Artificial Sequence: Synthetic polypeptide
  humanized
ELQLQESGPGLVKPSETLSLTCTVSGIDLSTWRMNWIRQPPGKGLEWIGIIGTGGRTYYANWAKGRVTISKDTSKNQVSLKLSSVTAADTAVYYCARLGANNAGYPLDLWGQGTLVTVSS

SEQ ID NO: 4097 - protein, 120 aa, Artificial Sequence
  Description of Artificial Sequence: Synthetic polypeptide
  humanized
  MOD_RES (103)..(103): Ala, Gln, Asn, Asp or Ser
ELQLQESGPGLVKPSETLSLTCTVSGIDLSTWRMNWIRQPPGKGLEWIGIIGTGGRTYYANWAKGRVTISKDTSKNQVSLKLSSVTAADTAVYYCARLGANNXGYPLDLWGQGTLVTVSS

SEQ ID NO: 4098 - protein, 447 aa, Artificial Sequence
  Description of Artificial Sequence: Synthetic polypeptide
  humanized
ELQLQESGPGLVKPSETLSLTCTVSGIDLSTWRMNWIRQPPGKGLEWIGIIGTGGRTYYANWAKGRVTISKDTSKNQVSLKLSSVTAADTAVYYCARLGANNQGYPLDLWGQGTLVTVSSASTKGPSVFPLAPCSRSTSESTAALGCLVKDYFPEPVTVSWNSGALTSGVHTFPAVLQSSGLYSLSSVVTVPSSSLGTKTYTCNVDHKPSNTKVDKRVESKYGPPCPPCPAPEFLGGPSVFLFPPKPKDTLMISRTPEVTCVVVDVSQEDPEVQFNWYVDGVEVHNAKTKPREEQFNSTYRVVSVLTVLHQDWLNGKEYKCKVSNKGLPSSIEKTISKAKGQPREPQVYTLPPSQEEMTKNQVSLTCLVKGFYPSDIAVEWESNGQPENNYKTTPPVLDSDGSFFLYSRLTVDKSRWQEGNVFSCSVMHEALHNHYTQKSLSLSLGK

SEQ ID NO: 4099 - protein, 447 aa, Artificial Sequence
  Description of Artificial Sequence: Synthetic polypeptide
  humanized
ELQLQESGPGLVKPSETLSLTCTVSGIDLSTWRMNWIRQPPGKGLEWIGIIGTGGRTYYANWAKGRVTISKDTSKNQVSLKLSSVTAADTAVYYCARLGANNAGYPLDLWGQGTLVTVSSASTKGPSVFPLAPCSRSTSESTAALGCLVKDYFPEPVTVSWNSGALTSGVHTFPAVLQSSGLYSLSSVVTVPSSSLGTKTYTCNVDHKPSNTKVDKRVESKYGPPCPPCPAPEFLGGPSVFLFPPKPKDTLMISRTPEVTCVVVDVSQEDPEVQFNWYVDGVEVHNAKTKPREEQFNSTYRVVSVLTVLHQDWLNGKEYKCKVSNKGLPSSIEKTISKAKGQPREPQVYTLPPSQEEMTKNQVSLTCLVKGFYPSDIAVEWESNGQPENNYKTTPPVLDSDGSFFLYSRLTVDKSRWQEGNVFSCSVMHEALHNHYTQKSLSLSLGK

SEQ ID NO: 4100 - protein, 447 aa, Artificial Sequence
  Description of Artificial Sequence: Synthetic polypeptide
  humanized
  MOD_RES (103)..(103): Ala, Gln, Asn, Asp or Ser
ELQLQESGPGLVKPSETLSLTCTVSGIDLSTWRMNWIRQPPGKGLEWIGIIGTGGRTYYANWAKGRVTISKDTSKNQVSLKLSSVTAADTAVYYCARLGANNXGYPLDLWGQGTLVTVSSASTKGPSVFPLAPCSRSTSESTAALGCLVKDYFPEPVTVSWNSGALTSGVHTFPAVLQSSGLYSLSSVVTVPSSSLGTKTYTCNVDHKPSNTKVDKRVESKYGPPCPPCPAPEFLGGPSVFLFPPKPKDTLMISRTPEVTCVVVDVSQEDPEVQFNWYVDGVEVHNAKTKPREEQFNSTYRVVSVLTVLHQDWLNGKEYKCKVSNKGLPSSIEKTISKAKGQPREPQVYTLPPSQEEMTKNQVSLTCLVKGFYPSDIAVEWESNGQPENNYKTTPPVLDSDGSFFLYSRLTVDKSRWQEGNVFSCSVMHEALHNHYTQKSLSLSLGK

SEQ ID NO: 4101 - protein, 448 aa, Artificial Sequence
  Description of Artificial Sequence: Synthetic polypeptide
  humanized
ELQLQESGPGLVKPSETLSLTCTVSGIDLSTWRMNWIRQPPGKGLEWIGIIGTGGRTYYANWAKGRVTISKDTSKNQVSLKLSSVTAADTAVYYCARLGANNQGYPLDLWGQGTLVTVSSASTKGPSVFPLAPSSKSTSGGTAALGCLVKDYFPEPVTVSWNSGALTSGVHTFPAVLQSSGLYSLSSVVTVPSSSLGTQTYICNVNHKPSNTKVDKKVEPKSCDKTHTCPPCPAPELLGGPSVFLFPPKPKDTLMISRTPEVTCVVVDVSHEDPEVKFNWYVDGVEVHNAKTKPREEQYNSTYRVVSVLTVLHQDWLNGKEYKCKVSNKALPAPIEKTISKAKGQPREPQVYTLPPSRDELTKNQVSLTCLVKGFYPSDIAVEWESNGQPENNYKTTPPVLDSDGSFFLYSKLTVDKSRWQQGNVFSCSVMHEALHNHYTQKSLSLSP

SEQ ID NO: 4102 - protein, 448 aa, Artificial Sequence
  Description of Artificial Sequence: Synthetic polypeptide
  humanized
ELQLQESGPGLVKPSETLSLTCTVSGIDLSTWRMNWIRQPPGKGLEWIGIIGTGGRTYYANWAKGRVTISKDTSKNQVSLKLSSVTAADTAVYYCARLGANNAGYPLDLWGQGTLVTVSSASTKGPSVFPLAPSSKSTSGGTAALGCLVKDYFPEPVTVSWNSGALTSGVHTFPAVLQSSGLYSLSSVVTVPSSSLGTQTYICNVNHKPSNTKVDKKVEPKSCDKTHTCPPCPAPELLGGPSVFLFPPKPKDTLMISRTPEVTCVVVDVSHEDPEVKFNWYVDGVEVHNAKTKPREEQYNSTYRVVSVLTVLHQDWLNGKEYKCKVSNKALPAPIEKTISKAKGQPREPQVYTLPPSRDELTKNQVSLTCLVKGFYPSDIAVEWESNGQPENNYKTTPPVLDSDGSFFLYSKLTVDKSRWQQGNVFSCSVMHEALHNHYTQKSLSLSP

SEQ ID NO: 4103 - protein, 450 aa, Artificial Sequence
  Description of Artificial Sequence: Synthetic polypeptide
  humanized
  MOD_RES (103)..(103): Ala, Gln, Asn, Asp or Ser
ELQLQESGPGLVKPSETLSLTCTVSGIDLSTWRMNWIRQPPGKGLEWIGIIGTGGRTYYANWAKGRVTISKDTSKNQVSLKLSSVTAADTAVYYCARLGANNXGYPLDLWGQGTLVTVSSASTKGPSVFPLAPSSKSTSGGTAALGCLVKDYFPEPVTVSWNSGALTSGVHTFPAVLQSSGLYSLSSVVTVPSSSLGTQTYICNVNHKPSNTKVDKKVEPKSCDKTHTCPPCPAPELLGGPSVFLFPPKPKDTLMISRTPEVTCVVVDVSHEDPEVKFNWYVDGVEVHNAKTKPREEQYNSTYRVVSVLTVLHQDWLNGKEYKCKVSNKALPAPIEKTISKAKGQPREPQVYTLPPSRDELTKNQVSLTCLVKGFYPSDIAVEWESNGQPENNYKTTPPVLDSDGSFFLYSKLTVDKSRWQQGNVFSCSVMHEALHNHYTQKSLSLSPGK

SEQ ID NO: 4104 - DNA, 351 bp, Oryctolagus cuniculus
cagtcgctggaggagtccgggggtcgcctggtcacgcctgggacacccctgacactcacctgcacagtctctggaatcgacctcagtacttggagaatgaactgggtccgccaggctccagggaaggggctggaatggatcggaatcattggtactggtggtagaacatactacgcgaactgggcaaaaggccgattcaccatctccaaaacctcgaccacggtggatctgaaggtcaccagtccgacaaccgaggacacggccacctatttctgtgccagattgggtgctaataataatggttatcctttggacttgtggggcccggggaccctggtcaccgtctcgagt

SEQ ID NO: 4105 - protein, 439 aa, Artificial Sequence
  Description of Artificial Sequence: Synthetic polypeptide
  C10.2 Heavy Chain
QVQLQQSDAELVKPGASVKISCKASGYTFTDRTIHWVKQRPEQGLEWIGYIYPGDGSTKYNENFKGKATLTADKSSSTAYMQLNSLTSEDSAVYFCARRGAMDYWGQGTSVTVSSAKTTPPSVYPLAPGSAAQTNSMVTLGCLVKGYFPEPVTVTWNSGSLSSGVHTFPAVLQSDLYTLSSSVTVPSSTWPSETVTCNVAHPASSTKVDKKIVPRDCGCKPCICTVPEVSSVFIFPPKPKDVLTITLTPKVTCVVVDISKDDPEVQFSWFVDDVEVHTAQTQPREEQFNSTFRSVSELPIMHQDWLNGKEFKCRVNSAAFPAPIEKTISKTKGRPKAPQVYTIPPPKEQMAKDKVSLTCMITDFFPEDITVEWQWNGQPAENYKNTQPIMDTDGSYFVYSKLNVQKSNWEAGNTFTCSVLHEGLHNHHTEKSLSHSPGK

SEQ ID NO: 4106 - protein, 124 aa, Mus sp.
EVKVEESGGGLVQPGGSMKLSCVVSGFTFSNYWVNWVRQSPEKGLEWVAQIRLKSDNYATHYEESVKGRFTISRDDSKSSVYLQMNNLRAEDSGIYYCTNWEDYWGQGTTLTVSSASTKGPSVF

SEQ ID NO: 4107 - protein, 439 aa, Artificial Sequence
  Description of Artificial Sequence: Synthetic polypeptide
  C5.2 Heavy Chain
QVQLQQSDAELVKPGASVKISCKASGYTFTDRTIHWVKQRPEQGLEWIGYIYPGDDSTKYNDMFKAKATLTADKSSNTAYMQLNSLTSDDSAVYFCARRGTMDYWGQGTSVTVSSAKTTPPSVYPLAPGSAAQTNSMVTLGCLVKGYFPEPVTVTWNSGSLSSGVHTFPAVLQSDLYTLSSSVTVPSSTWPSETVTCNVAHPASSTKVDKKIVPRDCGCKPCICTVPEVSSVFIFPPKPKDVLTITLTPKVTCVVVDISKDDPEVQFSWFVDDVEVHTAQTQPREEQFNSTFRSVSELPIMHQDWLNGKEFKCRVNSAAFPAPIEKTISKTKGRPKAPQVYTIPPPKEQMAKDKVSLTCMITDFFPEDITVEWQWNGQPAENYKNTQPIMDTDGSYFVYSKLNVQKSNWEAGNTFTCSVLHEGLHNHHTEKSLSHSPGK

SEQ ID NO: 4108 - protein, 439 aa, Artificial Sequence
  Description of Artificial Sequence: Synthetic polypeptide
  C8.3 Heavy Chain
QVQLQQSDAELVNPGASVKISCKASGYTFTDRTIHWVKQRPEQGLEWIGYIYPGDGSTKYNENFKGKATLTADKSSSTAYMQLNSLASEDSAVYFCARRGAMDYWGQGTSVTVSSAKTTPPSVYPLAPGSAAQTNSMVTLGCLVKGYFPEPVTVTWNSGSLSSGVHTFPAVLQSDLYTLSSSVTVPSSTWPSETVTCNVAHPASSTKVDKKIVPRDCGCKPCICTVPEVSSVFIFPPKPKDVLTITLTPKVTCVVVDISKDDPEVQFSWFVDDVEVHTAQTQPREEQFNSTFRSVSELPIMHQDWLNGKEFKCRVNSAAFPAPIEKTISKTKGRPKAPQVYTIPPPKEQMAKDKVSLTCMITDFFPEDITVEWQWNGQPAENYKNTQPIMDTDGSYFVYSKLNVQKSNWEAGNTFTCSVLHEGLHNHHTEKSLSHSPGK

SEQ ID NO: 4109 - protein, 451 aa, Artificial Sequence
  Description of Artificial Sequence: Synthetic polypeptide
  D1.2 Heavy Chain
QVQLQQSGAELVRPGASVTLSCKASGNTFTDYEIHWVKQTPVHGLEWIGAIDPETGNTAYNQKFKGKARLTADKSSSTAYMELRSLTSEDSAVYYCTRSRGFDYWGQGTTLTVSSAKTTPPSVYPLAPGCGDTTGSSVTLGCLVKGYFPESVTVTWNSGSLSSSVHTFPALLQSGLYTMSSSVTVPSSTWPSQTVTCSVAHPASSTTVDKKLEPSGPISTINPCPPCKECHKCPAPNLEGGPSVFIFPPNIKDVLMISLTPKVTCVVVDVSEDDPDVRISWFVNNVEVHTAQTQTHREDYNSTIRVVSALPIQHQDWMSGKEFKCKVNNKDLPSPIERTISKIKGLVRAPQVYILPPPAEQLSRKDVSLTCLVVGFNPGDISVEWTSNGHTEENYKDTAPVLDSDGSYFIYSKLDIKTSKWEKTDSFSCNVRHEGLKNYYLKKTISRSPGK

SEQ ID NO: 4110 - protein, 444 aa, Artificial Sequence
  Description of Artificial Sequence: Synthetic polypeptide
  hC10.2 Heavy Chain
QVQLVQSGAEVVKPGASVKISCKASGYTFTDRTIHWVRQAPGQGLEWIGYIYPGDGSTKYSQKFQGRATLTADTSASTAYMELSSLRSEDTAVYYCARRGAMDYWGQGTSVTVSSASTKGPSVFPLAPSSKSTSGGTAALGCLVKDYFPEPVTVSWNSGALTSGVHTFPAVLQSSGLYSLSSVVTVPSSSLGTQTYICNVNHKPSNTKVDKRVEPKSCDKTHTCPPCPAPELLGGPSVFLFPPKPKDTLMISRTPEVTCVVVDVSHEDPEVKFNWYVDGVEVHNAKTKPREEQYNSTYRVVSVLTVLHQDWLNGKEYKCKVSNKALPAPIEKTISKAKGQPREPQVYTLPPSREEMTKNQVSLTCLVKGFYPSDIAVEWESNGQPENNYKTTPPVLDSDGSFFLYSKLTVDKSRWQQGNVFSCSVMHEALHNHYTQKSLSLSPG

SEQ ID NO: 4111 - DNA, 354 bp, Rattus norvegicus
gaggtgaagctggaggagtctggacctggcttgatgcagccctcagagaccctgtccctcacctgcactgtctctggcttctcactaaccagcaatgatatagcctgggttcgacaacctctaggaaagggtttggtgtggatgggaacaatatggactgatggaagtacaaattataattcagctgtccaatcccgactgagcatcagcagggacacctccaagagccaatttttcttaaaaatgaacagtctgcaacctgaagacacaggcacttactactgtgccagacatcgcctatactacggggcctttgattactggggccaaggaaccatggtcaccgtctcgagt

SEQ ID NO: 4112 - protein, 117 aa, Rattus norvegicus
EVKLEESGPGLMQPSETLSLTCTVSGFSLTSNDIAWVRQPLGKGLVWMGTIWTDGSTNYNSAVQSRLSISRDTSKSQFFLKMNSLQPEDTGTYYCARHRLYYGAFDYWGQGTMVTVS

SEQ ID NO: 4113 - protein, 118 aa, Artificial Sequence
  Description of Artificial Sequence: Synthetic polypeptide
  humanized
  MOD_RES (48)..(48): Ile or Met
  MOD_RES (61)..(61): Ser, Ala or Thr
ZVQLQESGPGLVKPSETLSLTCTVSGFSLTSNDIAWIRQPPGKGLEWXGTIWTDGSTNYNXAVQSRVTISVDTSKNQFSLKLSSVTAADTAVYYCARHRLYYGAFDYWGQGTMVTVSS

SEQ ID NO: 4114 - protein, 118 aa, Artificial Sequence
  Description of Artificial Sequence: Synthetic polypeptide
  humanized
EVQLQESGPGLVKPSETLSLTCTVSGFSLTSNDIAWIRQPPGKGLEWMGTIWTDGSTNYNSAVQSRVTISVDTSKNQFSLKLSSVTAADTAVYYCARHRLYYGAFDYWGQGTMVTVSS

SEQ ID NO: 4115 - protein, 118 aa, Artificial Sequence
  Description of Artificial Sequence: Synthetic polypeptide
  humanized
EVQLQESGPGLVKPSETLSLTCTVSGFSLTSNDIAWIRQPPGKGLEWMGTIWTDGSTNYNAAVQSRVTISVDTSKNQFSLKLSSVTAADTAVYYCARHRLYYGAFDYWGQGTMVTVSS

SEQ ID NO: 4116 - protein, 118 aa, Artificial Sequence
  Description of Artificial Sequence: Synthetic polypeptide
  humanized
EVQLQESGPGLVKPSETLSLTCTVSGFSLTSNDIAWIRQPPGKGLEWMGTIWTDGSTNYNTAVQSRVTISVDTSKNQFSLKLSSVTAADTAVYYCARHRLYYGAFDYWGQGTMVTVSS

SEQ ID NO: 4117 - DNA, 354 bp, Artificial Sequence
  Description of Artificial Sequence: Synthetic polynucleotide
  humanized
gaggtgcagctgcaggaatccggtcccggcctcgtgaagccttcagaaaccctgtcgctcacatgcactgtgtccgggttctccctgacctctaacgacatcgcctggattcggcagccgccaggaaagggactggagtggatgggcaccatttggaccgacgggtcaaccaactacaatgccgcggtgcaatccagagtgaccatcagcgtggacacgtccaagaaccagttctcgctgaaattgagctccgtgactgccgctgatactgccgtgtattactgtgcccggcaccgcctttactacggcgcatttgactactggggacagggaaccatggtcactgtctcgagt

SEQ ID NO: 4118 - DNA, 354 bp, Artificial Sequence
  Description of Artificial Sequence: Synthetic polynucleotide
  humanized
gaggtgcaactgcaggaatccggtcccggcctcgtgaagccttcagaaaccctgtcgctcacatgcactgtgtccgggttctccctgacctctaacgacatcgcctggattcggcagccgccaggaaagggactggagtggatgggcaccatttggaccgacgggtcaaccaactacaataccgcggtgcaatccagagtgaccatcagcgtggacacgtccaagaaccagttctcgctgaaattgagctccgtgactgccgctgatactgccgtgtattactgtgcccggcaccgcctttactacggcgcatttgactactggggacagggaaccatggtcactgtctcgagt

SEQ ID NO: 4119 - protein, 448 aa, Artificial Sequence
  Description of Artificial Sequence: Synthetic polypeptide
  humanized
EVQLQESGPGLVKPSETLSLTCTVSGFSLTSNDIAWIRQPPGKGLEWMGTIWTDGSTNYNAAVQSRVTISVDTSKNQFSLKLSSVTAADTAVYYCARHRLYYGAFDYWGQGTMVTVSSASTKGPSVFPLAPSSKSTSGGTAALGCLVKDYFPEPVTVSWNSGALTSGVHTFPAVLQSSGLYSLSSVVTVPSSSLGTQTYICNVNHKPSNTKVDKKVEPKSCDKTHTCPPCPAPELLGGPSVFLFPPKPKDTLMISRTPEVTCVVVDVSHEDPEVKFNWYVDGVEVHNAKTKPREEQYNSTYRVVSVLTVLHQDWLNGKEYKCKVSNKALPAPIEKTISKAKGQPREPQVYTLPPSRDELTKNQVSLTCLVKGFYPSDIAVEWESNGQPENNYKTTPPVLDSDGSFFLYSKLTVDKSRWQQGNVFSCSVMHEALHNHYTQKSLSLSPGK

SEQ ID NO: 4120 - protein, 448 aa, Artificial Sequence
  Description of Artificial Sequence: Synthetic polypeptide
  humanized
EVQLQESGPGLVKPSETLSLTCTVSGFSLTSNDIAWIRQPPGKGLEWMGTIWTDGSTNYNTAVQSRVTISVDTSKNQFSLKLSSVTAADTAVYYCARHRLYYGAFDYWGQGTMVTVSSASTKGPSVFPLAPSSKSTSGGTAALGCLVKDYFPEPVTVSWNSGALTSGVHTFPAVLQSSGLYSLSSVVTVPSSSLGTQTYICNVNHKPSNTKVDKKVEPKSCDKTHTCPPCPAPELLGGPSVFLFPPKPKDTLMISRTPEVTCVVVDVSHEDPEVKFNWYVDGVEVHNAKTKPREEQYNSTYRVVSVLTVLHQDWLNGKEYKCKVSNKALPAPIEKTISKAKGQPREPQVYTLPPSRDELTKNQVSLTCLVKGFYPSDIAVEWESNGQPENNYKTTPPVLDSDGSFFLYSKLTVDKSRWQQGNVFSCSVMHEALHNHYTQKSLSLSPGK

SEQ ID NO: 4121 - protein, 445 aa, Artificial Sequence
  Description of Artificial Sequence: Synthetic polypeptide
  humanized
  MOD_RES (48)..(48): Ile or Met
  MOD_RES (61)..(61): Ser, Ala or Thr
ZVQLQESGPGLVKPSETLSLTCTVSGFSLTSNDIAWIRQPPGKGLEWXGTIWTDGSTNYNXAVQSRVTISVDTSKNQFSLKLSSVTAADTAVYYCARHRLYYGAFDYWGQGTMVTVSSASTKGPSVFPLAPCSRSTSESTAALGCLVKDYFPEPVTVSWNSGALTSGVHTFPAVLQSSGLYSLSSVVTVPSSSLGTKTYTCNVDHKPSNTKVDKRVESKYGPPCPPCPAPEFLGGPSVFLFPPKPKDTLMISRTPEVTCVVVDVSQEDPEVQFNWYVDGVEVHNAKTKPREEQFNSTYRVVSVLTVLHQDWLNGKEYKCKVSNKGLPSSIEKTISKAKGQPREPQVYTLPPSQEEMTKNQVSLTCLVKGFYPSDIAVEWESNGQPENNYKTTPPVLDSDGSFFLYSRLTVDKSRWQEGNVFSCSVMHEALHNHYTQKSLSLSLGK

SEQ ID NO: 4122 - protein, 445 aa, Artificial Sequence
  Description of Artificial Sequence: Synthetic polypeptide
  humanized
EVQLQESGPGLVKPSETLSLTCTVSGFSLTSNDIAWIRQPPGKGLEWMGTIWTDGSTNYNSAVQSRVTISVDTSKNQFSLKLSSVTAADTAVYYCARHRLYYGAFDYWGQGTMVTVSSASTKGPSVFPLAPCSRSTSESTAALGCLVKDYFPEPVTVSWNSGALTSGVHTFPAVLQSSGLYSLSSVVTVPSSSLGTKTYTCNVDHKPSNTKVDKRVESKYGPPCPPCPAPEFLGGPSVFLFPPKPKDTLMISRTPEVTCVVVDVSQEDPEVQFNWYVDGVEVHNAKTKPREEQFNSTYRVVSVLTVLHQDWLNGKEYKCKVSNKGLPSSIEKTISKAKGQPREPQVYTLPPSQEEMTKNQVSLTCLVKGFYPSDIAVEWESNGQPENNYKTTPPVLDSDGSFFLYSRLTVDKSRWQEGNVFSCSVMHEALHNHYTQKSLSLSLGK

SEQ ID NO: 4123 - protein, 445 aa, Artificial Sequence
  Description of Artificial Sequence: Synthetic polypeptide
  humanized
EVQLQESGPGLVKPSETLSLTCTVSGFSLTSNDIAWIRQPPGKGLEWMGTIWTDGSTNYNAAVQSRVTISVDTSKNQFSLKLSSVTAADTAVYYCARHRLYYGAFDYWGQGTMVTVSSASTKGPSVFPLAPCSRSTSESTAALGCLVKDYFPEPVTVSWNSGALTSGVHTFPAVLQSSGLYSLSSVVTVPSSSLGTKTYTCNVDHKPSNTKVDKRVESKYGPPCPPCPAPEFLGGPSVFLFPPKPKDTLMISRTPEVTCVVVDVSQEDPEVQFNWYVDGVEVHNAKTKPREEQFNSTYRVVSVLTVLHQDWLNGKEYKCKVSNKGLPSSIEKTISKAKGQPREPQVYTLPPSQEEMTKNQVSLTCLVKGFYPSDIAVEWESNGQPENNYKTTPPVLDSDGSFFLYSRLTVDKSRWQEGNVFSCSVMHEALHNHYTQKSLSLSLGK

SEQ ID NO: 4124 - protein, 445 aa, Artificial Sequence
  Description of Artificial Sequence: Synthetic polypeptide
  humanized
EVQLQESGPGLVKPSETLSLTCTVSGFSLTSNDIAWIRQPPGKGLEWMGTIWTDGSTNYNTAVQSRVTISVDTSKNQFSLKLSSVTAADTAVYYCARHRLYYGAFDYWGQGTMVTVSSASTKGPSVFPLAPCSRSTSESTAALGCLVKDYFPEPVTVSWNSGALTSGVHTFPAVLQSSGLYSLSSVVTVPSSSLGTKTYTCNVDHKPSNTKVDKRVESKYGPPCPPCPAPEFLGGPSVFLFPPKPKDTLMISRTPEVTCVVVDVSQEDPEVQFNWYVDGVEVHNAKTKPREEQFNSTYRVVSVLTVLHQDWLNGKEYKCKVSNKGLPSSIEKTISKAKGQPREPQVYTLPPSQEEMTKNQVSLTCLVKGFYPSDIAVEWESNGQPENNYKTTPPVLDSDGSFFLYSRLTVDKSRWQEGNVFSCSVMHEALHNHYTQKSLSLSLGK

SEQ ID NO: 4125 - protein, 124 aa, Artificial Sequence
  Description of Artificial Sequence: Synthetic polypeptide
EVKVVESGGGLVQPGGSMKLSCVVSGFTFSNYWVNWVRQAPGKGLEWVAQIRLKSDNYATHYEESVKGRFTISRDDSKSSVYLQMNNLRAEDSGIYYCTNWEDYWGQGTTVTVSSASTKGPSVF

SEQ ID NO: 4126 - protein, 124 aa, Artificial Sequence
  Description of Artificial Sequence: Synthetic polypeptide
EVKVVESGGGLVQPGGSLKLSCVVSGFTFSNYWVNWVRQAPGKGLEWVAQIRLKSDNYATHYEESVKGRFTISRDDSKSSVYLQMNSLRAEDTGIYYCTNWEDYWGQGTTVTVSSASTKGPSVF

SEQ ID NO: 4127 - protein, 124 aa, Artificial Sequence
  Description of Artificial Sequence: Synthetic polypeptide
EVQVVESGGGLVQPGGSLKLSCVVSGFTFSNYWVNWVRQAPGKGLEWVAQIRLKSDNYATHYEESVKGRFTISRDDSKNSVYLQMNSLRAEDTAIYYCTNWEDYWGQGTTVTVSSASTKGPSVF

SEQ ID NO: 4128 - protein, 124 aa, Artificial Sequence
  Description of Artificial Sequence: Synthetic polypeptide
EVQLVESGGGLVQPGGSLKLSCVVSGFTFSNYWVNWVRQAPGKGLEWVAQIRLKSDNYATHYEESVKGRFTISRDDSKNSLYLQMNSLRAEDTAIYYCTNWEDYWGQGTTVTVSSASTKGPSVF

SEQ ID NO: 4129 - protein, 119 aa, Mus musculus
EVKLVESGGDLVTPGGSLKVSCAASGLTFSDSAMSWVRLTPEKRLEWVASISTGGATYYPDGLKGRFTISRDDARNILFLQMNSLRSEDTAMYYCTRRGVSSGNLFTYWGQGTLVTVSA

SEQ ID NO: 4130 - protein, 120 aa, Mus musculus
EVKLVESGGGLMKPGGSLKLSCAASGFTFSSYAMSWVRQSPEKRLEWVASISSGGQTYSPDSVKGRFTISRDNARNILYLQMRNLRSEDTAMYYCASRGDPTMTATLFVYWGQGTLVTVS

SEQ ID NO: 4131 - protein, 112 aa, Mus musculus
VQLQQSGAELVQPGASVKLSCTASGFNIKDTSMHWVRQRPEQGLEWIGRIAPANGNTKYDPKFQGKATITTDTSSNTAYLQLSSLTSEDTAVYYCSGSGNYDWGQGTTLTVS

SEQ ID NO: 4132 - protein, 121 aa, Mus musculus
EVKLVESGGGLVKPGGSLTLSCAASGFTFSSYAMSWVRQTPEKSLEWVASISSGGNTFYPDTVKGRFTISRDNARNILYLQMSGLRSEDTAIYYCARRGDPNMITTLFGYWGQGTLVTISA

SEQ ID NO: 4133 - DNA, 351 bp, Artificial Sequence
  Description of Artificial Sequence: Synthetic polynucleotide
gaggtgcagttggtggagtctggggaagacttagtgaagcctggagggtccctgaaactctcctgtgtcgcttctggattcgctttcagtagctatggcatgtcttgggttcgccagactccagacatgaggctggagtgggtcgcaacaattagtagcagtggtagtcgcacctactttccagacagtgtgaaggggcgactcaccatctccagagacaatgacaagaacatcctatacctacaaatgagcagtctgaggtctgaggacacagccatgtactattgtacgattacctgggacggtgctatggactactggggtcgtggaatatcagtcaccgtctcctca

SEQ ID NO: 4134 - DNA, 351 bp, Artificial Sequence
  Description of Artificial Sequence: Synthetic polynucleotide
gaggttcatctggtggagtctgggggagccttagtgaagcctggagggtccctgaaactctcctgtgcagcctctggattcagtttcagtaaatatggcatgtcttgggttcgccagactccagacaagaggctggagtgggtcgcaaccattagtagtagtgggagtcgcacctactatccagacagtgtgaagggccaattcaccatctccagagacaatgccaagaacaccctgtacctgcaaatgagcagtctgaagtctgaggacacagccatgtattactgttcaattagctgggacggtgctatggactactggggtcaagggacctcagtcaccgtctcctca

SEQ ID NO: 4135 - DNA, 357 bp, Mus musculus
caggttactctgaaagagtctggccctgggatattgcagtcctcccagaccctcagtctgacttgttctttctctgggttttcactgagcacttctggtatgggtgtgagctggattcgtcagccttcaggaaagggtctggagtggctggcacacatttactgggatgatgacaagcgctataacgcatccctgaagagccggctcacaatctccaaggatacctccagaaaccaggtattcctcaagatcacctgtgtggacactgcagatactgccacatactactgtgctcggttactgcgtccttatgctttggactactggggtcaaggaacctcagtcaccgtctcctca

SEQ ID NO: 4136 - DNA, 345 bp, Mus musculus
gaggtccagctgcaacaatctggacctgagctggtgaagcctggggcttcagtgaagatatcctgtaaggcttctggatacacgttcactgactactacatgaactgggtgaagcagagccatggaaagagccttgagtggattggagatattaatcctaacaatggtggtactagctacaaccagaagttcaagggcaaggccacattgactgtagacaagtcctccagcacagcctacatggagctccgcagtctgacatctgaggactctgcagtctattattgtgtaagagaggggcggtttgcttactggggtcatgggactctggtcactgtctctgca

SEQ ID NO: 4137 - DNA, 345 bp, Mus musculus
caggtccagctgaagcagtctggggctgagctggtgaggcctggggcttcagtgaaactgtcctgcaaggcttctggctacactttcactgactactatataaactgggtgaagcagaggcctggacagggacttgagtggattgcaaggatttatcctggaagaggtaatatttactacaatgagaagttcaagggcaaggccacactgactgcagaaaaatcctccagcactgcctacatgcagctcagcagcctgacatctgaggactctgctgtctatttctgtgcaagattctgggacgtgacttactggggccaagggactctggtcactgtctctgca

SEQ ID NO: 4138 - DNA, 345 bp, Mus musculus
gaggtccagctgcaacaatctggacctgagctggtgaagcctggggcttcagtgaagatatcctgtaaggcttctggattcacgttcactgactactacatgaactgggtgaagcagagccatggaaagagccttgagtggattggagatattaatcctaacaatggtggtactagctaccaccagaagttcaagggcaaggccacattgactgtagacaagtcctccagcacagcctacatggagctccgcagcctgacatctgaggactctgcagtctattactgtgtaagagagggaagatttgcttactggggccaagggactctggtcactgtctctgca

SEQ ID NO: 4139 - DNA, 351 bp, Mus musculus
caggtccaactgcagcagcctggggctgagcttctgaagcctggggcttcagtgaaactgtcctgcaaggcttctggctacaccttcaccagctactggatgcactgggtgaagcagaggcctggacgaggccttgagtggattggaaggattgatcctaatagtgatcgtactaagtacaatgagaagttcaagcgcaaggccacactgactgtagacaaatcctccagcacagcctacatgcagctcagcagcctgacatctgaggactctgcggtctattattgtgcaagggatgattacgcctggtttgcttactggggccaagggactctggtcactgtctctgca

SEQ ID NO: 4140 - DNA, 351 bp, Artificial Sequence
  Description of Artificial Sequence: Synthetic polynucleotide
gaggttcatctggtggagtctgggggagccttagtgaagcctggagggtccctgagactctcctgtgcagcctctggattcagtttcagtaaatatggcatgtcttgggttcgccaggccccaggcaagggcctggagtgggtcgcaaccattagtagtagtgggagtcgcacctactatccagacagtgtgaagggcagattcaccatctccagagacaatgccaagaacaccctgtacctgcaaatgagcagtctgaagtctgaggacacagccatgtattactgttcaattagctgggacggtgctatggactactggggtcaagggacctcagtcaccgtctcctca

SEQ ID NO: 4141 - DNA, 351 bp, Artificial Sequence
  Description of Artificial Sequence: Synthetic polynucleotide
gaggttcatctggtggagtctgggggagccttagtgaagcctggagggtccctgagactctcctgtgcagcctctggattcagtttcagtaaatatggcatgtcttgggttcgccaggccccaggcaagggcctggagtgggtcgcaaccattagtagtagtgggagtcgcacctactatccagacagtgtgaagggcagattcaccatctccagagacaatgccaagaacaccctgtacctgcaaatgaacagtctgagagccgaggacacagccatgtattactgttcaattagctgggacggtgctatggactactggggtcaagggaccaccgtcaccgtctcctca

SEQ ID NO: 4142 - DNA, 351 bp, Artificial Sequence
  Description of Artificial Sequence: Synthetic polynucleotide
gaggttcagctggtggagtctgggggagccttagtgaagcctggagggtccctgagactctcctgtgcagcctctggattcagtttcagtaaatatggcatgtcttgggttcgccaggccccaggcaagggcctggagtgggtcgcaaccattagtagtagtgggagtcgcacctactatccagacagtgtgaagggcagattcaccatctccagagacaatgccaagaacaccctgtacctgcaaatgaacagtctgagagccgaggacacagccatgtattactgttcaattagctgggacggtgctatggactactggggtcaagggaccaccgtcaccgtctcctca

SEQ ID NO: 4143 - DNA, 351 bp, Artificial Sequence
  Description of Artificial Sequence: Synthetic polynucleotide
gaggttcagctggtggagtctgggggagccttagtgaagcctggagggtccctgagactctcctgtgcagcctctggattcagtttcagtaaatatggcatgtcttgggttcgccaggccccaggcaagggcctggagtgggtcgcaaccattagtagtagtgggagtcgcacctactatccagacagtgtgaagggcagattcaccatctccagagacaatgccaagaacaccctgtacctgcaaatgaacagtctgagagccgaggacacagccatgtattactgtgccattagctgggacggtgctatggactactggggtcaagggaccaccgtcaccgtctcctca

SEQ ID NO: 4144 - protein, 111 aa, Artificial Sequence
  Description of Artificial Sequence: Synthetic polypeptide
  humanized sequence
EVQVLESGGGLVQPGGSLRLSCAVSGISLSSNAINWVRQAPGKGLEWVGYIAVSGNTYYASWAKGRFTISRDNSKNTVYLQMNSLRAEDTAVYYCGKSNIWGQGTLVTVSS

SEQ ID NO: 4145 - protein, 442 aa, Artificial Sequence
  Description of Artificial Sequence: Synthetic polypeptide
EVKVVESGGGLVQPGGSMKLSCVVSGFTFSNYWVNWVRQAPGKGLEWVAQIRLKSDNYATHYEESVKGRFTISRDDSKSSVYLQMNNLRAEDSGIYYCTNWEDYWGQGTTVTVSSASTKGPSVFPLAPCSRSTSESTAALGCLVKDYFPEPVTVSWNSGALTSGVHTFPAVLQSSGLYSLSSVVTVPSSSLGTKTYTCNVDHKPSNTKVDKRVESKYGPPCPPCPAPEFLGGPSVFLFPPKPKDTLMISRTPEVTCVVVDVSQEDPEVQFNWYVDGVEVHNAKTKPREEQFNSTYRVVSVLTVLHQDWLNGKEYKCKVSNKGLPSSIEKTISKAKGQPREPQVYTLPPSQEEMTKNQVSLTCLVKGFYPSDIAVEWESNGQPENNYKTTPPVLDSDGSFFLYSRLTVDKSRWQEGNVFSCSVMHEALHNHYTQKSLSLSLGK

SEQ ID NO: 4146 - protein, 442 aa, Artificial Sequence
  Description of Artificial Sequence: Synthetic polypeptide
EVKVVESGGGLVQPGGSLKLSCVVSGFTFSNYWVNWVRQAPGKGLEWVAQIRLKSDNYATHYEESVKGRFTISRDDSKSSVYLQMNSLRAEDTGIYYCTNWEDYWGQGTTVTVSSASTKGPSVFPLAPCSRSTSESTAALGCLVKDYFPEPVTVSWNSGALTSGVHTFPAVLQSSGLYSLSSVVTVPSSSLGTKTYTCNVDHKPSNTKVDKRVESKYGPPCPPCPAPEFLGGPSVFLFPPKPKDTLMISRTPEVTCVVVDVSQEDPEVQFNWYVDGVEVHNAKTKPREEQFNSTYRVVSVLTVLHQDWLNGKEYKCKVSNKGLPSSIEKTISKAKGQPREPQVYTLPPSQEEMTKNQVSLTCLVKGFYPSDIAVEWESNGQPENNYKTTPPVLDSDGSFFLYSRLTVDKSRWQEGNVFSCSVMHEALHNHYTQKSLSLSLGK

SEQ ID NO: 4147 - protein, 442 aa, Artificial Sequence
  Description of Artificial Sequence: Synthetic polypeptide
EVQVVESGGGLVQPGGSLKLSCVVSGFTFSNYWVNWVRQAPGKGLEWVAQIRLKSDNYATHYEESVKGRFTISRDDSKNSVYLQMNSLRAEDTAIYYCTNWEDYWGQGTTVTVSSASTKGPSVFPLAPCSRSTSESTAALGCLVKDYFPEPVTVSWNSGALTSGVHTFPAVLQSSGLYSLSSVVTVPSSSLGTKTYTCNVDHKPSNTKVDKRVESKYGPPCPPCPAPEFLGGPSVFLFPPKPKDTLMISRTPEVTCVVVDVSQEDPEVQFNWYVDGVEVHNAKTKPREEQFNSTYRVVSVLTVLHQDWLNGKEYKCKVSNKGLPSSIEKTISKAKGQPREPQVYTLPPSQEEMTKNQVSLTCLVKGFYPSDIAVEWESNGQPENNYKTTPPVLDSDGSFFLYSRLTVDKSRWQEGNVFSCSVMHEALHNHYTQKSLSLSLGK

SEQ ID NO: 4148 - protein, 442 aa, Artificial Sequence
  Description of Artificial Sequence: Synthetic polypeptide
EVQLVESGGGLVQPGGSLKLSCVVSGFTFSNYWVNWVRQAPGKGLEWVAQIRLKSDNYATHYEESVKGRFTISRDDSKNSLYLQMNSLRAEDTAIYYCTNWEDYWGQGTTVTVSSASTKGPSVFPLAPCSRSTSESTAALGCLVKDYFPEPVTVSWNSGALTSGVHTFPAVLQSSGLYSLSSVVTVPSSSLGTKTYTCNVDHKPSNTKVDKRVESKYGPPCPPCPAPEFLGGPSVFLFPPKPKDTLMISRTPEVTCVVVDVSQEDPEVQFNWYVDGVEVHNAKTKPREEQFNSTYRVVSVLTVLHQDWLNGKEYKCKVSNKGLPSSIEKTISKAKGQPREPQVYTLPPSQEEMTKNQVSLTCLVKGFYPSDIAVEWESNGQPENNYKTTPPVLDSDGSFFLYSRLTVDKSRWQEGNVFSCSVMHEALHNHYTQKSLSLSLGK

SEQ ID NO: 4149 - protein, 121 aa, Mus musculus
EVQLVESGGGLVKPGGSLKLSCAASGFTFSNYALSWVRQTPEKRLEWVASISSGGNTYYPDSVKGRFTISRDNARNILYLQMSSLRSEDTAMFYCTSRGDTTLITTLFTYWGQGTLVTVSA

SEQ ID NO: 4150 - DNA, 1335 bp, Artificial Sequence
  Description of Artificial Sequence: Synthetic polynucleotide
  humanized
gaggtgcagctgcaggaatccggtcccggcctcgtgaagccttcagaaaccctgtcgctcacatgcactgtgtccgggttctccctgacctctaacgacatcgcctggattcggcagccgccaggaaagggactggagtggatgggcaccatttggaccgacgggtcaaccaactacaatgccgcggtgcaatccagagtgaccatcagcgtggacacgtccaagaaccagttctcgctgaaattgagctccgtgactgccgctgatactgccgtgtattactgtgcccggcaccgcctttactacggcgcatttgactactggggacagggaaccatggtcactgtctcgagtgcctccaccaagggcccctccgtgttccctctggccccttgctcccggtccacctccgagtctaccgccgctctgggctgcctggtcaaggactacttccccgagcccgtgacagtgtcctggaactctggcgccctgacctccggcgtgcacaccttccctgccgtgctgcagtcctccggcctgtactccctgtcctccgtcgtgaccgtgccctcctccagcctgggcaccaagacctacacctgtaacgtggaccacaagccctccaacaccaaggtggacaagcgggtggaatctaagtacggccctccctgccccccctgccctgcccctgaatttctgggcggaccttccgtgttcctgttccccccaaagcccaaggacaccctgatgatctcccggacccccgaagtgacctgcgtggtggtggacgtgtcccaggaagatcccgaggtccagttcaattggtacgtggacggcgtggaagtgcacaatgccaagaccaagcccagagaggaacagttcaactccacctaccgggtggtgtccgtgctgaccgtgctgcaccaggactggctgaacggcaaagagtacaagtgcaaggtgtccaacaagggcctgccctccagcatcgaaaagaccatctccaaggccaagggccagccccgcgagccccaggtgtacaccctgccccctagccaggaagagatgaccaagaaccaggtgtccctgacctgtctggtcaagggcttctacccctccgacattgccgtggaatgggagtccaacggccagcccgagaacaactacaagaccaccccccctgtgctggacagcgacggctccttcttcctgtactctcggctgaccgtggacaagtcccggtggcaggaaggcaacgtcttctcctgctccgtgatgcacgaggccctgcacaaccactacacccagaagtccctgtccctgagcctgggcaag

SEQ ID NO: 4151 - DNA, 1335 bp, Artificial Sequence
  Description of Artificial Sequence: Synthetic polynucleotide
  humanized
gaggtgcaactgcaggaatccggtcccggcctcgtgaagccttcagaaaccctgtcgctcacatgcactgtgtccgggttctccctgacctctaacgacatcgcctggattcggcagccgccaggaaagggactggagtggatgggcaccatttggaccgacgggtcaaccaactacaataccgcggtgcaatccagagtgaccatcagcgtggacacgtccaagaaccagttctcgctgaaattgagctccgtgactgccgctgatactgccgtgtattactgtgcccggcaccgcctttactacggcgcatttgactactggggacagggaaccatggtcactgtctcgagtgcctccaccaagggcccctccgtgttccctctggccccttgctcccggtccacctccgagtctaccgccgctctgggctgcctggtcaaggactacttccccgagcccgtgacagtgtcctggaactctggcgccctgacctccggcgtgcacaccttccctgccgtgctgcagtcctccggcctgtactccctgtcctccgtcgtgaccgtgccctcctccagcctgggcaccaagacctacacctgtaacgtggaccacaagccctccaacaccaaggtggacaagcgggtggaatctaagtacggccctccctgccccccctgccctgcccctgaatttctgggcggaccttccgtgttcctgttccccccaaagcccaaggacaccctgatgatctcccggacccccgaagtgacctgcgtggtggtggacgtgtcccaggaagatcccgaggtccagttcaattggtacgtggacggcgtggaagtgcacaatgccaagaccaagcccagagaggaacagttcaactccacctaccgggtggtgtccgtgctgaccgtgctgcaccaggactggctgaacggcaaagagtacaagtgcaaggtgtccaacaagggcctgccctccagcatcgaaaagaccatctccaaggccaagggccagccccgcgagccccaggtgtacaccctgccccctagccaggaagagatgaccaagaaccaggtgtccctgacctgtctggtcaagggcttctacccctccgacattgccgtggaatgggagtccaacggccagcccgagaacaactacaagaccaccccccctgtgctggacagcgacggctccttcttcctgtactctcggctgaccgtggacaagtcccggtggcaggaaggcaacgtcttctcctgctccgtgatgcacgaggccctgcacaaccactacacccagaagtccctgtccctgagcctgggcaag

SEQ ID NO: 4152 - DNA, 1344 bp, Artificial Sequence
  Description of Artificial Sequence: Synthetic polynucleotide
  humanized
gaggtgcagctgcaggaatccggtcccggcctcgtgaagccttcagaaaccctgtcgctcacatgcactgtgtccgggttctccctgacctctaacgacatcgcctggattcggcagccgccaggaaagggactggagtggatgggcaccatttggaccgacgggtcaaccaactacaatgccgcggtgcaatccagagtgaccatcagcgtggacacgtccaagaaccagttctcgctgaaattgagctccgtgactgccgctgatactgccgtgtattactgtgcccggcaccgcctttactacggcgcatttgactactggggacagggaaccatggtcactgtctcgagtgcctccaccaagggcccctccgtgttcccgctcgctccatcatcgaagtctaccagcggaggcactgcggctctcggttgcctcgtgaaggactacttcccggagccggtgaccgtgtcgtggaacagcggagccctgaccagcggggtgcacacctttccggccgtcttgcagtcaagcggcctttactccctgtcatcagtggtgactgtcccgtccagctcattgggaacccaaacctacatctgcaatgtgaatcacaaacctagcaacaccaaggttgacaagaaagtcgagcccaaatcgtgtgacaagactcacacttgtccgccgtgcccggcacccgaactgctgggaggtcccagcgtctttctgttccctccaaagccgaaagacacgctgatgatctcccgcaccccggaggtcacttgcgtggtcgtggacgtgtcacatgaggacccagaggtgaagttcaattggtacgtggatggcgtcgaagtccacaatgccaaaactaagcccagagaagaacagtacaattcgacctaccgcgtcgtgtccgtgctcacggtgttgcatcaggattggctgaacgggaaggaatacaagtgcaaagtgtccaacaaggcgctgccggcaccgatcgagaaaactatctccaaagcgaagggacagcctagggaacctcaagtctacacgctgccaccatcacgggatgaactgactaagaatcaagtctcactgacttgtctggtgaaggggttttaccctagcgacattgccgtggagtgggaatccaacggccagccagagaacaactacaagactacccctccagtgctcgactcggatggatcgttcttcctttactcgaagctcaccgtggataagtcccggtggcagcagggaaacgtgttctcctgctcggtgatgcatgaagccctccataaccactatacccaaaagtcgctgtccctgtcgccgggaaag

SEQ ID NO: 4153 - DNA, 1344 bp, Artificial Sequence
  Description of Artificial Sequence: Synthetic polynucleotide
  humanized
gaggtgcaactgcaggaatccggtcccggcctcgtgaagccttcagaaaccctgtcgctcacatgcactgtgtccgggttctccctgacctctaacgacatcgcctggattcggcagccgccaggaaagggactggagtggatgggcaccatttggaccgacgggtcaaccaactacaataccgcggtgcaatccagagtgaccatcagcgtggacacgtccaagaaccagttctcgctgaaattgagctccgtgactgccgctgatactgccgtgtattactgtgcccggcaccgcctttactacggcgcatttgactactggggacagggaaccatggtcactgtctcgagtgcctccaccaagggcccctccgtgttcccgctcgctccatcatcgaagtctaccagcggaggcactgcggctctcggttgcctcgtgaaggactacttcccggagccggtgaccgtgtcgtggaacagcggagccctgaccagcggggtgcacacctttccggccgtcttgcagtcaagcggcctttactccctgtcatcagtggtgactgtcccgtccagctcattgggaacccaaacctacatctgcaatgtgaatcacaaacctagcaacaccaaggttgacaagaaagtcgagcccaaatcgtgtgacaagactcacacttgtccgccgtgcccggcacccgaactgctgggaggtcccagcgtctttctgttccctccaaagccgaaagacacgctgatgatctcccgcaccccggaggtcacttgcgtggtcgtggacgtgtcacatgaggacccagaggtgaagttcaattggtacgtggatggcgtcgaagtccacaatgccaaaactaagcccagagaagaacagtacaattcgacctaccgcgtcgtgtccgtgctcacggtgttgcatcaggattggctgaacgggaaggaatacaagtgcaaagtgtccaacaaggcgctgccggcaccgatcgagaaaactatctccaaagcgaagggacagcctagggaacctcaagtctacacgctgccaccatcacgggatgaactgactaagaatcaagtctcactgacttgtctggtgaaggggttttaccctagcgacattgccgtggagtgggaatccaacggccagccagagaacaactacaagactacccctccagtgctcgactcggatggatcgttcttcctttactcgaagctcaccgtggataagtcccggtggcagcagggaaacgtgttctcctgctcggtgatgcatgaagccctccataaccactatacccaaaagtcgctgtccctgtcgccgggaaag

SEQ ID NO: 4154 - DNA, 360 bp, Artificial Sequence
  Description of Artificial Sequence: Synthetic polynucleotide
  humanized
gagctccaactgcaagaatccggccctggtctggtcaagccctccgaaaccctgagcctcacctgtactgtgtccgggatcgacttgagcacctggaggatgaactggattcgccagccaccgggaaagggactggagtggatcggcattatcggtactgggggacggacctactacgccaattgggcaaagggcagagtgacgatttcaaaggacacctcgaagaaccaggtgtccctgaaactgtcctccgtgactgcggctgacaccgccgtgtactattgcgcccggctgggagccaacaaccagggctacccgctggatctttggggacagggaaccctcgtgactgtctcgagt

SEQ ID NO: 4155 - DNA, 360 bp, Artificial Sequence
  Description of Artificial Sequence: Synthetic polynucleotide
  humanized
gagctccaactgcaagaatccggccctggtctggtcaagccctccgaaaccctgagcctcacctgtactgtgtccgggatcgacttgagcacctggaggatgaactggattcgccagccaccgggaaagggactggagtggatcggcattatcggtactgggggacggacctactacgccaattgggcaaagggcagagtgacgatttcaaaggacacctcgaagaaccaggtgtccctgaaactgtcctccgtgactgcggctgacaccgccgtgtactattgcgcccggctgggagccaacaacgccggctacccgctggatctttggggacagggaaccctcgtgactgtctcgagt

SEQ ID NO: 4156 - DNA, 1341 bp, Artificial Sequence
  Description of Artificial Sequence: Synthetic polynucleotide
  humanized
gagctccaactgcaagaatccggccctggtctggtcaagccctccgaaaccctgagcctcacctgtactgtgtccgggatcgacttgagcacctggaggatgaactggattcgccagccaccgggaaagggactggagtggatcggcattatcggtactgggggacggacctactacgccaattgggcaaagggcagagtgacgatttcaaaggacacctcgaagaaccaggtgtccctgaaactgtcctccgtgactgcggctgacaccgccgtgtactattgcgcccggctgggagccaacaaccagggctacccgctggatctttggggacagggaaccctcgtgactgtctcgagtgcctccaccaagggcccctccgtgttccctctggccccttgctcccggtccacctccgagtctaccgccgctctgggctgcctggtcaaggactacttccccgagcccgtgacagtgtcctggaactctggcgccctgacctccggcgtgcacaccttccctgccgtgctgcagtcctccggcctgtactccctgtcctccgtcgtgaccgtgccctcctccagcctgggcaccaagacctacacctgtaacgtggaccacaagccctccaacaccaaggtggacaagcgggtggaatctaagtacggccctccctgccccccctgccctgcccctgaatttctgggcggaccttccgtgttcctgttccccccaaagcccaaggacaccctgatgatctcccggacccccgaagtgacctgcgtggtggtggacgtgtcccaggaagatcccgaggtccagttcaattggtacgtggacggcgtggaagtgcacaatgccaagaccaagcccagagaggaacagttcaactccacctaccgggtggtgtccgtgctgaccgtgctgcaccaggactggctgaacggcaaagagtacaagtgcaaggtgtccaacaagggcctgccctccagcatcgaaaagaccatctccaaggccaagggccagccccgcgagccccaggtgtacaccctgccccctagccaggaagagatgaccaagaaccaggtgtccctgacctgtctggtcaagggcttctacccctccgacattgccgtggaatgggagtccaacggccagcccgagaacaactacaagaccaccccccctgtgctggacagcgacggctccttcttcctgtactctcggctgaccgtggacaagtcccggtggcaggaaggcaacgtcttctcctgctccgtgatgcacgaggccctgcacaaccactacacccagaagtccctgtccctgagcctgggcaag

SEQ ID NO: 4157 - DNA, 1341 bp, Artificial Sequence
  Description of Artificial Sequence: Synthetic polynucleotide
  humanized
gagctccaactgcaagaatccggccctggtctggtcaagccctccgaaaccctgagcctcacctgtactgtgtccgggatcgacttgagcacctggaggatgaactggattcgccagccaccgggaaagggactggagtggatcggcattatcggtactgggggacggacctactacgccaattgggcaaagggcagagtgacgatttcaaaggacacctcgaagaaccaggtgtccctgaaactgtcctccgtgactgcggctgacaccgccgtgtactattgcgcccggctgggagccaacaacgccggctacccgctggatctttggggacagggaaccctcgtgactgtctcgagtgcctccaccaagggcccctccgtgttccctctggccccttgctcccggtccacctccgagtctaccgccgctctgggctgcctggtcaaggactacttccccgagcccgtgacagtgtcctggaactctggcgccctgacctccggcgtgcacaccttccctgccgtgctgcagtcctccggcctgtactccctgtcctccgtcgtgaccgtgccctcctccagcctgggcaccaagacctacacctgtaacgtggaccacaagccctccaacaccaaggtggacaagcgggtggaatctaagtacggccctccctgccccccctgccctgcccctgaatttctgggcggaccttccgtgttcctgttccccccaaagcccaaggacaccctgatgatctcccggacccccgaagtgacctgcgtggtggtggacgtgtcccaggaagatcccgaggtccagttcaattggtacgtggacggcgtggaagtgcacaatgccaagaccaagcccagagaggaacagttcaactccacctaccgggtggtgtccgtgctgaccgtgctgcaccaggactggctgaacggcaaagagtacaagtgcaaggtgtccaacaagggcctgccctccagcatcgaaaagaccatctccaaggccaagggccagccccgcgagccccaggtgtacaccctgccccctagccaggaagagatgaccaagaaccaggtgtccctgacctgtctggtcaagggcttctacccctccgacattgccgtggaatgggagtccaacggccagcccgagaacaactacaagaccaccccccctgtgctggacagcgacggctccttcttcctgtactctcggctgaccgtggacaagtcccggtggcaggaaggcaacgtcttctcctgctccgtgatgcacgaggccctgcacaaccactacacccagaagtccctgtccctgagcctgggcaag

SEQ ID NO: 4158 - DNA, 1350 bp, Artificial Sequence
  Description of Artificial Sequence: Synthetic polynucleotide
  humanized
gagctccaactgcaagaatccggccctggtctggtcaagccctccgaaaccctgagcctcacctgtactgtgtccgggatcgacttgagcacctggaggatgaactggattcgccagccaccgggaaagggactggagtggatcggcattatcggtactgggggacggacctactacgccaattgggcaaagggcagagtgacgatttcaaaggacacctcgaagaaccaggtgtccctgaaactgtcctccgtgactgcggctgacaccgccgtgtactattgcgcccggctgggagccaacaaccagggctacccgctggatctttggggacagggaaccctcgtgactgtctcgagtgcctccaccaagggcccctccgtgttcccgctcgctccatcatcgaagtctaccagcggaggcactgcggctctcggttgcctcgtgaaggactacttcccggagccggtgaccgtgtcgtggaacagcggagccctgaccagcggggtgcacacctttccggccgtcttgcagtcaagcggcctttactccctgtcatcagtggtgactgtcccgtccagctcattgggaacccaaacctacatctgcaatgtgaatcacaaacctagcaacaccaaggttgacaagaaagtcgagcccaaatcgtgtgacaagactcacacttgtccgccgtgcccggcacccgaactgctgggaggtcccagcgtctttctgttccctccaaagccgaaagacacgctgatgatctcccgcaccccggaggtcacttgcgtggtcgtggacgtgtcacatgaggacccagaggtgaagttcaattggtacgtggatggcgtcgaagtccacaatgccaaaactaagcccagagaagaacagtacaattcgacctaccgcgtcgtgtccgtgctcacggtgttgcatcaggattggctgaacgggaaggaatacaagtgcaaagtgtccaacaaggcgctgccggcaccgatcgagaaaactatctccaaagcgaagggacagcctagggaacctcaagtctacacgctgccaccatcacgggatgaactgactaagaatcaagtctcactgacttgtctggtgaaggggttttaccctagcgacattgccgtggagtgggaatccaacggccagccagagaacaactacaagactacccctccagtgctcgactcggatggatcgttcttcctttactcgaagctcaccgtggataagtcccggtggcagcagggaaacgtgttctcctgctcggtgatgcatgaagccctccataaccactatacccaaaagtcgctgtccctgtcgccgggaaag

SEQ ID NO: 4159 - DNA, 1350 bp, Artificial Sequence
  Description of Artificial Sequence: Synthetic polynucleotide
  humanized
gagctccaactgcaagaatccggccctggtctggtcaagccctccgaaaccctgagcctcacctgtactgtgtccgggatcgacttgagcacctggaggatgaactggattcgccagccaccgggaaagggactggagtggatcggcattatcggtactgggggacggacctactacgccaattgggcaaagggcagagtgacgatttcaaaggacacctcgaagaaccaggtgtccctgaaactgtcctccgtgactgcggctgacaccgccgtgtactattgcgcccggctgggagccaacaacgccggctacccgctggatctttggggacagggaaccctcgtgactgtctcgagtgcctccaccaagggcccctccgtgttcccgctcgctccatcatcgaagtctaccagcggaggcactgcggctctcggttgcctcgtgaaggactacttcccggagccggtgaccgtgtcgtggaacagcggagccctgaccagcggggtgcacacctttccggccgtcttgcagtcaagcggcctttactccctgtcatcagtggtgactgtcccgtccagctcattgggaacccaaacctacatctgcaatgtgaatcacaaacctagcaacaccaaggttgacaagaaagtcgagcccaaatcgtgtgacaagactcacacttgtccgccgtgcccggcacccgaactgctgggaggtcccagcgtctttctgttccctccaaagccgaaagacacgctgatgatctcccgcaccccggaggtcacttgcgtggtcgtggacgtgtcacatgaggacccagaggtgaagttcaattggtacgtggatggcgtcgaagtccacaatgccaaaactaagcccagagaagaacagtacaattcgacctaccgcgtcgtgtccgtgctcacggtgttgcatcaggattggctgaacgggaaggaatacaagtgcaaagtgtccaacaaggcgctgccggcaccgatcgagaaaactatctccaaagcgaagggacagcctagggaacctcaagtctacacgctgccaccatcacgggatgaactgactaagaatcaagtctcactgacttgtctggtgaaggggttttaccctagcgacattgccgtggagtgggaatccaacggccagccagagaacaactacaagactacccctccagtgctcgactcggatggatcgttcttcctttactcgaagctcaccgtggataagtcccggtggcagcagggaaacgtgttctcctgctcggtgatgcatgaagccctccataaccactatacccaaaagtcgctgtccctgtcgccgggaaag

SEQ ID NO: 4160 - protein, 110 aa, Oryctolagus cuniculus
  MOD_RES (91)..(91): Ala or Gly
DVVMTQTPASVEAAVGGTVTIKCQASQSVSSYLAWYQQKPGQPPKLLIYAASYLASGVPSRFKGSGSGTEFTLTISDLECADAATYYCQQXYTRTDIDNTFGGGTKVVVE

SEQ ID NO: 4161 - protein, 110 aa, Artificial Sequence
  Description of Artificial Sequence: Synthetic polypeptide
  murinised
DVVMTQSPASLAVSLGQRATISCQASQSVSSYLAWYQQKPGQPPKLLIYAASYLASGVPSRFKGSGSGTEFTLNIHPVEEEDAATYYCQQGYTRTDIDNTFGGGTKLEIK

SEQ ID NO: 4162 - protein, 110 aa, Artificial Sequence
  Description of Artificial Sequence: Synthetic polypeptide
  humanized
DIQMTQSPSSLSASVGDRVTITCQASQSVSSYLAWYQQKPGKAPKLLIYAASYLASGVPSRFSGSGSGTDFTLTISSLQPEDFATYYCQQGYTRTDIDNTFGGGTKVEIK

SEQ ID NO: 4163 - protein, 110 aa, Artificial Sequence
  Description of Artificial Sequence: Synthetic polypeptide
  humanized
DIQMTQSPSSLSASVGDRVTITCQASQSVSSYLAWYQQKPGKAPKLLIYAASYLASGVPSRFSGSGSGTDFTLTISSLQPEDFATYYCQQAYTRTDIDNTFGGGTKVEIK

SEQ ID NO: 4164 - protein, 110 aa, Artificial Sequence
  Description of Artificial Sequence: Synthetic polypeptide
  humanized
  MOD_RES (91)..(91): Ala or Gly
DIQMTQSPSSLSASVGDRVTITCQASQSVSSYLAWYQQKPGKAPKLLIYAASYLASGVPSRFSGSGSGTDFTLTISSLQPEDFATYYCQQXYTRTDIDNTFGGGTKVEIK

SEQ ID NO: 4165 - protein, 217 aa, Artificial Sequence
  Description of Artificial Sequence: Synthetic polypeptide
  humanized
DIQMTQSPSSLSASVGDRVTITCQASQSVSSYLAWYQQKPGKAPKLLIYAASYLASGVPSRFSGSGSGTDFTLTISSLQPEDFATYYCQQGYTRTDIDNTFGGGTKVEIKRTVAAPSVFIFPPSDEQLKSGTASVVCLLNNFYPREAKVQWKVDNALQSGNSQESVTEQDSKDSTYSLSSTLTLSKADYEKHKVYACEVTHQGLSSPVTKSFNRGEC

SEQ ID NO: 4166 - protein, 217 aa, Artificial Sequence
  Description of Artificial Sequence: Synthetic polypeptide
  humanized
DIQMTQSPSSLSASVGDRVTITCQASQSVSSYLAWYQQKPGKAPKLLIYAASYLASGVPSRFSGSGSGTDFTLTISSLQPEDFATYYCQQAYTRTDIDNTFGGGTKVEIKRTVAAPSVFIFPPSDEQLKSGTASVVCLLNNFYPREAKVQWKVDNALQSGNSQESVTEQDSKDSTYSLSSTLTLSKADYEKHKVYACEVTHQGLSSPVTKSFNRGEC

SEQ ID NO: 4167 - protein, 217 aa, Artificial Sequence
  Description of Artificial Sequence: Synthetic polypeptide
  humanized
  MOD_RES (91)..(91): Ala or Gly
DIQMTQSPSSLSASVGDRVTITCQASQSVSSYLAWYQQKPGKAPKLLIYAASYLASGVPSRFSGSGSGTDFTLTISSLQPEDFATYYCQQXYTRTDIDNTFGGGTKVEIKRTVAAPSVFIFPPSDEQLKSGTASVVCLLNNFYPREAKVQWKVDNALQSGNSQESVTEQDSKDSTYSLSSTLTLSKADYEKHKVYACEVTHQGLSSPVTKSFNRGEC

SEQ ID NO: 4168 - DNA, 330 bp, Oryctolagus cuniculus
gatgttgtgatgacccagactccagcctccgtggaggcagctgtgggaggcacagtcaccatcaagtgccaggccagtcagagcgttagtagttacttagcctggtatcagcagaaaccagggcagcctcccaagctcctgatctatgctgcatcctatctggcatccggggtcccatcacggttcaaaggcagtggatctgggacagagttcactctcaccatcagcgacctggagtgtgccgatgctgccacttattactgtcaacagggttatactaggactgatattgataatactttcggcggagggaccaaggtggtggtcgaa

SEQ ID NO: 4169 - protein, 214 aa, Artificial Sequence
  Description of Artificial Sequence: Synthetic polypeptide
  C10.2 Light Chain
DVQMIQSPSSLSASLGDIVTMTCQASQGTSINLNWFQQKPGKAPKLLIYGASNLEDGVPSRFSGSRYGTDFTLTISSLEDEDMATYFCLQHTYLPFTFGSGTKLEIKRADAAPTVSIFPPSSEQLTSGGASVVCFLNNFYPKDINVKWKIDGSERQNGVLNSWTDQDSKDSTYSMSSTLTLTKDEYERHNSYTCEATHKTSTSPIVKSFNRNEC

SEQ ID NO: 4170 - protein, 111 aa, Mus sp.; identical to SEQ ID NO: 3822

SEQ ID NO: 4171 - protein, 214 aa, Artificial Sequence
  Description of Artificial Sequence: Synthetic polypeptide
  C5.2 Light Chain
DVQMIQSPSSLSASLGDIVTMTCQASQDTSINLNWFQQKPGKAPKLLIYGASNLEDGVPSRFSGSRYGTDFTLTISSLEDEDMATYFCLQHTYLPFTFGSGTKLEIKRADAAPTVSIFPPSSEQLTSGGASVVCFLNNFYPKDINVKWKIDGSERQNGVLNSWTDQDSKDSTYSMSSTLTLTKDEYERHNSYTCEATHKTSTSPIVKSFNRNEC

SEQ ID NO: 4172 - protein, 214 aa, Artificial Sequence
  Description of Artificial Sequence: Synthetic polypeptide
  C8.3 Light Chain
DVQMIQSPSSLSASLGDIVTMTCQASQGTSINLNWFQQKPGKAPKLLIYGSSNLEDGVPSRFSGSRYGTDFTLTISSLEDEDMATYFCLQHSYLPFTFGSGTKLEIKRADAAPTVSIFPPSSEQLTSGGASVVCFLNNFYPKDINVKWKIDGSERQNGVLNSWTDQDSKDSTYSMSSTLTLTKDEYERHNSYTCEATHKTSTSPIVKSFNRNEC

SEQ ID NO: 4173 - protein, 219 aa, Artificial Sequence
  Description of Artificial Sequence: Synthetic polypeptide
  D1.2 Light Chain
DVMMTQTPLSLPVSLGDQASISCRSSQSLVHSNGNTYLHWHLQKPGQSPKFLIYKVSNRFSGVPDRFSGSGSGTDFTLKISRVEAEDLGVYFCSQSTHVPFTFGSGTKLEIKRADAAPTVSIFPPSSEQLTSGGASVVCFLNNFYPKDINVKWKIDGSERQNGVLNSWTDQDSKDSTYSMSSTLTLTKDEYERHNSYTCEATHKTSTSPIVKSFNRNEC

SEQ ID NO: 4174 - protein, 219 aa, Artificial Sequence
  Description of Artificial Sequence: Synthetic polypeptide
  D1.2* Light Chain
DVVMTQTPLSLPVSLGDQASISCRSSQSLVHSNGNTYLHWHLQKPGQSPKFLIYKVSNRFSGVPDRFSGSGSGTDFTLKISRVEAEDLGVYFCSQSTHVPFTFGSGTKLEIKRADAAPTVSIFPPSSEQLTSGGASVVCFLNNFYPKDINVKWKIDGSERQNGVLNSWTDQDSKDSTYSMSSTLTLTKDEYERHNSYTCEATHKTSTSPIVKSFNRNEC

SEQ ID NO: 4175 - protein, 214 aa, Artificial Sequence
  Description of Artificial Sequence: Synthetic polypeptide
  hC10.2 LC
DVQMTQSPSSLSASVGDRVTMTCQASQDTSINLNWFQQKPGKAPKLLIYGASNLETGVPSRFSGSRSGTDFTLTISSLQPEDMATYYCLQHTYLPFTFGSGTKLEIKRTVAAPSVFIFPPSDEQLKSGTASVVCLLNNFYPREAKVQWKVDNALQSGNSQESVTEQDSKDSTYSLSSTLTLSKADYEKHKVYACEVTHQGLSSPVTKSFNRGEC

SEQ ID NO: 4176 - DNA, 336 bp, Rattus norvegicus
gatattgtgatgacccagactccagtttccctgtctgtcacacttggagatcaagcttctatatcttgcaggtctagtcagagcctggaatatagtgatggctacacttatttggaatggtacctacagaagccaggccagtctcctcagctcctcatctatgaagtttccaaccgattttctggggtcccagacaggttcattggcagtgggtcagggacagatttcaccctcaagatcagcagagtagagcctgaggacttgggagtttattactgcttccaagctacacataatccgtacacgtttggagctgggaccaagctggaaataaaa

SEQ ID NO: 4177 - protein, 112 aa, Rattus norvegicus
DIVMTQTPVSLSVTLGDQASISCRSSQSLEYSDGYTYLEWYLQKPGQSPQLLIYEVSNRFSGVPDRFIGSGSGTDFTLKISRVEPEDLGVYYCFQATHNPYTFGAGTKLEIK

SEQ ID NO: 4178 - protein, 112 aa, Artificial Sequence
  Description of Artificial Sequence: Synthetic polypeptide
  humanized
DIVMTQTPLSLSVTPGQPASISCRSSQSLEYSDGYTYLEWYLQKPGQSPQLLIYEVSNRFSGVPDRFSGSGSGTDFTLKISRVEAEDVGVYYCFQATHNPYTFGQGTKLEIK

SEQ ID NO: 4179 - protein, 219 aa, Artificial Sequence
  Description of Artificial Sequence: Synthetic polypeptide
  humanized
DIVMTQTPLSLSVTPGQPASISCRSSQSLEYSDGYTYLEWYLQKPGQSPQLLIYEVSNRFSGVPDRFSGSGSGTDFTLKISRVEAEDVGVYYCFQATHNPYTFGQGTKLEIKRTVAAPSVFIFPPSDEQLKSGTASVVCLLNNFYPREAKVQWKVDNALQSGNSQESVTEQDSKDSTYSLSSTLTLSKADYEKHKVYACEVTHQGLSSPVTKSFNRGEC

SEQ ID NO: 4180 - DNA, 336 bp, Artificial Sequence
  Description of Artificial Sequence: Synthetic polynucleotide
  humanized
gatatcgtgatgactcagaccccactctcactgtccgtcaccccgggacagcccgcgtcaatctcgtgtaggagctcccaatccctcgaatactcggacggctatacttacctggagtggtacttgcagaagcccggacagagcccgcagcttctgatctacgaagtgtccaacagattctccggcgtgcctgaccgcttttcggggtcgggctccggtactgatttcaccctgaaaatctcccgggtggaagccgaggacgtgggagtctactactgcttccaagccacccacaacccttacaccttcggacaggggaccaagctggagatcaag

SEQ ID NO: 4181 - protein, 111 aa, Artificial Sequence
  Description of Artificial Sequence: Synthetic polypeptide
DIVLTQSPDSLAVSLGERATISCRASQSVSTSRYSYIHWYQQKPGQPPKLLIKYASNLESGVPSRFSGSGSGTDFTLNIHPLEEEDFATYYCHHSWEIPLTFGQGTKLEIK

SEQ ID NO: 4182 - protein, 111 aa, Artificial Sequence
  Description of Artificial Sequence: Synthetic polypeptide
DIVLTQSPDSLAVSLGERATISCRASQSVSTSRYSYIHWYQQKPGQPPKLLIKYASNLESGVPSRFSGSGSGTDFTLNIHPLEPEDFATYYCHHSWEIPLTFGQGTKLEIK

SEQ ID NO: 4183 - protein, 111 aa, Artificial Sequence
  Description of Artificial Sequence: Synthetic polypeptide
DIVLTQSPDSLAVSLGERATISCRASQSVSTSRYSYIHWYQQKPGQPPKLLIKYASNLESGVPSRFSGSGSGTDFTLTISSLQPEDFATYYCHHSWEIPLTFGQGTKLEIK

SEQ ID NO: 4184 - protein, 111 aa, Artificial Sequence
  Description of Artificial Sequence: Synthetic polypeptide
DIVMTQSPDSLAVSLGERATISCRASQSVSTSRYSYIHWYQQKPGQPPKLLIKYASNLESGVPSRFSGSGSGTDFTLTISSLQPEDFATYYCHHSWEIPLTFGQGTKLEIK

SEQ ID NO: 4185 - protein, 112 aa, Mus musculus
DVLMTQTPLSLPVSLGDQASISCRSSQSILNSNGNTYLEWYLQKPGQSPKLLIYKVSNRFSGVPDRFSGSGSGTDFTLKISRVEAEDLGVYYCFQGSHVPWTFGGGTKLEIK

SEQ ID NO: 4186 - protein, 112 aa, Mus musculus
DVLMTQTPLSLPVSLGDQASISCRSSQSIINSNGNTYLEWYLQKPGQSPKLLIYKVSNRFSGVPDRFSGSGSGTDFTLKISRVETEDLGIYYCFQGSHVPWTFGGGTKLEIK

SEQ ID NO: 4187 - protein, 108 aa, Mus musculus
DIQMNQSPSSLSASLGDTITISCHASQNINVWLSWYQQKPGNIPKLLIFEASTLYTGVPSRFSGSGSGTGFTLTISSLQPEDIATYYCQQGQSYPWTFGGGTKLEIKR

SEQ ID NO: 4188 - protein, 112 aa, Mus musculus
DVLMTQTPLSLPVSLGDQASISCRSSQSILHRNGNTYLDWFLLKPGQSPKLLIYKVSNRFSGVPDRFSGSGSGTDFTLKISRVEAEDLGVYYCFQGSHVPWTFGGGTKLEIK

SEQ ID NO: 4189 - DNA, 336 bp, Artificial Sequence
  Description of Artificial Sequence: Synthetic polynucleotide
gatgttttgatgacccaaactccgctctccctggcagtcaatcttggagatcaagcctccctctcttgcagatcgagtcagactattttacatagtaatggaaatacctatttagaatggtatttgcagaaaccaggccagtctccaagactcctgatctacaaagtttctaaacgattttctggggtcccagacaggttcagtggcagtggatcagggacagatttcacactcaagatcagcagagtggaggctgacgatctgggaatttattactgctttcaaggttcacttgttccttgggcgttcggtggaggcaccaagctggaaatcaaa

SEQ ID NO: 4190 - DNA, 336 bp, Artificial Sequence
  Description of Artificial Sequence: Synthetic polynucleotide
gatgttttgatgacccaaactccactctccctgcctgtcagtcttggagatcaagcctccatctcttgcaaatctagtcagagcattgtacatagtaatggaaacacctatttagaatggtacctgcagaaaccaggccagtctccaaagctcctggtctacaaagtttccaatcgattttctggggtcccagacaggttcagtggcagtggatcagggacagatttcacactcaagatcagcagagtggaggctgaggatctgggaacttattactgctttcaaggttcacttgttccttgggcgttcggtggaggcaccaagctggaaatcaaa

SEQ ID NO: 4191 - DNA, 336 bp, Mus musculus
aacattttgatgacacagtcgccatcatctctggctgtgtctgcaggagaaaaggtcactatgagctgtaagtccagtcaaagtgttttatacagttcaaatcagaagaactacttggcctggtaccagcagaaaccagggcagtctcctaaactgctgatctactgggcatccactagggaatctggtgtccctgatcgcttcacaggcagtggatctgggacagattttactcttaccatcagcagtgtacaagctgaagacctggcagtttattactgtcttcaatacctctcctcgctcacgttcggtgctgggaccaagctggagctgaaa

SEQ ID NO: 4192 - DNA, 336 bp, Mus musculus
gatattgtgatgactcaggctgcaccctctgtacctgtcactcctggagagtcagtatccatctcctgcaggtctagtaagagtctcctgcatagtaatggcaacacttacttgtattggttcctgcagaggccaggccagtctcctcagctcctgatacatcggatgtccaaccttgcctcaggagtcccagacaggttcagtggcagtgggtcaggaactgctttcacactgagaatcagtagagtggaggctgaggatgtgggtgtttattactgtatgcaacatctaaaatctccgtacacgttcggaggggggaccaagctggaaataaaa

SEQ ID NO: 4193 - DNA, 336 bp, Mus musculus
gatattrtgatgactcaggctgcaccctctgtacctgtcactcctggagagtcagtatccatctcctgcaggtctagtaagagtctcctgcatagtaatggcaacacttacttgtattggttcctgcagaggccaggccagtctcctcagctcctgatatatcggatgtccaaccttgcctcaggagtcccagacaggttcagtggcagtgggtcaggaactgctttcacactgagaatcagtagagtggaggctgaggatgtgggtgtttattactgtatgcaacatctaaaatctccgtacacgttcggaggggggaccaagctggaaataaaa

SEQ ID NO: 4194 - DNA, 336 bp, Mus musculus
gatgttttgatgacccaaactccactctccctgcctgtcagtcttggagatcaagcctccatctcttgcagatctagtcagagcattgtacatagtaatggaaacacctatttagaatggttcctgcagaaaccaggccagtctccaaagctcctgatctacaaagtttccaaccgattttctggggtcccagacaggttcagtggcagtggatcagggacagatttcacactcaagatcagcagagtggaggctgaggatctgggagtttattactgctttcaaggttcacatgttccgtacacgttcggaggggggaccaagctggaaataaaa

SEQ ID NO: 4195 - DNA, 321 bp, Mus musculus
gacattgtgatgacccagtctcaaaaattcatgtccacatcagtaggagacagggtcagcgtcacctgcaaggccagtcagaatgtgggtactaatgtagcctggtatcaacagaaaccagggcaatctcctaaagcactgatttactcggcatcctaccggtacagtggagtccctgatcgcttcacaggcagtggatctgggacagatttcactctcaccatcagcaatgtgcagtctgaagacttggcagagtatttctgtcagcaatataacagctatccgtacacgttcggaggggggaccaagctggaaataaaa

SEQ ID NO: 4196 - DNA, 336 bp, Mus musculus
gatgttttgatgacccaaactccactctccctgcctgtcagtcttggagatcaagcctccatctcttgcagatctagtcagagcattgtacatagtaatggaaacacctatttagaatggtacctgcagaaaccaggccagtctccaaagctcctgatctacaaactttccaaccgattttctggggtcccagacaggttcagtggcagtggatcagggacagatttcacactcaagatcagcagagtggaggctgaggatctgggagtttattactgctttcaaggttcacatgttcctccgacgttcggtggaggcaccaagctggaaatcaaa

SEQ ID NO: 4197 - DNA, 336 bp, Mus musculus
gatattgtgatgactcaggctgcaccctctgtacctgtcactcctggagagtcagtatccatctcctgcaggtctagtaagagtctcctgcatagtaatggcaacacttacttgtattggttcctgcagaggccaggccagtctcctcagctcctgatatatcggatgtccaaccttgcctcaggagtcccagacaggttcagtggcagtgggtcaggaactgctttcacactgagaatcagtagagtggaggctgaggatgtgggtgtttattactgtatgcaacatctaaaatctccgtacacgttcggaggggggaccaagctggaaataaaa

SEQ ID NO: 4198 - DNA, 336 bp, Artificial Sequence
  Description of Artificial Sequence: Synthetic polynucleotide
gatgttttgatgacccaaagcccactctccctgcctgtcacccttggacagcccgcctccatctcttgcaaatctagtcagagcattgtacatagtaatggaaacacctatttagaatggtacctgcagaaaccaggccagtctccacagctcctggtctacaaagtttccaatcgattttctggggtcccagacagattcagtggcagtggatcagggacagatttcacactcaagatcagcagagtggaggctgaggatgtgggaacttattactgctttcaaggctcacttgttccttgggcgttcggtggaggcaccaaggtggaaatcaaa

SEQ ID NO: 4199 - DNA, 336 bp, Artificial Sequence
  Description of Artificial Sequence: Synthetic polynucleotide
gatgttgtgatgacccaaagcccactctccctgcctgtcacccttggacagcccgcctccatctcttgcaaatctagtcagagcattgtacatagtaatggaaacacctatttagaatggtacctgcagaaaccaggccagtctccacagctcctggtctacaaagtttccaatcgattttctggggtcccagacagattcagtggcagtggatcagggacagatttcacactcaagatcagcagagtggaggctgaggatgtgggaacttattactgctttcaaggctcacttgttccttgggcgttcggtggaggcaccaaggtggaaatcaaa

SEQ ID NO: 4200 - DNA, 336 bp, Artificial Sequence
  Description of Artificial Sequence: Synthetic polynucleotide
gatgttgtgatgacccaaagcccactctccctgcctgtcacccttggacagcccgcctccatctcttgcaaatctagtcagagcattgtacatagtaatggaaacacctatttagaatggtacctgcagaaaccaggccagtctccacagctcctggtctacaaagtttccaatcgattttctggggtcccagacagattcagtggcagtggatcagggacagatttcacactcaagatcagcagagtggaggctgaggatgtgggagtgtattactgctttcaaggctcacttgttccttgggcgttcggtggaggcaccaaggtggaaatcaaa

SEQ ID NO: 4201 - DNA, 336 bp, Artificial Sequence
  Description of Artificial Sequence: Synthetic polynucleotide
gatgttgtgatgacccaaagcccactctccctgcctgtcacccttggacagcccgcctccatctcttgcaaatctagtcagagcattgtacatagtaatggaaacacctatttagaatggtacctgcagaaaccaggccagtctccacagctcctgatctacaaagtttccaatcgattttctggggtcccagacagattcagtggcagtggatcagggacagatttcacactcaagatcagcagagtggaggctgaggatgtgggagtgtattactgctttcaaggctcacttgttccttgggcgttcggtggaggcaccaaggtggaaatcaaa

SEQ ID NO: 4202 - protein, 111 aa, Artificial Sequence
  Description of Artificial Sequence: Synthetic polypeptide
  humanized sequence
AQVMTQSPSSLSASVGDRVTITCRSSQSVRNNKLAWFQQKPGQPPKRLIYSASDLDYGVPSRFSGSGSGTEFTLTISSLQPEDFATYYCLGYFDSSADIVAFGGGTKVEIK

SEQ ID NO: 4203 - protein, 111 aa, Artificial Sequence
  Description of Artificial Sequence: Synthetic polypeptide
  humanized sequence
AQVMTQSPSSLSASVGDRVTITCRSSQSVRSNKLAWFQQKPGQPPKRLIYSASNLDYGVPSRFSGSGSGTEFTLTISSLQPEDFATYYCLGYFDSSADIVAFGGGTKVEIK

SEQ ID NO: 4204 - protein, 111 aa, Artificial Sequence
  Description of Artificial Sequence: Synthetic polypeptide
  humanized sequence
AQVMTQSPSSLSASVGDRVTITCRSSQSVRTNKLAWFQQKPGQPPKRLIYSASTLDFGVPSRFSGSGSGTEFTLTISSLQPEDFATYYCLGYFDSPLDIVAFGGGTKVEIK

SEQ ID NO: 4205 - protein, 111 aa, Artificial Sequence
  Description of Artificial Sequence: Synthetic polypeptide
  humanized sequence
AQVMTQSPSSLSASVGDRVTITCRSSQSVRTNKLAWFQQKPGQPPKRLIYSASTLDFGVPSRFSGSGSGTEFTLTISSLQPEDFATYYCAGYFDPHQDVVAFGGGTKVEIK

SEQ ID NO: 4206 - protein, 111 aa, Artificial Sequence
  Description of Artificial Sequence: Synthetic polypeptide
  VL35G4
AQVMTQSPSSLSASVGDRVTITCRSSQSVRTNKLAWFQQKPGQPPKRLIYSASTLDFGVPSRFSGSGSGTEFTLTISSLQPEDFATYYCAGYFEAPADIVAFGGGTKVEIK

SEQ ID NO: 4207 - protein, 111 aa, Artificial Sequence
  Description of Artificial Sequence: Synthetic polypeptide
  VL4G1
AQVMTQSPSSLSASVGDRVTITCRSSQSVRTNKLAWFQQKPGQPPKRLIYSASTLDFGVPSRFSGSGSGTEFTLTISSLQPEDFATYYCLGYFDSPADIVAFGGGTKVEIK

SEQ ID NO: 4208 - protein, 218 aa, Artificial Sequence
  Description of Artificial Sequence: Synthetic polypeptide
DIVLTQSPDSLAVSLGERATISCRASQSVSTSRYSYIHWYQQKPGQPPKLLIKYASNLESGVPSRFSGSGSGTDFTLNIHPLEEEDFATYYCHHSWEIPLTFGQGTKLEIKRTVAAPSVFIFPPSDEQLKSGTASVVCLLNNFYPREAKVQWKVDNALQSGNSQESVTEQDSKDSTYSLSSTLTLSKADYEKHKVYACEVTHQGLSSPVTKSFNRGEC

SEQ ID NO: 4209 - protein, 218 aa, Artificial Sequence
  Description of Artificial Sequence: Synthetic polypeptide
DIVLTQSPDSLAVSLGERATISCRASQSVSTSRYSYIHWYQQKPGQPPKLLIKYASNLESGVPSRFSGSGSGTDFTLNIHPLEPEDFATYYCHHSWEIPLTFGQGTKLEIKRTVAAPSVFIFPPSDEQLKSGTASVVCLLNNFYPREAKVQWKVDNALQSGNSQESVTEQDSKDSTYSLSSTLTLSKADYEKHKVYACEVTHQGLSSPVTKSFNRGEC

SEQ ID NO: 4210 - protein, 218 aa, Artificial Sequence
  Description of Artificial Sequence: Synthetic polypeptide
DIVLTQSPDSLAVSLGERATISCRASQSVSTSRYSYIHWYQQKPGQPPKLLIKYASNLESGVPSRFSGSGSGTDFTLTISSLQPEDFATYYCHHSWEIPLTFGQGTKLEIKRTVAAPSVFIFPPSDEQLKSGTASVVCLLNNFYPREAKVQWKVDNALQSGNSQESVTEQDSKDSTYSLSSTLTLSKADYEKHKVYACEVTHQGLSSPVTKSFNRGEC

SEQ ID NO: 4211 - protein, 218 aa, Artificial Sequence
  Description of Artificial Sequence: Synthetic polypeptide
DIVMTQSPDSLAVSLGERATISCRASQSVSTSRYSYIHWYQQKPGQPPKLLIKYASNLESGVPSRFSGSGSGTDFTLTISSLQPEDFATYYCHHSWEIPLTFGQGTKLEIKRTVAAPSVFIFPPSDEQLKSGTASVVCLLNNFYPREAKVQWKVDNALQSGNSQESVTEQDSKDSTYSLSSTLTLSKADYEKHKVYACEVTHQGLSSPVTKSFNRGEC

SEQ ID NO: 4212 - protein, 112 aa, Mus musculus
DVLMTQTPLSLPVSLGDQASISCRSNQSILHSNGNTYLDWYLQKPGQSPKLLIYKVSNRFSGVPDRFSGSGSGTDFTLRISRVEAEDLGVYYCFQGSHIPWTFGGGTKLEIK

SEQ ID NO: 4213 - protein, 108 aa, Mus musculus
ENVLTQSPAIMSASPGEKVTMTCRASSSVSSSYLHWYQQKSGASPKLWIYSTSNLASGVPARFSGSGSGTSYSLTISSVEAEDAATYYCQQYSGYPRTFGGGTKLEIK

SEQ ID NO: 4214 - DNA, 657 bp, Artificial Sequence
  Description of Artificial Sequence: Synthetic polynucleotide
  humanized
gatatcgtgatgactcagaccccactctcactgtccgtcaccccgggacagcccgcgtcaatctcgtgtaggagctcccaatccctcgaatactcggacggctatacttacctggagtggtacttgcagaagcccggacagagcccgcagcttctgatctacgaagtgtccaacagattctccggcgtgcctgaccgcttttcggggtcgggctccggtactgatttcaccctgaaaatctcccgggtggaagccgaggacgtgggagtctactactgcttccaagccacccacaacccttacaccttcggacaggggaccaagctggagatcaagcggaccgtggccgctccctccgtgttcatcttcccaccctccgacgagcagcttaagtccggcaccgcctccgtcgtgtgcctgctgaacaacttctacccccgcgaggccaaggtgcagtggaaggtggacaacgccctgcagtccggcaactcccaggaatccgtcaccgagcaggactccaaggacagcacctactccctgtcctccaccctgaccctgtccaaggccgactacgagaagcacaaggtgtacgcctgcgaagtgacccaccagggcctgtccagccccgtgaccaagtccttcaaccggggcgagtgc

SEQ ID NO: 4215 - DNA, 330 bp, Artificial Sequence
  Description of Artificial Sequence: Synthetic polynucleotide
  humanized
gatatccaaatgacccagtccccatcctccctgtccgcttctgtcggtgaccgcgtgaccattacttgtcaagccagccagtcggtgtcctcatacctcgcctggtatcagcagaagccgggaaaggcgcccaaacttttgatctacgccgcctcgtacctggcatccggcgtgccgtcaagattcagcgggtcgggctccggaactgacttcaccctgaccatcagcagcctgcagcctgaggactttgccacttactactgccagcagggatacacccggaccgatattgacaacaccttcggcgggggaactaaggtcgaaatcaag

SEQ ID NO: 4216 - DNA, 330 bp, Artificial Sequence
  Description of Artificial Sequence: Synthetic polynucleotide
  humanized
gatatccaaatgacccagtccccatcctccctgtccgcttctgtcggtgaccgcgtgaccattacttgtcaagccagccagtcggtgtcctcatacctcgcctggtatcagcagaagccgggaaaggcgcccaaacttttgatctacgccgcctcgtacctggcatccggcgtgccgtcaagattcagcgggtcgggctccggaactgacttcaccctgaccatcagcagcctgcagcctgaggactttgccacttactactgccagcaggcctacacccggaccgatattgacaacaccttcggcgggggaactaaggtcgaaatcaag

SEQ ID NO: 4217 - DNA, 651 bp, Artificial Sequence
  Description of Artificial Sequence: Synthetic polynucleotide
  humanized
gatatccaaatgacccagtccccatcctccctgtccgcttctgtcggtgaccgcgtgaccattacttgtcaagccagccagtcggtgtcctcatacctcgcctggtatcagcagaagccgggaaaggcgcccaaacttttgatctacgccgcctcgtacctggcatccggcgtgccgtcaagattcagcgggtcgggctccggaactgacttcaccctgaccatcagcagcctgcagcctgaggactttgccacttactactgccagcagggatacacccggaccgatattgacaacaccttcggcgggggaactaaggtcgaaatcaagcggaccgtggccgctccctccgtgttcatcttcccaccctccgacgagcagcttaagtccggcaccgcctccgtcgtgtgcctgctgaacaacttctacccccgcgaggccaaggtgcagtggaaggtggacaacgccctgcagtccggcaactcccaggaatccgtcaccgagcaggactccaaggacagcacctactccctgtcctccaccctgaccctgtccaaggccgactacgagaagcacaaggtgtacgcctgcgaagtgacccaccagggcctgtccagccccgtgaccaagtccttcaaccggggcgagtgc

SEQ ID NO: 4218 - DNA, 651 bp, Artificial Sequence
  Description of Artificial Sequence: Synthetic polynucleotide
  humanized
gatatccaaatgacccagtccccatcctccctgtccgcttctgtcggtgaccgcgtgaccattacttgtcaagccagccagtcggtgtcctcatacctcgcctggtatcagcagaagccgggaaaggcgcccaaacttttgatctacgccgcctcgtacctggcatccggcgtgccgtcaagattcagcgggtcgggctccggaactgacttcaccctgaccatcagcagcctgcagcctgaggactttgccacttactactgccagcaggcctacacccggaccgatattgacaacaccttcggcgggggaactaaggtcgaaatcaagcgtacggtagcggccccatctgtcttcatcttcccgccatctgatgagcagttgaaatctggaactgcctctgttgtgtgcctgctgaataacttctatcccagagaggccaaagtacagtggaaggtggataacgccctccaatcgggtaactcccaggagagtgtcacagagcaggacagcaaggacagcacctacagcctcagcagcaccctgacgctgagcaaagcagactacgagaaacacaaagtctacgcctgcgaagtcacccatcagggcctgagctcgcccgtcacaaagagcttcaacaggggagagtgt

SEQ ID NO: 4219 - protein, 249 aa, Artificial Sequence
  Description of Artificial Sequence: Synthetic polypeptide
  scFv Molecule Generated from Antibody 1G10D2
DVLMTQTPLSLPVSLGDQASISCRSSQSILNSNGNTYLEWYLQKPGQSPKLLIYKVSNRFSGVPDRFSGSGSGTDFTLKISRVEAEDLGVYYCFQGSHVPWTFGGGTKLEIKSSGGGGSGGGGGGSSRSSEVKLVESGGDLVTPGGSLKVSCAASGLTFSDSAMSWVRLTPEKRLEWVASISTGGATYYPDGLKGRFTISRDDARNILFLQMNSLRSEDTAMYYCTRRGVSSGNLFTYWGQGTLVTVSA

SEQ ID NO: 4220 - protein, 277 aa, Artificial Sequence
  Description of Artificial Sequence: Synthetic polypeptide
  scFv Molecule Generated from Antibody 1G10D2
IQEEFKMKKTAIAIAVALAGFATVAQAADVLMTQTPLSLPVSLGDQASISCRSSQSILNSNGNTYLEWYLQKPGQSPKLLIYKVSNRFSGVPDRFSGSGSGTDFTLKISRVEAEDLGVYYCFQGSHVPWTFGGGTKLEIKSSGGGGSGGGGGGSSRSSEVKLVESGGDLVTPGGSLKVSCAASGLTFSDSAMSWVRLTPEKRLEWVASISTGGATYYPDGLKGRFTISRDDARNILFLQMNSLRSEDTAMYYCTRRGVSSGNLFTYWGQGTLVTVSA

SEQ ID NO: 4221 - protein, 264 aa, Artificial Sequence
  Description of Artificial Sequence: Synthetic polypeptide
  scFv Molecule Generated from Antibody 1G10D2
DVLMTQTPLSLPVSLGDQASISCRSSQSILNSNGNTYLEWYLQKPGQSPKLLIYKVSNRFSGVPDRFSGSGSGTDFTLKISRVEAEDLGVYYCFQGSHVPWTFGGGTKLEIKSSGGGGSGGGGGGSSRSSEVKLVESGGDLVTPGGSLKVSCAASGLTFSDSAMSWVRLTPEKRLEWVASISTGGATYYPDGLKGRFTISRDDARNILFLQMNSLRSEDTAMYYCTRRGVSSGNLFTYWGQGTLVTVSAAKTTPPSVTSGQAGQ

SEQ ID NO: 4222 - protein, 255 aa, Artificial Sequence
  Description of Artificial Sequence: Synthetic polypeptide
  scFv Molecule Generated from Antibody 1G10D2
DVLMTQTPLSLPVSLGDQASISCRSSQSILNSNGNTYLEWYLQKPGQSPKLLIYKVSNRFSGVPDRFSGSGSGTDFTLKISRVEAEDLGVYYCFQGSHVPWTFGGGTKLEIKSSGGGGSGGGGGGSSRSSEVKLVESGGDLVTPGGSLKVSCAASGLTFSDSAMSWVRLTPEKRLEWVASISTGGATYYPDGLKGRFTISRDDARNILFLQMNSLRSEDTAMYYCTRRGVSSGNLFTYWGQGTLVTVSAHHHHHH

SEQ ID NO: 4223 - protein, 261 aa, Artificial Sequence
  Description of Artificial Sequence: Synthetic polypeptide
  scFv molecule generated from Antibody 1G10D2
DVLMTQTPLSLPVSLGDQASISCRSSQSILNSNGNTYLEWYLQKPGQSPKLLIYKVSNRFSGVPDRFSGSGSGTDFTLKISRVEAEDLGVYYCFQGSHVPWTFGGGTKLEIKSSGGGGSGGGGGGSSRSSEVKLVESGGDLVTPGGSLKVSCAASGLTFSDSAMSWVRLTPEKRLEWVASISTGGATYYPDGLKGRFTISRDDARNILFLQMNSLRSEDTAMYYCTRRGVSSGNLFTYWGQGTLVTVSAGAYPYDVPDYAS

SEQ ID NO: 4224 - protein, 282 aa, Artificial Sequence
  Description of Artificial Sequence: Synthetic polypeptide
  scFv Molecule Generated from Antibody 1G10D2
DVLMTQTPLSLPVSLGDQASISCRSSQSILNSNGNTYLEWYLQKPGQSPKLLIYKVSNRFSGVPDRFSGSGSGTDFTLKISRVEAEDLGVYYCFQGSHVPWTFGGGTKLEIKSSGGGGSGGGGGGSSRSSEVKLVESGGDLVTPGGSLKVSCAASGLTFSDSAMSWVRLTPEKRLEWVASISTGGATYYPDGLKGRFTISRDDARNILFLQMNSLRSEDTAMYYCTRRGVSSGNLFTYWGQGTLVTVSAAKTTPPSVTSGQAGQHHHHHHGAYPYDVPDYAS

SEQ ID NO: 4225 - protein, 292 aa, Artificial Sequence
  Description of Artificial Sequence: Synthetic polypeptide
  scFv Molecule Generated from Antibody 1G10D2
IQEEFKMKKTAIAIAVALAGFATVAQAADVLMTQTPLSLPVSLGDQASISCRSSQSILNSNGNTYLEWYLQKPGQSPKLLIYKVSNRFSGVPDRFSGSGSGTDFTLKISRVEAEDLGVYYCFQGSHVPWTFGGGTKLEIKSSGGGGSGGGGGGSSRSSEVKLVESGGDLVTPGGSLKVSCAASGLTFSDSAMSWVRLTPEKRLEWVASISTGGATYYPDGLKGRFTISRDDARNILFLQMNSLRSEDTAMYYCTRRGVSSGNLFTYWGQGTLVTVSAAKTTPPSVTSGQAGQ

SEQ ID NO: 4226 - protein, 283 aa, Artificial Sequence
  Description of Artificial Sequence: Synthetic polypeptide
  scFv Molecule Generated from Antibody 1G10D2
IQEEFKMKKTAIAIAVALAGFATVAQAADVLMTQTPLSLPVSLGDQASISCRSSQSILNSNGNTYLEWYLQKPGQSPKLLIYKVSNRFSGVPDRFSGSGSGTDFTLKISRVEAEDLGVYYCFQGSHVPWTFGGGTKLEIKSSGGGGSGGGGGGSSRSSEVKLVESGGDLVTPGGSLKVSCAASGLTFSDSAMSWVRLTPEKRLEWVASISTGGATYYPDGLKGRFTISRDDARNILFLQMNSLRSEDTAMYYCTRRGVSSGNLFTYWGQGTLVTVSAHHHHHH

SEQ ID NO: 4227 - protein, 289 aa, Artificial Sequence
  Description of Artificial Sequence: Synthetic polypeptide
  scFv Molecule Generated from Antibody 1G10D2
IQEEFKMKKTAIAIAVALAGFATVAQAADVLMTQTPLSLPVSLGDQASISCRSSQSILNSNGNTYLEWYLQKPGQSPKLLIYKVSNRFSGVPDRFSGSGSGTDFTLKISRVEAEDLGVYYCFQGSHVPWTFGGGTKLEIKSSGGGGSGGGGGGSSRSSEVKLVESGGDLVTPGGSLKVSCAASGLTFSDSAMSWVRLTPEKRLEWVASISTGGATYYPDGLKGRFTISRDDARNILFLQMNSLRSEDTAMYYCTRRGVSSGNLFTYWGQGTLVTVSAGAYPYDVPDYAS

SEQ ID NO: 4228 - protein, 310 aa, Artificial Sequence
  Description of Artificial Sequence: Synthetic polypeptide
  scFv Molecule Generated from Antibody 1G10D2
IQEEFKMKKTAIAIAVALAGFATVAQAADVLMTQTPLSLPVSLGDQASISCRSSQSILNSNGNTYLEWYLQKPGQSPKLLIYKVSNRFSGVPDRFSGSGSGTDFTLKISRVEAEDLGVYYCFQGSHVPWTFGGGTKLEIKSSGGGGSGGGGGGSSRSSEVKLVESGGDLVTPGGSLKVSCAASGLTFSDSAMSWVRLTPEKRLEWVASISTGGATYYPDGLKGRFTISRDDARNILFLQMNSLRSEDTAMYYCTRRGVSSGNLFTYWGQGTLVTVSAAKTTPPSVTSGQAGQHHHHHHGAYPYDVPDYAS

SEQ ID NO: 4229 - protein, 250 aa, Artificial Sequence
  Description of Artificial Sequence: Synthetic polypeptide
  scFv Molecule Generated from Antibody 1G11A10
DVLMTQTPLSLPVSLGDQASISCRSSQSIINSNGNTYLEWYLQKPGQSPKLLIYKVSNRFSGVPDRFSGSGSGTDFTLKISRVETEDLGIYYCFQGSHVPWTFGGGTKLEIKSSGGGGSGGGGGGSSRSSEVKLVESGGGLMKPGGSLKLSCAASGFTFSSYAMSWVRQSPEKRLEWVASISSGGQTYSPDSVKGRFTISRDNARNILYLQMRNLRSEDTAMYYCASRGDPTMTATLFVYWGQGTLVTVS

SEQ ID NO: 4230 - protein, 278 aa, Artificial Sequence
  Description of Artificial Sequence: Synthetic polypeptide
  scFv Molecule Generated from Antibody 1G11A10
IQEEFKMKKTAIAIAVALAGFATVAQAADVLMTQTPLSLPVSLGDQASISCRSSQSIINSNGNTYLEWYLQKPGQSPKLLIYKVSNRFSGVPDRFSGSGSGTDFTLKISRVETEDLGIYYCFQGSHVPWTFGGGTKLEIKSSGGGGSGGGGGGSSRSSEVKLVESGGGLMKPGGSLKLSCAASGFTFSSYAMSWVRQSPEKRLEWVASISSGGQTYSPDSVKGRFTISRDNARNILYLQMRNLRSEDTAMYYCASRGDPTMTATLFVYWGQGTLVTVS

SEQ ID NO: 4231 - protein, 265 aa, Artificial Sequence
  Description of Artificial Sequence: Synthetic polypeptide
  scFv Molecule Generated from Antibody 1G11A10
DVLMTQTPLSLPVSLGDQASISCRSSQSIINSNGNTYLEWYLQKPGQSPKLLIYKVSNRFSGVPDRFSGSGSGTDFTLKISRVETEDLGIYYCFQGSHVPWTFGGGTKLEIKSSGGGGSGGGGGGSSRSSEVKLVESGGGLMKPGGSLKLSCAASGFTFSSYAMSWVRQSPEKRLEWVASISSGGQTYSPDSVKGRFTISRDNARNILYLQMRNLRSEDTAMYYCASRGDPTMTATLFVYWGQGTLVTVSAKTTPPSVTSGQAGQ

SEQ ID NO: 4232 - protein, 256 aa, Artificial Sequence
  Description of Artificial Sequence: Synthetic polypeptide
  scFv molecule generated from Antibody 1G11A10
DVLMTQTPLSLPVSLGDQASISCRSSQSIINSNGNTYLEWYLQKPGQSPKLLIYKVSNRFSGVPDRFSGSGSGTDFTLKISRVETEDLGIYYCFQGSHVPWTFGGGTKLEIKSSGGGGSGGGGGGSSRSSEVKLVESGGGLMKPGGSLKLSCAASGFTFSSYAMSWVRQSPEKRLEWVASISSGGQTYSPDSVKGRFTISRDNARNILYLQMRNLRSEDTAMYYCASRGDPTMTATLFVYWGQGTLVTVSHHHHHH

SEQ ID NO: 4233 - protein, 262 aa, Artificial Sequence
  Description of Artificial Sequence: Synthetic polypeptide
  scFv Molecule Generated from Antibody 1G11A10
DVLMTQTPLSLPVSLGDQASISCRSSQSIINSNGNTYLEWYLQKPGQSPKLLIYKVSNRFSGVPDRFSGSGSGTDFTLKISRVETEDLGIYYCFQGSHVPWTFGGGTKLEIKSSGGGGSGGGGGGSSRSSEVKLVESGGGLMKPGGSLKLSCAASGFTFSSYAMSWVRQSPEKRLEWVASISSGGQTYSPDSVKGRFTISRDNARNILYLQMRNLRSEDTAMYYCASRGDPTMTATLFVYWGQGTLVTVSGAYPYDVPDYAS

SEQ ID NO: 4234 - protein, 283 aa, Artificial Sequence
  Description of Artificial Sequence: Synthetic polypeptide
  scFv Molecule Generated from Antibody 1G11A10
DVLMTQTPLSLPVSLGDQASISCRSSQSIINSNGNTYLEWYLQKPGQSPKLLIYKVSNRFSGVPDRFSGSGSGTDFTLKISRVETEDLGIYYCFQGSHVPWTFGGGTKLEIKSSGGGGSGGGGGGSSRSSEVKLVESGGGLMKPGGSLKLSCAASGFTFSSYAMSWVRQSPEKRLEWVASISSGGQTYSPDSVKGRFTISRDNARNILYLQMRNLRSEDTAMYYCASRGDPTMTATLFVYWGQGTLVTVSAKTTPPSVTSGQAGQHHHHHHGAYPYDVPDYAS

SEQ ID NO: 4235 - protein, 293 aa, Artificial Sequence
  Description of Artificial Sequence: Synthetic polypeptide
  scFv Molecule Generated from Antibody 1G11A10
IQEEFKMKKTAIAIAVALAGFATVAQAADVLMTQTPLSLPVSLGDQASISCRSSQSIINSNGNTYLEWYLQKPGQSPKLLIYKVSNRFSGVPDRFSGSGSGTDFTLKISRVETEDLGIYYCFQGSHVPWTFGGGTKLEIKSSGGGGSGGGGGGSSRSSEVKLVESGGGLMKPGGSLKLSCAASGFTFSSYAMSWVRQSPEKRLEWVASISSGGQTYSPDSVKGRFTISRDNARNILYLQMRNLRSEDTAMYYCASRGDPTMTATLFVYWGQGTLVTVSAKTTPPSVTSGQAGQ

SEQ ID NO: 4236 - protein, 284 aa, Artificial Sequence
  Description of Artificial Sequence: Synthetic polypeptide
  scFv Molecule Generated from Antibody 1G11A10
IQEEFKMKKTAIAIAVALAGFATVAQAADVLMTQTPLSLPVSLGDQASISCRSSQSIINSNGNTYLEWYLQKPGQSPKLLIYKVSNRFSGVPDRFSGSGSGTDFTLKISRVETEDLGIYYCFQGSHVPWTFGGGTKLEIKSSGGGGSGGGGGGSSRSSEVKLVESGGGLMKPGGSLKLSCAASGFTFSSYAMSWVRQSPEKRLEWVASISSGGQTYSPDSVKGRFTISRDNARNILYLQMRNLRSEDTAMYYCASRGDPTMTATLFVYWGQGTLVTVSHHHHHH

SEQ ID NO: 4237 - protein, 290 aa, Artificial Sequence
  Description of Artificial Sequence: Synthetic polypeptide
  scFv Molecule Generated from Antibody 1G11A10
IQEEFKMKKTAIAIAVALAGFATVAQAADVLMTQTPLSLPVSLGDQASISCRSSQSIINSNGNTYLEWYLQKPGQSPKLLIYKVSNRFSGVPDRFSGSGSGTDFTLKISRVETEDLGIYYCFQGSHVPWTFGGGTKLEIKSSGGGGSGGGGGGSSRSSEVKLVESGGGLMKPGGSLKLSCAASGFTFSSYAMSWVRQSPEKRLEWVASISSGGQTYSPDSVKGRFTISRDNARNILYLQMRNLRSEDTAMYYCASRGDPTMTATLFVYWGQGTLVTVSGAYPYDVPDYAS

SEQ ID NO: 4238 - protein, 311 aa, Artificial Sequence
  Description of Artificial Sequence: Synthetic polypeptide
  scFv Molecule Generated from Antibody 1G11A10
IQEEFKMKKTAIAIAVALAGFATVAQAADVLMTQTPLSLPVSLGDQASISCRSSQSIINSNGNTYLEWYLQKPGQSPKLLIYKVSNRFSGVPDRFSGSGSGTDFTLKISRVETEDLGIYYCFQGSHVPWTFGGGTKLEIKSSGGGGSGGGGGGSSRSSEVKLVESGGGLMKPGGSLKLSCAASGFTFSSYAMSWVRQSPEKRLEWVASISSGGQTYSPDSVKGRFTISRDNARNILYLQMRNLRSEDTAMYYCASRGDPTMTATLFVYWGQGTLVTVSAKTTPPSVTSGQAGQHHHHHHGAYPYDVPDYAS

SEQ ID NO: 4239 - protein, 238 aa, Mus musculus
DIQMNQSPSSLSASLGDTITISCHASQNINVWLSWYQQKPGNIPKLLIFEASTLYTGVPSRFSGSGSGTGFTLTISSLQPEDIATYYCQQGQSYPWTFGGGTKLEIKRSSGGGGSGGGGGGSSRSSVQLQQSGAELVQPGASVKLSCTASGFNIKDTSMHWVRQRPEQGLEWIGRIAPANGNTKYDPKFQGKATITTDTSSNTAYLQLSSLTSEDTAVYYCSGSGNYDWGQGTTLTVS

SEQ ID NO: 4240 - protein, 251 aa, Artificial Sequence
  Description of Artificial Sequence: Synthetic polypeptide
  scFv Molecule Generated Antibody 5B3C11 (VL1)
DVLMTQTPLSLPVSLGDQASISCRSNQSILHSNGNTYLDWYLQKPGQSPKLLIYKVSNRFSGVPDRFSGSGSGTDFTLRISRVEAEDLGVYYCFQGSHIPWTFGGGTKLEIKSSGGGGSGGGGGGSSRSSEVQLVESGGGLVKPGGSLKLSCAASGFTFSNYALSWVRQTPEKRLEWVASISSGGNTYYPDSVKGRFTISRDNARNILYLQMSSLRSEDTAMFYCTSRGDTTLITTLFTYWGQGTLVTVSA

SEQ ID NO: 4241 - protein, 279 aa, Artificial Sequence
  Description of Artificial Sequence: Synthetic polypeptide
  scFv Molecule Generated Antibody 5B3C11 (VL1)
IQEEFKMKKTAIAIAVALAGFATVAQAADVLMTQTPLSLPVSLGDQASISCRSNQSILHSNGNTYLDWYLQKPGQSPKLLIYKVSNRFSGVPDRFSGSGSGTDFTLRISRVEAEDLGVYYCFQGSHIPWTFGGGTKLEIKSSGGGGSGGGGGGSSRSSEVQLVESGGGLVKPGGSLKLSCAASGFTFSNYALSWVRQTPEKRLEWVASISSGGNTYYPDSVKGRFTISRDNARNILYLQMSSLRSEDTAMFYCTSRGDTTLITTLFTYWGQGTLVTVSA

SEQ ID NO: 4242 - protein, 266 aa, Artificial Sequence
  Description of Artificial Sequence: Synthetic polypeptide
  scFv Molecule Generated Antibody 5B3C11 (VL1)
DVLMTQTPLSLPVSLGDQASISCRSNQSILHSNGNTYLDWYLQKPGQSPKLLIYKVSNRFSGVPDRFSGSGSGTDFTLRISRVEAEDLGVYYCFQGSHIPWTFGGGTKLEIKSSGGGGSGGGGGGSSRSSEVQLVESGGGLVKPGGSLKLSCAASGFTFSNYALSWVRQTPEKRLEWVASISSGGNTYYPDSVKGRFTISRDNARNILYLQMSSLRSEDTAMFYCTSRGDTTLITTLFTYWGQGTLVTVSAAKTTPPSVTSGQAGQ

SEQ ID NO: 4243 - protein, 257 aa, Artificial Sequence
  Description of Artificial Sequence: Synthetic polypeptide
  scFv Molecule Generated Antibody 5B3C11 (VL1)
DVLMTQTPLSLPVSLGDQASISCRSNQSILHSNGNTYLDWYLQKPGQSPKLLIYKVSNRFSGVPDRFSGSGSGTDFTLRISRVEAEDLGVYYCFQGSHIPWTFGGGTKLEIKSSGGGGSGGGGGGSSRSSEVQLVESGGGLVKPGGSLKLSCAASGFTFSNYALSWVRQTPEKRLEWVASISSGGNTYYPDSVKGRFTISRDNARNILYLQMSSLRSEDTAMFYCTSRGDTTLITTLFTYWGQGTLVTVSAHHHHHH

SEQ ID NO: 4244 - protein, 263 aa, Artificial Sequence
  Description of Artificial Sequence: Synthetic polypeptide
  scFv Molecule Generated Antibody 5B3C11 (VL1)
DVLMTQTPLSLPVSLGDQASISCRSNQSILHSNGNTYLDWYLQKPGQSPKLLIYKVSNRFSGVPDRFSGSGSGTDFTLRISRVEAEDLGVYYCFQGSHIPWTFGGGTKLEIKSSGGGGSGGGGGGSSRSSEVQLVESGGGLVKPGGSLKLSCAASGFTFSNYALSWVRQTPEKRLEWVASISSGGNTYYPDSVKGRFTISRDNARNILYLQMSSLRSEDTAMFYCTSRGDTTLITTLFTYWGQGTLVTVSAGAYPYDVPDYAS

SEQ ID NO: 4245 - protein, 284 aa, Artificial Sequence
  Description of Artificial Sequence: Synthetic polypeptide
  scFv Molecule Generated Antibody 5B3C11 (VL1)
DVLMTQTPLSLPVSLGDQASISCRSNQSILHSNGNTYLDWYLQKPGQSPKLLIYKVSNRFSGVPDRFSGSGSGTDFTLRISRVEAEDLGVYYCFQGSHIPWTFGGGTKLEIKSSGGGGSGGGGGGSSRSSEVQLVESGGGLVKPGGSLKLSCAASGFTFSNYALSWVRQTPEKRLEWVASISSGGNTYYPDSVKGRFTISRDNARNILYLQMSSLRSEDTAMFYCTSRGDTTLITTLFTYWGQGTLVTVSAAKTTPPSVTSGQAGQHHHHHHGAYPYDVPDYAS

SEQ ID NO: 4246 - protein, 294 aa, Artificial Sequence
  Description of Artificial Sequence: Synthetic polypeptide
  scFv Molecule Generated Antibody 5B3C11 (VL1)
IQEEFKMKKTAIAIAVALAGFATVAQAADVLMTQTPLSLPVSLGDQASISCRSNQSILHSNGNTYLDWYLQKPGQSPKLLIYKVSNRFSGVPDRFSGSGSGTDFTLRISRVEAEDLGVYYCFQGSHIPWTFGGGTKLEIKSSGGGGSGGGGGGSSRSSEVQLVESGGGLVKPGGSLKLSCAASGFTFSNYALSWVRQTPEKRLEWVASISSGGNTYYPDSVKGRFTISRDNARNILYLQMSSLRSEDTAMFYCTSRGDTTLITTLFTYWGQGTLVTVSAAKTTPPSVTSGQAGQ

SEQ ID NO: 4247 - protein, 285 aa, Artificial Sequence
  Description of Artificial Sequence: Synthetic polypeptide
  scFv Molecule Generated Antibody 5B3C11 (VL1)
IQEEFKMKKTAIAIAVALAGFATVAQAADVLMTQTPLSLPVSLGDQASISCRSNQSILHSNGNTYLDWYLQKPGQSPKLLIYKVSNRFSGVPDRFSGSGSGTDFTLRISRVEAEDLGVYYCFQGSHIPWTFGGGTKLEIKSSGGGGSGGGGGGSSRSSEVQLVESGGGLVKPGGSLKLSCAASGFTFSNYALSWVRQTPEKRLEWVASISSGGNTYYPDSVKGRFTISRDNARNILYLQMSSLRSEDTAMFYCTSRGDTTLITTLFTYWGQGTLVTVSAHHHHHH

SEQ ID NO: 4248 - protein, 291 aa, Artificial Sequence
  Description of Artificial Sequence: Synthetic polypeptide
  scFv Molecule Generated Antibody 5B3C11 (VL1)
IQEEFKMKKTAIAIAVALAGFATVAQAADVLMTQTPLSLPVSLGDQASISCRSNQSILHSNGNTYLDWYLQKPGQSPKLLIYKVSNRFSGVPDRFSGSGSGTDFTLRISRVEAEDLGVYYCFQGSHIPWTFGGGTKLEIKSSGGGGSGGGGGGSSRSSEVQLVESGGGLVKPGGSLKLSCAASGFTFSNYALSWVRQTPEKRLEWVASISSGGNTYYPDSVKGRFTISRDNARNILYLQMSSLRSEDTAMFYCTSRGDTTLITTLFTYWGQGTLVTVSAGAYPYDVPDYAS

SEQ ID NO: 4249 - protein, 312 aa, Artificial Sequence
  Description of Artificial Sequence: Synthetic polypeptide
  scFv Molecule Generated Antibody 5B3C11 (VL1)
IQEEFKMKKTAIAIAVALAGFATVAQAADVLMTQTPLSLPVSLGDQASISCRSNQSILHSNGNTYLDWYLQKPGQSPKLLIYKVSNRFSGVPDRFSGSGSGTDFTLRISRVEAEDLGVYYCFQGSHIPWTFGGGTKLEIKSSGGGGSGGGGGGSSRSSEVQLVESGGGLVKPGGSLKLSCAASGFTFSNYALSWVRQTPEKRLEWVASISSGGNTYYPDSVKGRFTISRDNARNILYLQMSSLRSEDTAMFYCTSRGDTTLITTLFTYWGQGTLVTVSAAKTTPPSVTSGQAGQHHHHHHGAYPYDVPDYAS

SEQ ID NO: 4250 - protein, 247 aa, Artificial Sequence
  Description of Artificial Sequence: Synthetic polypeptide
  scFv Molecule Generated Antibody 5B3C11 (VL2)
ENVLTQSPAIMSASPGEKVTMTCRASSSVSSSYLHWYQQKSGASPKLWIYSTSNLASGVPARFSGSGSGTSYSLTISSVEAEDAATYYCQQYSGYPRTFGGGTKLEIKSSGGGGSGGGGGGSSRSSEVQLVESGGGLVKPGGSLKLSCAASGFTFSNYALSWVRQTPEKRLEWVASISSGGNTYYPDSVKGRFTISRDNARNILYLQMSSLRSEDTAMFYCTSRGDTTLITTLFTYWGQGTLVTVSA

SEQ ID NO: 4251 - protein, 275 aa, Artificial Sequence
  Description of Artificial Sequence: Synthetic polypeptide
  scFv Molecule Generated Antibody 5B3C11 (VL2)
IQEEFKMKKTAIAIAVALAGFATVAQAAENVLTQSPAIMSASPGEKVTMTCRASSSVSSSYLHWYQQKSGASPKLWIYSTSNLASGVPARFSGSGSGTSYSLTISSVEAEDAATYYCQQYSGYPRTFGGGTKLEIKSSGGGGSGGGGGGSSRSSEVQLVESGGGLVKPGGSLKLSCAASGFTFSNYALSWVRQTPEKRLEWVASISSGGNTYYPDSVKGRFTISRDNARNILYLQMSSLRSEDTAMFYCTSRGDTTLITTLFTYWGQGTLVTVSA

SEQ ID NO: 4252 - protein, 262 aa, Artificial Sequence
  Description of Artificial Sequence: Synthetic polypeptide
  scFv Molecule Generated Antibody 5B3C11 (VL2)
ENVLTQSPAIMSASPGEKVTMTCRASSSVSSSYLHWYQQKSGASPKLWIYSTSNLASGVPARFSGSGSGTSYSLTISSVEAEDAATYYCQQYSGYPRTFGGGTKLEIKSSGGGGSGGGGGGSSRSSEVQLVESGGGLVKPGGSLKLSCAASGFTFSNYALSWVRQTPEKRLEWVASISSGGNTYYPDSVKGRFTISRDNARNILYLQMSSLRSEDTAMFYCTSRGDTTLITTLFTYWGQGTLVTVSAAKTTPPSVTSGQAGQ

SEQ ID NO: 4253 - protein, 253 aa, Artificial Sequence
  Description of Artificial Sequence: Synthetic polypeptide
  scFv Molecule Generated Antibody 5B3C11 (VL2)
ENVLTQSPAIMSASPGEKVTMTCRASSSVSSSYLHWYQQKSGASPKLWIYSTSNLASGVPARFSGSGSGTSYSLTISSVEAEDAATYYCQQYSGYPRTFGGGTKLEIKSSGGGGSGGGGGGSSRSSEVQLVESGGGLVKPGGSLKLSCAASGFTFSNYALSWVRQTPEKRLEWVASISSGGNTYYPDSVKGRFTISRDNARNILYLQMSSLRSEDTAMFYCTSRGDTTLITTLFTYWGQGTLVTVSAHHHHHH

SEQ ID NO: 4254 - protein, 259 aa, Artificial Sequence
  Description of Artificial Sequence: Synthetic polypeptide
  scFv Molecule Generated Antibody 5B3C11 (VL2)
ENVLTQSPAIMSASPGEKVTMTCRASSSVSSSYLHWYQQKSGASPKLWIYSTSNLASGVPARFSGSGSGTSYSLTISSVEAEDAATYYCQQYSGYPRTFGGGTKLEIKSSGGGGSGGGGGGSSRSSEVQLVESGGGLVKPGGSLKLSCAASGFTFSNYALSWVRQTPEKRLEWVASISSGGNTYYPDSVKGRFTISRDNARNILYLQMSSLRSEDTAMFYCTSRGDTTLITTLFTYWGQGTLVTVSAGAYPYDVPDYAS

SEQ ID NO: 4255 - protein, 280 aa, Artificial Sequence
  Description of Artificial Sequence: Synthetic polypeptide
  scFv Molecule Generated Antibody 5B3C11 (VL2)
ENVLTQSPAIMSASPGEKVTMTCRASSSVSSSYLHWYQQKSGASPKLWIYSTSNLASGVPARFSGSGSGTSYSLTISSVEAEDAATYYCQQYSGYPRTFGGGTKLEIKSSGGGGSGGGGGGSSRSSEVQLVESGGGLVKPGGSLKLSCAASGFTFSNYALSWVRQTPEKRLEWVASISSGGNTYYPDSVKGRFTISRDNARNILYLQMSSLRSEDTAMFYCTSRGDTTLITTLFTYWGQGTLVTVSAAKTTPPSVTSGQAGQHHHHHHGAYPYDVPDYAS

SEQ ID NO: 4256 - protein, 290 aa, Artificial Sequence
  Description of Artificial Sequence: Synthetic polypeptide
  scFv Molecule Generated Antibody 5B3C11 (VL2)
IQEEFKMKKTAIAIAVALAGFATVAQAAENVLTQSPAIMSASPGEKVTMTCRASSSVSSSYLHWYQQKSGASPKLWIYSTSNLASGVPARFSGSGSGTSYSLTISSVEAEDAATYYCQQYSGYPRTFGGGTKLEIKSSGGGGSGGGGGGSSRSSEVQLVESGGGLVKPGGSLKLSCAASGFTFSNYALSWVRQTPEKRLEWVASISSGGNTYYPDSVKGRFTISRDNARNILYLQMSSLRSEDTAMFYCTSRGDTTLITTLFTYWGQGTLVTVSAAKTTPPSVTSGQAGQ

SEQ ID NO: 4257 - protein, 281 aa, Artificial Sequence
  Description of Artificial Sequence: Synthetic polypeptide
  scFv Molecule Generated Antibody 5B3C11 (VL2)
IQEEFKMKKTAIAIAVALAGFATVAQAAENVLTQSPAIMSASPGEKVTMTCRASSSVSSSYLHWYQQKSGASPKLWIYSTSNLASGVPARFSGSGSGTSYSLTISSVEAEDAATYYCQQYSGYPRTFGGGTKLEIKSSGGGGSGGGGGGSSRSSEVQLVESGGGLVKPGGSLKLSCAASGFTFSNYALSWVRQTPEKRLEWVASISSGGNTYYPDSVKGRFTISRDNARNILYLQMSSLRSEDTAMFYCTSRGDTTLITTLFTYWGQGTLVTVSAHHHHHH

SEQ ID NO: 4258 - protein, 287 aa, Artificial Sequence
  Description of Artificial Sequence: Synthetic polypeptide
  scFv Molecule Generated Antibody 5B3C11 (VL2)
IQEEFKMKKTAIAIAVALAGFATVAQAAENVLTQSPAIMSASPGEKVTMTCRASSSVSSSYLHWYQQKSGASPKLWIYSTSNLASGVPARFSGSGSGTSYSLTISSVEAEDAATYYCQQYSGYPRTFGGGTKLEIKSSGGGGSGGGGGGSSRSSEVQLVESGGGLVKPGGSLKLSCAASGFTFSNYALSWVRQTPEKRLEWVASISSGGNTYYPDSVKGRFTISRDNARNILYLQMSSLRSEDTAMFYCTSRGDTTLITTLFTYWGQGTLVTVSAGAYPYDVPDYAS

SEQ ID NO: 4259 - protein, 308 aa, Artificial Sequence
  Description of Artificial Sequence: Synthetic polypeptide
  scFv Molecule Generated Antibody 5B3C11 (VL2)
IQEEFKMKKTAIAIAVALAGFATVAQAAENVLTQSPAIMSASPGEKVTMTCRASSSVSSSYLHWYQQKSGASPKLWIYSTSNLASGVPARFSGSGSGTSYSLTISSVEAEDAATYYCQQYSGYPRTFGGGTKLEIKSSGGGGSGGGGGGSSRSSEVQLVESGGGLVKPGGSLKLSCAASGFTFSNYALSWVRQTPEKRLEWVASISSGGNTYYPDSVKGRFTISRDNARNILYLQMSSLRSEDTAMFYCTSRGDTTLITTLFTYWGQGTLVTVSAAKTTPPSVTSGQAGQHHHHHHGAYPYDVPDYAS

SEQ ID NO: 4260 - protein, 251 aa, Artificial Sequence
  Description of Artificial Sequence: Synthetic polypeptide
  scFv Molecule Generated from Antibody 5G2A3
DVLMTQTPLSLPVSLGDQASISCRSSQSILHRNGNTYLDWFLLKPGQSPKLLIYKVSNRFSGVPDRFSGSGSGTDFTLKISRVEAEDLGVYYCFQGSHVPWTFGGGTKLEIKSSGGGGSGGGGGGSSRSSEVKLVESGGGLVKPGGSLTLSCAASGFTFSSYAMSWVRQTPEKSLEWVASISSGGNTFYPDTVKGRFTISRDNARNILYLQMSGLRSEDTAIYYCARRGDPNMITTLFGYWGQGTLVTISA

SEQ ID NO: 4261 - protein, 279 aa, Artificial Sequence
  Description of Artificial Sequence: Synthetic polypeptide
  scFv Molecule Generated from Antibody 5G2A3
IQEEFKMKKTAIAIAVALAGFATVAQAADVLMTQTPLSLPVSLGDQASISCRSSQSILHRNGNTYLDWFLLKPGQSPKLLIYKVSNRFSGVPDRFSGSGSGTDFTLKISRVEAEDLGVYYCFQGSHVPWTFGGGTKLEIKSSGGGGSGGGGGGSSRSSEVKLVESGGGLVKPGGSLTLSCAASGFTFSSYAMSWVRQTPEKSLEWVASISSGGNTFYPDTVKGRFTISRDNARNILYLQMSGLRSEDTAIYYCARRGDPNMITTLFGYWGQGTLVTISA

SEQ ID NO: 4262 - protein, 266 aa, Artificial Sequence
  Description of Artificial Sequence: Synthetic polypeptide
  scFv Molecule Generated from Antibody 5G2A3
DVLMTQTPLSLPVSLGDQASISCRSSQSILHRNGNTYLDWFLLKPGQSPKLLIYKVSNRFSGVPDRFSGSGSGTDFTLKISRVEAEDLGVYYCFQGSHVPWTFGGGTKLEIKSSGGGGSGGGGGGSSRSSEVKLVESGGGLVKPGGSLTLSCAASGFTFSSYAMSWVRQTPEKSLEWVASISSGGNTFYPDTVKGRFTISRDNARNILYLQMSGLRSEDTAIYYCARRGDPNMITTLFGYWGQGTLVTISAAKTTPPSVTSGQAGQ

SEQ ID NO: 4263 - protein, 257 aa, Artificial Sequence
  Description of Artificial Sequence: Synthetic polypeptide
  scFv Molecule Generated from Antibody 5G2A3
DVLMTQTPLSLPVSLGDQASISCRSSQSILHRNGNTYLDWFLLKPGQSPKLLIYKVSNRFSGVPDRFSGSGSGTDFTLKISRVEAEDLGVYYCFQGSHVPWTFGGGTKLEIKSSGGGGSGGGGGGSSRSSEVKLVESGGGLVKPGGSLTLSCAASGFTFSSYAMSWVRQTPEKSLEWVASISSGGNTFYPDTVKGRFTISRDNARNILYLQMSGLRSEDTAIYYCARRGDPNMITTLFGYWGQGTLVTISAHHHHHH

SEQ ID NO: 4264 - protein, 263 aa, Artificial Sequence
  Description of Artificial Sequence: Synthetic polypeptide
  scFv Molecule Generated from Antibody 5G2A3
DVLMTQTPLSLPVSLGDQASISCRSSQSILHRNGNTYLDWFLLKPGQSPKLLIYKVSNRFSGVPDRFSGSGSGTDFTLKISRVEAEDLGVYYCFQGSHVPWTFGGGTKLEIKSSGGGGSGGGGGGSSRSSEVKLVESGGGLVKPGGSLTLSCAASGFTFSSYAMSWVRQTPEKSLEWVASISSGGNTFYPDTVKGRFTISRDNARNILYLQMSGLRSEDTAIYYCARRGDPNMITTLFGYWGQGTLVTISAGAYPYDVPDYAS

SEQ ID NO: 4265 - protein, 284 aa, Artificial Sequence
  Description of Artificial Sequence: Synthetic polypeptide
  scFv Molecule Generated from Antibody 5G2A3
DVLMTQTPLSLPVSLGDQASISCRSSQSILHRNGNTYLDWFLLKPGQSPKLLIYKVSNRFSGVPDRFSGSGSGTDFTLKISRVEAEDLGVYYCFQGSHVPWTFGGGTKLEIKSSGGGGSGGGGGGSSRSSEVKLVESGGGLVKPGGSLTLSCAASGFTFSSYAMSWVRQTPEKSLEWVASISSGGNTFYPDTVKGRFTISRDNARNILYLQMSGLRSEDTAIYYCARRGDPNMITTLFGYWGQGTLVTISAAKTTPPSVTSGQAGQHHHHHHGAYPYDVPDYAS

SEQ ID NO: 4266 - protein, 294 aa, Artificial Sequence
  Description of Artificial Sequence: Synthetic polypeptide
  scFv Molecule Generated from Antibody 5G2A3
IQEEFKMKKTAIAIAVALAGFATVAQAADVLMTQTPLSLPVSLGDQASISCRSSQSILHRNGNTYLDWFLLKPGQSPKLLIYKVSNRFSGVPDRFSGSGSGTDFTLKISRVEAEDLGVYYCFQGSHVPWTFGGGTKLEIKSSGGGGSGGGGGGSSRSSEVKLVESGGGLVKPGGSLTLSCAASGFTFSSYAMSWVRQTPEKSLEWVASISSGGNTFYPDTVKGRFTISRDNARNILYLQMSGLRSEDTAIYYCARRGDPNMITTLFGYWGQGTLVTISAAKTTPPSVTSGQAGQ

SEQ ID NO: 4267 - protein, 285 aa, Artificial Sequence
  Description of Artificial Sequence: Synthetic polypeptide
  scFv Molecule Generated from Antibody 5G2A3
IQEEFKMKKTAIAIAVALAGFATVAQAADVLMTQTPLSLPVSLGDQASISCRSSQSILHRNGNTYLDWFLLKPGQSPKLLIYKVSNRFSGVPDRFSGSGSGTDFTLKISRVEAEDLGVYYCFQGSHVPWTFGGGTKLEIKSSGGGGSGGGGGGSSRSSEVKLVESGGGLVKPGGSLTLSCAASGFTFSSYAMSWVRQTPEKSLEWVASISSGGNTFYPDTVKGRFTISRDNARNILYLQMSGLRSEDTAIYYCARRGDPNMITTLFGYWGQGTLVTISAHHHHHH

SEQ ID NO: 4268 - protein, 291 aa, Artificial Sequence
  Description of Artificial Sequence: Synthetic polypeptide
  scFv Molecule Generated from Antibody 5G2A3
IQEEFKMKKTAIAIAVALAGFATVAQAADVLMTQTPLSLPVSLGDQASISCRSSQSILHRNGNTYLDWFLLKPGQSPKLLIYKVSNRFSGVPDRFSGSGSGTDFTLKISRVEAEDLGVYYCFQGSHVPWTFGGGTKLEIKSSGGGGSGGGGGGSSRSSEVKLVESGGGLVKPGGSLTLSCAASGFTFSSYAMSWVRQTPEKSLEWVASISSGGNTFYPDTVKGRFTISRDNARNILYLQMSGLRSEDTAIYYCARRGDPNMITTLFGYWGQGTLVTISAGAYPYDVPDYAS

SEQ ID NO: 4269 - protein, 312 aa, Artificial Sequence
  Description of Artificial Sequence: Synthetic polypeptide
  scFv Molecule Generated from Antibody 5G2A3
IQEEFKMKKTAIAIAVALAGFATVAQAADVLMTQTPLSLPVSLGDQASISCRSSQSILHRNGNTYLDWFLLKPGQSPKLLIYKVSNRFSGVPDRFSGSGSGTDFTLKISRVEAEDLGVYYCFQGSHVPWTFGGGTKLEIKSSGGGGSGGGGGGSSRSSEVKLVESGGGLVKPGGSLTLSCAASGFTFSSYAMSWVRQTPEKSLEWVASISSGGNTFYPDTVKGRFTISRDNARNILYLQMSGLRSEDTAIYYCARRGDPNMITTLFGYWGQGTLVTISAAKTTPPSVTSGQAGQHHHHHHGAYPYDVPDYAS

SEQ ID NO: 4270 - DNA, 130 bp, Artificial Sequence
  Description of Artificial Sequence: Synthetic polynucleotide
ctgcgcgctcgctcgctcactgaggccgcccgggcaaagcccgggcgtcgggcgacctttggtcgcccggcctcagtgagcgagcgagcgcgcagagagggagtggccaactccatcactaggggttcct

SEQ ID NO: 4271 - DNA, 652 bp, Artificial Sequence
  Description of Artificial Sequence: Synthetic polynucleotide
ctagtcgacattgattattgactagttattaatagtaatcaattacggggtcattagttcatagcccatatatggagttccgcgttacataacttacggtaaatggcccgcctggctgaccgcccaacgacccccgcccattgacgtcaataatgacgtatgttcccatagtaacgccaatagggactttccattgacgtcaatgggtggagtatttacggtaaactgcccacttggcagtacatcaagtgtatcatatgccaagtacgccccctattgacgtcaatgacggtaaatggcccgcctggcattatgcccagtacatgaccttatgggactttcctacttggcagtacatctacgtattagtcatcgctattaccatgtcgaggccacgttctgcttcactctccccatctcccccccctccccacccccaattttgtatttatttattttttaattattttgtgcagcgatgggggcggggggggggggcgcgcgccaggcggggcggggcggggcgaggggcggggcggggcgaggcggagaggtgcggcggcagccaatcagagcggcgcgctccgaaagtttccttttatggcgaggcggcggcggcggcggccctataaaaagcgaagcgcgcggcggg

SEQ ID NO: 4272 - DNA, 172 bp, Artificial Sequence
  Description of Artificial Sequence: Synthetic polynucleotide
gaactgaaaaaccagaaagttaactggtaagtttagtctttttgtcttttatttcaggtcccggatccggtggtggtgcaaatcaaagaactgctcctcagtggatgttgcctttacttctaggcctgtacggaagtgttacttctgctctaaaagctgcggaattgtaccc

SEQ ID NO: 4273 - DNA, 127 bp, Artificial Sequence
  Description of Artificial Sequence: Synthetic polynucleotide
gatctttttccctctgccaaaaattatggggacatcatgaagccccttgagcatctgacttctggctaataaaggaaatttattttcattgcaatagtgtgttggaattttttgtgtctctcactcg

SEQ ID NO: 4274 - DNA, 130 bp, Artificial Sequence
  Description of Artificial Sequence: Synthetic polynucleotide
aggaacccctagtgatggagttggccactccctctctgcgcgctcgctcgctcactgaggccgggcgaccaaaggtcgcccgacgcccgggctttgcccgggcggcctcagtgagcgagcgagcgcgcag

SEQ ID NO: 4275 - DNA, 2821 bp, Artificial Sequence
  Description of Artificial Sequence: Synthetic polynucleotide
ccttaattaacctaattcactggccgtcgttttacaacgtcgtgactgggaaaaccctggcgttacccaacttaatcgccttgcagcacatccccctttcgccagctggcgtaatagcgaagaggcccgcaccgatcgcccttcccaacagttgcgcagcctgaatggcgaatgggacgcgccctgtagcggcgcattaagcgcggcgggtgtggtggttacgcgcagcgtgaccgctacacttgccagcgccctagcgcccgctcctttcgctttcttcccttcctttctcgccacgttcgccggctttccccgtcaagctctaaatcgggggctccctttagggttccgatttagtgctttacggcacctcgaccccaaaaaacttgattagggtgatggttcacgtagtgggccatcgccctgatagacggtttttcgccctttgacgttggagtccacgttctttaatagtggactcttgttccaaactggaacaacactcaaccctatctcggtctattcttttgatttataagggattttgccgatttcggcctattggttaaaaaatgagctgatttaacaaaaatttaacgcgaattttaacaaaatattaacgcttacaatttaggtggcacttttcggggaaatgtgcgcggaacccctatttgtttatttttctaaatacattcaaatatgtatccgctcatgagacaataaccctgataaatgcttcaataatattgaaaaaggaagagtatgagtattcaacatttccgtgtcgcccttattcccttttttgcggcattttgccttcctgtttttgctcacccagaaacgctggtgaaagtaaaagatgctgaagatcagttgggtgcacgagtgggttacatcgaactggatctcaacagcggtaagatccttgagagttttcgccccgaagaacgttttccaatgatgagcacttttaaagttctgctatgtggcgcggtattatcccgtattgacgccgggcaagagcaactcggtcgccgcatacactattctcagaatgacttggttgagtactcaccagtcacagaaaagcatcttacggatggcatgacagtaagagaattatgcagtgctgccataaccatgagtgataacactgcggccaacttacttctgacaacgatcggaggaccgaaggagctaaccgcttttttgcacaacatgggggatcatgtaactcgccttgatcgttgggaaccggagctgaatgaagccataccaaacgacgagcgtgacaccacgatgcctgtagcaatggcaacaacgttgcgcaaactattaactggcgaactacttactctagcttcccggcaacaattaatagactggatggaggcggataaagttgcaggaccacttctgcgctcggcccttccggctggctggtttattgctgataaatctggagccggtgagcgtgggtctcgcggtatcattgcagcactggggccagatggtaagccctcccgtatcgtagttatctacacgacggggagtcaggcaactatggatgaacgaaatagacagatcgctgagataggtgcctcactgattaagcattggtaactgtcagaccaagtttactcatatatactttagattgatttaaaacttcatttttaatttaaaaggatctaggtgaagatcctttttgataatctcatgaccaaaatcccttaacgtgagttttcgttccactgagcgtcagaccccgtagaaaagatcaaaggatcttcttgagatcctttttttctgcgcgtaatctgctgcttgcaaacaaaaaaaccaccgctaccagcggtggtttgtttgccggatcaagagctaccaactctttttccgaaggtaactggcttcagcagagcgcagataccaaatactgttcttctagtgtagccgtagttaggccaccacttcaagaactctgtagcaccgcctacatacctcgctctgctaatcctgttaccagtggctgctgccagtggcgataagtcgtgtcttaccgggttggactcaagacgatagttaccggataaggcgcagcggtcgggctgaacggggggttcgtgcacacagcccagcttggagcgaacgacctacaccgaactgagatacctacagcgtgagctatgagaaagcgccacgcttcccgaagggagaaaggcggacaggtatccggtaagcggcagggtcggaacaggagagcgcacgagggagcttccagggggaaacgcctggtatctttatagtcctgtcgggtttcgccacctctgacttgagcgtcgatttttgtgatgctcgtcaggggggcggagcctatggaaaaacgccagcaacgcggcctttttacggttcctggccttttgctggccttttgctcacatgttctttcctgcgttatcccctgattctgtggataaccgtattaccgcctttgagtgagctgataccgctcgccgcagccgaacgaccgagcgcagcgagtcagtgagcgaggaagcggaagagcgcccaatacgcaaaccgcctctccccgcgcgttggccgattcattaatgcagctggcacgacaggtttcccgactggaaagcgggcagtgagcgcaacgcaattaatgtgagttagctcactcattaggcaccccaggctttacactttatgcttccggctcgtatgttgtgtggaattgtgagcggataacaatttcacacaggaaacagctatgaccatgattacgccagatttaattaaggccttaattagg

SEQ ID NO: 4276 - DNA, 2720 bp, Artificial Sequence
  Description of Artificial Sequence: Synthetic polynucleotide
atggaatggacctgggtctttctcttcctcctgtcagtaactgcaggtgtccactcccaggttcagctgcagcagtctggagctgagctgatgaagcctggggcctcagtgaagatatcctgcaaggctactggctacacattcagtaactactggatagagtgggtaaagcagaggcctggacatggccttgagtggattggagagattttacctggaagtgatagtattaagtacaatgagaatttcaagggcaaggccacattcactgcagatacatcctccaacacagcctacatgcaactcagcagcctgacatctgaggactctgccgtctattactgtgcaagaagggggaactacccagactactggggccaaggcaccactctcacagtctcctcagccaaaacgacacccccatctgtctatccactggcccctggatctgctgcccaaactaactccatggtgaccctgggatgcctggtcaagggctatttccctgagccagtgacagtgacctggaactctggatccctgtccagcggtgtgcacaccttcccagctgtcctgcagtctgacctctacactctgagcagctcagtgactgtcccctccagcacctggcccagcgagaccgtcacctgcaacgttgcccacccggccagcagcaccaaggtggacaagaaaattgtgcccagggattgtggttgtaagccttgcatatgtacagtcccagaagtatcatctgtcttcatcttccccccaaagcccaaggatgtgctcaccattactctgactcctaaggtcacgtgtgttgtggtagacatcagcaaggatgatcccgaggtccagttcagctggtttgtagatgatgtggaggtgcacacagctcagacgcaaccccgggaggagcagttcaacagcactttccgctcagtcagtgaacttcccatcatgcaccaggactggctcaatggcaaggagttcaaatgcagggtcaacagtgcagctttccctgcccccatcgagaaaaccatctccaaaaccaaaggcagaccgaaggctccacaggtgtacaccattccacctcccaaggagcagatggccaaggataaagtcagtctgacctgcatgataacagacttcttccctgaagacattactgtggagtggcagtggaatgggcagccagcggagaactacaagaacactcagcccatcatggacacagatggctcttacttcgtctacagcaagctcaatgtgcagaagagcaactgggaggcaggaaatactttcacctgctctgtgttacatgagggcctgcacaaccaccatactgagaagagcctctcccactctcctggttagtaacgaattccgcccctctcccccccccccctctccctcccccccccctaacgttactggccgaagccgcttggaataaggccggtgtgcgtttgtctatatgttattttccaccatattgccgtcttttggcaatgtgagggcccggaaacctggccctgtcttcttgacgagcattcctaggggtctttcccctctcgccaaaggaatgcaaggtctgttgaatgtcgtgaaggaagcagttcctctggaagcttcttgaagacaaacaacgtctgtagcgaccctttgcaggcagcggaaccccccacctggcgacaggtgcctctgcggccaaaagccacgtgtataagatacacctgcaaaggcggcacaaccccagtgccacgttgtgagttggatagttgtggaaagagtcaaatggctctcctcaagcgtattcaacaaggggctgaaggatgcccagaaggtaccccattgtatgggatctgatctggggcctcggtgcacatgctttacatgtgtttagtcgaggttaaaaaaacgtctaggccccccgaaccacggggacgtggttttcctttgaaaaacacgatgataatatggccacaaccgccgccaccatgaagttgcctgttaggctgttggtgctgatgttctggattcctgcttccagcagtgatgttgtgatgacccaaactccactctccctgcctgtcagtcttggagatcaagcctccatctcttgcagatctagtcagagccttgtacacagtaatggaaacacctatttacattggtacctgcagaagccaggccagtctccaaagctcctgatctacaaagtttccaaccgattttctggggtcccagacaggttcagtggcagtggatcagggacagatttcacactcaagatcagcagagtggaggctgaggatctgggagtttatttctgctctcaaagtacacatgttccgctcacgttcggtgctgggaccaagctggagctgaaacgggctgatgctgcaccaactgtatccatcttcccaccatccagtgagcagttaacatctggaggtgcctcagtcgtgtgcttcttgaacaacttctaccccaaagacatcaatgtcaagtggaagattgatggcagtgaacgacaaaatggcgtcctgaacagttggactgatcaggacagcaaagacagcacctacagcatgagcagcaccctcacgttgaccaaggacgagtatgaacgacataacagctatacctgtgaggccactcacaagacatcaacttcacccattgtcaagagcttcaacaggaatgagtgttagtaa

SEQ ID NO: 4277 - DNA, 2720 bp, Artificial Sequence
  Description of Artificial Sequence: Synthetic polynucleotide
atgaagttgcctgttaggctgttggtgctgatgttctggattcctgcttccagcagtgatgttgtgatgacccaaactccactctccctgcctgtcagtcttggagatcaagcctccatctcttgcagatctagtcagagccttgtacacagtaatggaaacacctatttacattggtacctgcagaagccaggccagtctccaaagctcctgatctacaaagtttccaaccgattttctggggtcccagacaggttcagtggcagtggatcagggacagatttcacactcaagatcagcagagtggaggctgaggatctgggagtttatttctgctctcaaagtacacatgttccgctcacgttcggtgctgggaccaagctggagctgaaacgggctgatgctgcaccaactgtatccatcttcccaccatccagtgagcagttaacatctggaggtgcctcagtcgtgtgcttcttgaacaacttctaccccaaagacatcaatgtcaagtggaagattgatggcagtgaacgacaaaatggcgtcctgaacagttggactgatcaggacagcaaagacagcacctacagcatgagcagcaccctcacgttgaccaaggacgagtatgaacgacataacagctatacctgtgaggccactcacaagacatcaacttcacccattgtcaagagcttcaacaggaatgagtgttagtaacgaattccgcccctctcccccccccccctctccctcccccccccctaacgttactggccgaagccgcttggaataaggccggtgtgcgtttgtctatatgttattttccaccatattgccgtcttttggcaatgtgagggcccggaaacctggccctgtcttcttgacgagcattcctaggggtctttcccctctcgccaaaggaatgcaaggtctgttgaatgtcgtgaaggaagcagttcctctggaagcttcttgaagacaaacaacgtctgtagcgaccctttgcaggcagcggaaccccccacctggcgacaggtgcctctgcggccaaaagccacgtgtataagatacacctgcaaaggcggcacaaccccagtgccacgttgtgagttggatagttgtggaaagagtcaaatggctctcctcaagcgtattcaacaaggggctgaaggatgcccagaaggtaccccattgtatgggatctgatctggggcctcggtgcacatgctttacatgtgtttagtcgaggttaaaaaaacgtctaggccccccgaaccacggggacgtggttttcctttgaaaaacacgatgataatatggccacaaccgccgccaccatggaatggacctgggtctttctcttcctcctgtcagtaactgcaggtgtccactcccaggttcagctgcagcagtctggagctgagctgatgaagcctggggcctcagtgaagatatcctgcaaggctactggctacacattcagtaactactggatagagtgggtaaagcagaggcctggacatggccttgagtggattggagagattttacctggaagtgatagtattaagtacaatgagaatttcaagggcaaggccacattcactgcagatacatcctccaacacagcctacatgcaactcagcagcctgacatctgaggactctgccgtctattactgtgcaagaagggggaactacccagactactggggccaaggcaccactctcacagtctcctcagccaaaacgacacccccatctgtctatccactggcccctggatctgctgcccaaactaactccatggtgaccctgggatgcctggtcaagggctatttccctgagccagtgacagtgacctggaactctggatccctgtccagcggtgtgcacaccttcccagctgtcctgcagtctgacctctacactctgagcagctcagtgactgtcccctccagcacctggcccagcgagaccgtcacctgcaacgttgcccacccggccagcagcaccaaggtggacaagaaaattgtgcccagggattgtggttgtaagccttgcatatgtacagtcccagaagtatcatctgtcttcatcttccccccaaagcccaaggatgtgctcaccattactctgactcctaaggtcacgtgtgttgtggtagacatcagcaaggatgatcccgaggtccagttcagctggtttgtagatgatgtggaggtgcacacagctcagacgcaaccccgggaggagcagttcaacagcactttccgctcagtcagtgaacttcccatcatgcaccaggactggctcaatggcaaggagttcaaatgcagggtcaacagtgcagctttccctgcccccatcgagaaaaccatctccaaaaccaaaggcagaccgaaggctccacaggtgtacaccattccacctcccaaggagcagatggccaaggataaagtcagtctgacctgcatgataacagacttcttccctgaagacattactgtggagtggcagtggaatgggcagccagcggagaactacaagaacactcagcccatcatggacacagatggctcttacttcgtctacagcaagctcaatgtgcagaagagcaactgggaggcaggaaatactttcacctgctctgtgttacatgagggcctgcacaaccaccatactgagaagagcctctcccactctcctggttagtaa

SEQ ID NO: 4278 - DNA, 2169 bp, Artificial Sequence
  Description of Artificial Sequence: Synthetic polynucleotide
atggaatggacctgggtctttctcttcctcctgtcagtaactgcaggtgtccactcccaggttcagctgcagcagtctggagctgagctgatgaagcctggggcctcagtgaagatatcctgcaaggctactggctacacattcagtaactactggatagagtgggtaaagcagaggcctggacatggccttgagtggattggagagattttacctggaagtgatagtattaagtacaatgagaatttcaagggcaaggccacattcactgcagatacatcctccaacacagcctacatgcaactcagcagcctgacatctgaggactctgccgtctattactgtgcaagaagggggaactacccagactactggggccaaggcaccactctcacagtctcctcagccaaaacgacacccccatctgtctatccactggcccctggatctgctgcccaaactaactccatggtgaccctgggatgcctggtcaagggctatttccctgagccagtgacagtgacctggaactctggatccctgtccagcggtgtgcacaccttcccagctgtcctgcagtctgacctctacactctgagcagctcagtgactgtcccctccagcacctggcccagcgagaccgtcacctgcaacgttgcccacccggccagcagcaccaaggtggacaagaaaattgtgcccagggattgtggttgtaagccttgcatatgtacagtcccagaagtatcatctgtcttcatcttccccccaaagcccaaggatgtgctcaccattactctgactcctaaggtcacgtgtgttgtggtagacatcagcaaggatgatcccgaggtccagttcagctggtttgtagatgatgtggaggtgcacacagctcagacgcaaccccgggaggagcagttcaacagcactttccgctcagtcagtgaacttcccatcatgcaccaggactggctcaatggcaaggagttcaaatgcagggtcaacagtgcagctttccctgcccccatcgagaaaaccatctccaaaaccaaaggcagaccgaaggctccacaggtgtacaccattccacctcccaaggagcagatggccaaggataaagtcagtctgacctgcatgataacagacttcttccctgaagacattactgtggagtggcagtggaatgggcagccagcggagaactacaagaacactcagcccatcatggacacagatggctcttacttcgtctacagcaagctcaatgtgcagaagagcaactgggaggcaggaaatactttcacctgctctgtgttacatgagggcctgcacaaccaccatactgagaagagcctctcccactctcctggtggaagcggagtgaaacagactttgaattttgaccttctcaagttggcgggagacgtggagtccaaccctggacctatgaagttgcctgttaggctgttggtgctgatgttctggattcctgcttccagcagtgatgttgtgatgacccaaactccactctccctgcctgtcagtcttggagatcaagcctccatctcttgcagatctagtcagagccttgtacacagtaatggaaacacctatttacattggtacctgcagaagccaggccagtctccaaagctcctgatctacaaagtttccaaccgattttctggggtcccagacaggttcagtggcagtggatcagggacagatttcacactcaagatcagcagagtggaggctgaggatctgggagtttatttctgctctcaaagtacacatgttccgctcacgttcggtgctgggaccaagctggagctgaaacgggctgatgctgcaccaactgtatccatcttcccaccatccagtgagcagttaacatctggaggtgcctcagtcgtgtgcttcttgaacaacttctaccccaaagacatcaatgtcaagtggaagattgatggcagtgaacgacaaaatggcgtcctgaacagttggactgatcaggacagcaaagacagcacctacagcatgagcagcaccctcacgttgaccaaggacgagtatgaacgacataacagctatacctgtgaggccactcacaagacatcaacttcacccattgtcaagagcttcaacaggaatgagtgttagtaa

SEQ ID NO: 4279 - DNA, 2169 bp, Artificial Sequence
  Description of Artificial Sequence: Synthetic polynucleotide
atgaagttgcctgttaggctgttggtgctgatgttctggattcctgcttccagcagtgatgttgtgatgacccaaactccactctccctgcctgtcagtcttggagatcaagcctccatctcttgcagatctagtcagagccttgtacacagtaatggaaacacctatttacattggtacctgcagaagccaggccagtctccaaagctcctgatctacaaagtttccaaccgattttctggggtcccagacaggttcagtggcagtggatcagggacagatttcacactcaagatcagcagagtggaggctgaggatctgggagtttatttctgctctcaaagtacacatgttccgctcacgttcggtgctgggaccaagctggagctgaaacgggctgatgctgcaccaactgtatccatcttcccaccatccagtgagcagttaacatctggaggtgcctcagtcgtgtgcttcttgaacaacttctaccccaaagacatcaatgtcaagtggaagattgatggcagtgaacgacaaaatggcgtcctgaacagttggactgatcaggacagcaaagacagcacctacagcatgagcagcaccctcacgttgaccaaggacgagtatgaacgacataacagctatacctgtgaggccactcacaagacatcaacttcacccattgtcaagagcttcaacaggaatgagtgtggaagcggagtgaaacagactttgaattttgaccttctcaagttggcgggagacgtggagtccaaccctggacctatggaatggacctgggtctttctcttcctcctgtcagtaactgcaggtgtccactcccaggttcagctgcagcagtctggagctgagctgatgaagcctggggcctcagtgaagatatcctgcaaggctactggctacacattcagtaactactggatagagtgggtaaagcagaggcctggacatggccttgagtggattggagagattttacctggaagtgatagtattaagtacaatgagaatttcaagggcaaggccacattcactgcagatacatcctccaacacagcctacatgcaactcagcagcctgacatctgaggactctgccgtctattactgtgcaagaagggggaactacccagactactggggccaaggcaccactctcacagtctcctcagccaaaacgacacccccatctgtctatccactggcccctggatctgctgcccaaactaactccatggtgaccctgggatgcctggtcaagggctatttccctgagccagtgacagtgacctggaactctggatccctgtccagcggtgtgcacaccttcccagctgtcctgcagtctgacctctacactctgagcagctcagtgactgtcccctccagcacctggcccagcgagaccgtcacctgcaacgttgcccacccggccagcagcaccaaggtggacaagaaaattgtgcccagggattgtggttgtaagccttgcatatgtacagtcccagaagtatcatctgtcttcatcttccccccaaagcccaaggatgtgctcaccattactctgactcctaaggtcacgtgtgttgtggtagacatcagcaaggatgatcccgaggtccagttcagctggtttgtagatgatgtggaggtgcacacagctcagacgcaaccccgggaggagcagttcaacagcactttccgctcagtcagtgaacttcccatcatgcaccaggactggctcaatggcaaggagttcaaatgcagggtcaacagtgcagctttccctgcccccatcgagaaaaccatctccaaaaccaaaggcagaccgaaggctccacaggtgtacaccattccacctcccaaggagcagatggccaaggataaagtcagtctgacctgcatgataacagacttcttccctgaagacattactgtggagtggcagtggaatgggcagccagcggagaactacaagaacactcagcccatcatggacacagatggctcttacttcgtctacagcaagctcaatgtgcagaagagcaactgggaggcaggaaatactttcacctgctctgtgttacatgagggcctgcacaaccaccatactgagaagagcctctcccactctcctggttagtaa

SEQ ID NO: 4280 - DNA, 2181 bp, Artificial Sequence
  Description of Artificial Sequence: Synthetic polynucleotide
atggaatggacctgggtctttctcttcctcctgtcagtaactgcaggtgtccactcccaggttcagctgcagcagtctggagctgagctgatgaagcctggggcctcagtgaagatatcctgcaaggctactggctacacattcagtaactactggatagagtgggtaaagcagaggcctggacatggccttgagtggattggagagattttacctggaagtgatagtattaagtacaatgagaatttcaagggcaaggccacattcactgcagatacatcctccaacacagcctacatgcaactcagcagcctgacatctgaggactctgccgtctattactgtgcaagaagggggaactacccagactactggggccaaggcaccactctcacagtctcctcagccaaaacgacacccccatctgtctatccactggcccctggatctgctgcccaaactaactccatggtgaccctgggatgcctggtcaagggctatttccctgagccagtgacagtgacctggaactctggatccctgtccagcggtgtgcacaccttcccagctgtcctgcagtctgacctctacactctgagcagctcagtgactgtcccctccagcacctggcccagcgagaccgtcacctgcaacgttgcccacccggccagcagcaccaaggtggacaagaaaattgtgcccagggattgtggttgtaagccttgcatatgtacagtcccagaagtatcatctgtcttcatcttccccccaaagcccaaggatgtgctcaccattactctgactcctaaggtcacgtgtgttgtggtagacatcagcaaggatgatcccgaggtccagttcagctggtttgtagatgatgtggaggtgcacacagctcagacgcaaccccgggaggagcagttcaacagcactttccgctcagtcagtgaacttcccatcatgcaccaggactggctcaatggcaaggagttcaaatgcagggtcaacagtgcagctttccctgcccccatcgagaaaaccatctccaaaaccaaaggcagaccgaaggctccacaggtgtacaccattccacctcccaaggagcagatggccaaggataaagtcagtctgacctgcatgataacagacttcttccctgaagacattactgtggagtggcagtggaatgggcagccagcggagaactacaagaacactcagcccatcatggacacagatggctcttacttcgtctacagcaagctcaatgtgcagaagagcaactgggaggcaggaaatactttcacctgctctgtgttacatgagggcctgcacaaccaccatactgagaagagcctctcccactctcctggtcgggccaagcggggaagcggagtgaaacagactttgaattttgaccttctcaagttggcgggagacgtggagtccaaccctggacctatgaagttgcctgttaggctgttggtgctgatgttctggattcctgcttccagcagtgatgttgtgatgacccaaactccactctccctgcctgtcagtcttggagatcaagcctccatctcttgcagatctagtcagagccttgtacacagtaatggaaacacctatttacattggtacctgcagaagccaggccagtctccaaagctcctgatctacaaagtttccaaccgattttctggggtcccagacaggttcagtggcagtggatcagggacagatttcacactcaagatcagcagagtggaggctgaggatctgggagtttatttctgctctcaaagtacacatgttccgctcacgttcggtgctgggaccaagctggagctgaaacgggctgatgctgcaccaactgtatccatcttcccaccatccagtgagcagttaacatctggaggtgcctcagtcgtgtgcttcttgaacaacttctaccccaaagacatcaatgtcaagtggaagattgatggcagtgaacgacaaaatggcgtcctgaacagttggactgatcaggacagcaaagacagcacctacagcatgagcagcaccctcacgttgaccaaggacgagtatgaacgacataacagctatacctgtgaggccactcacaagacatcaacttcacccattgtcaagagcttcaacaggaatgagtgttagtaa

SEQ ID NO: 4281 - DNA, 2181 bp, Artificial Sequence
  Description of Artificial Sequence: Synthetic polynucleotide
atgaagttgcctgttaggctgttggtgctgatgttctggattcctgcttccagcagtgatgttgtgatgacccaaactccactctccctgcctgtcagtcttggagatcaagcctccatctcttgcagatctagtcagagccttgtacacagtaatggaaacacctatttacattggtacctgcagaagccaggccagtctccaaagctcctgatctacaaagtttccaaccgattttctggggtcccagacaggttcagtggcagtggatcagggacagatttcacactcaagatcagcagagtggaggctgaggatctgggagtttatttctgctctcaaagtacacatgttccgctcacgttcggtgctgggaccaagctggagctgaaacgggctgatgctgcaccaactgtatccatcttcccaccatccagtgagcagttaacatctggaggtgcctcagtcgtgtgcttcttgaacaacttctaccccaaagacatcaatgtcaagtggaagattgatggcagtgaacgacaaaatggcgtcctgaacagttggactgatcaggacagcaaagacagcacctacagcatgagcagcaccctcacgttgaccaaggacgagtatgaacgacataacagctatacctgtgaggccactcacaagacatcaacttcacccattgtcaagagcttcaacaggaatgagtgtcgggccaagcggggaagcggagtgaaacagactttgaattttgaccttctcaagttggcgggagacgtggagtccaaccctggacctatggaatggacctgggtctttctcttcctcctgtcagtaactgcaggtgtccactcccaggttcagctgcagcagtctggagctgagctgatgaagcctggggcctcagtgaagatatcctgcaaggctactggctacacattcagtaactactggatagagtgggtaaagcagaggcctggacatggccttgagtggattggagagattttacctggaagtgatagtattaagtacaatgagaatttcaagggcaaggccacattcactgcagatacatcctccaacacagcctacatgcaactcagcagcctgacatctgaggactctgccgtctattactgtgcaagaagggggaactacccagactactggggccaaggcaccactctcacagtctcctcagccaaaacgacacccccatctgtctatccactggcccctggatctgctgcccaaactaactccatggtgaccctgggatgcctggtcaagggctatttccctgagccagtgacagtgacctggaactctggatccctgtccagcggtgtgcacaccttcccagctgtcctgcagtctgacctctacactctgagcagctcagtgactgtcccctccagcacctggcccagcgagaccgtcacctgcaacgttgcccacccggccagcagcaccaaggtggacaagaaaattgtgcccagggattgtggttgtaagccttgcatatgtacagtcccagaagtatcatctgtcttcatcttccccccaaagcccaaggatgtgctcaccattactctgactcctaaggtcacgtgtgttgtggtagacatcagcaaggatgatcccgaggtccagttcagctggtttgtagatgatgtggaggtgcacacagctcagacgcaaccccgggaggagcagttcaacagcactttccgctcagtcagtgaacttcccatcatgcaccaggactggctcaatggcaaggagttcaaatgcagggtcaacagtgcagctttccctgcccccatcgagaaaaccatctccaaaaccaaaggcagaccgaaggctccacaggtgtacaccattccacctcccaaggagcagatggccaaggataaagtcagtctgacctgcatgataacagacttcttccctgaagacattactgtggagtggcagtggaatgggcagccagcggagaactacaagaacactcagcccatcatggacacagatggctcttacttcgtctacagcaagctcaatgtgcagaagagcaactgggaggcaggaaatactttcacctgctctgtgttacatgagggcctgcacaaccaccatactgagaagagcctctcccactctcctggttagtaa

SEQ ID NO: 4282 - DNA, 2160 bp, Artificial Sequence
  Description of Artificial Sequence: Synthetic polynucleotide
atggaatggacctgggtctttctcttcctcctgtcagtaactgcaggtgtccactcccaggttcagctgcagcagtctggagctgagctgatgaagcctggggcctcagtgaagatatcctgcaaggctactggctacacattcagtaactactggatagagtgggtaaagcagaggcctggacatggccttgagtggattggagagattttacctggaagtgatagtattaagtacaatgagaatttcaagggcaaggccacattcactgcagatacatcctccaacacagcctacatgcaactcagcagcctgacatctgaggactctgccgtctattactgtgcaagaagggggaactacccagactactggggccaaggcaccactctcacagtctcctcagccaaaacgacacccccatctgtctatccactggcccctggatctgctgcccaaactaactccatggtgaccctgggatgcctggtcaagggctatttccctgagccagtgacagtgacctggaactctggatccctgtccagcggtgtgcacaccttcccagctgtcctgcagtctgacctctacactctgagcagctcagtgactgtcccctccagcacctggcccagcgagaccgtcacctgcaacgttgcccacccggccagcagcaccaaggtggacaagaaaattgtgcccagggattgtggttgtaagccttgcatatgtacagtcccagaagtatcatctgtcttcatcttccccccaaagcccaaggatgtgctcaccattactctgactcctaaggtcacgtgtgttgtggtagacatcagcaaggatgatcccgaggtccagttcagctggtttgtagatgatgtggaggtgcacacagctcagacgcaaccccgggaggagcagttcaacagcactttccgctcagtcagtgaacttcccatcatgcaccaggactggctcaatggcaaggagttcaaatgcagggtcaacagtgcagctttccctgcccccatcgagaaaaccatctccaaaaccaaaggcagaccgaaggctccacaggtgtacaccattccacctcccaaggagcagatggccaaggataaagtcagtctgacctgcatgataacagacttcttccctgaagacattactgtggagtggcagtggaatgggcagccagcggagaactacaagaacactcagcccatcatggacacagatggctcttacttcgtctacagcaagctcaatgtgcagaagagcaactgggaggcaggaaatactttcacctgctctgtgttacatgagggcctgcacaaccaccatactgagaagagcctctcccactctcctggtggaagcggagctactaacttcagcctgctgaagcaggctggagacgtggaggagaaccctggacctatgaagttgcctgttaggctgttggtgctgatgttctggattcctgcttccagcagtgatgttgtgatgacccaaactccactctccctgcctgtcagtcttggagatcaagcctccatctcttgcagatctagtcagagccttgtacacagtaatggaaacacctatttacattggtacctgcagaagccaggccagtctccaaagctcctgatctacaaagtttccaaccgattttctggggtcccagacaggttcagtggcagtggatcagggacagatttcacactcaagatcagcagagtggaggctgaggatctgggagtttatttctgctctcaaagtacacatgttccgctcacgttcggtgctgggaccaagctggagctgaaacgggctgatgctgcaccaactgtatccatcttcccaccatccagtgagcagttaacatctggaggtgcctcagtcgtgtgcttcttgaacaacttctaccccaaagacatcaatgtcaagtggaagattgatggcagtgaacgacaaaatggcgtcctgaacagttggactgatcaggacagcaaagacagcacctacagcatgagcagcaccctcacgttgaccaaggacgagtatgaacgacataacagctatacctgtgaggccactcacaagacatcaacttcacccattgtcaagagcttcaacaggaatgagtgttagtaa

SEQ ID NO: 4283 - DNA, 2160 bp, Artificial Sequence
  Description of Artificial Sequence: Synthetic polynucleotide
atgaagttgcctgttaggctgttggtgctgatgttctggattcctgcttccagcagtgatgttgtgatgacccaaactccactctccctgcctgtcagtcttggagatcaagcctccatctcttgcagatctagtcagagccttgtacacagtaatggaaacacctatttacattggtacctgcagaagccaggccagtctccaaagctcctgatctacaaagtttccaaccgattttctggggtcccagacaggttcagtggcagtggatcagggacagatttcacactcaagatcagcagagtggaggctgaggatctgggagtttatttctgctctcaaagtacacatgttccgctcacgttcggtgctgggaccaagctggagctgaaacgggctgatgctgcaccaactgtatccatcttcccaccatccagtgagcagttaacatctggaggtgcctcagtcgtgtgcttcttgaacaacttctaccccaaagacatcaatgtcaagtggaagattgatggcagtgaacgacaaaatggcgtcctgaacagttggactgatcaggacagcaaagacagcacctacagcatgagcagcaccctcacgttgaccaaggacgagtatgaacgacataacagctatacctgtgaggccactcacaagacatcaacttcacccattgtcaagagcttcaacaggaatgagtgtggaagcggagctactaacttcagcctgctgaagcaggctggagacgtggaggagaaccctggacctatggaatggacctgggtctttctcttcctcctgtcagtaactgcaggtgtccactcccaggttcagctgcagcagtctggagctgagctgatgaagcctggggcctcagtgaagatatcctgcaaggctactggctacacattcagtaactactggatagagtgggtaaagcagaggcctggacatggccttgagtggattggagagattttacctggaagtgatagtattaagtacaatgagaatttcaagggcaaggccacattcactgcagatacatcctccaacacagcctacatgcaactcagcagcctgacatctgaggactctgccgtctattactgtgcaagaagggggaactacccagactactggggccaaggcaccactctcacagtctcctcagccaaaacgacacccccatctgtctatccactggcccctggatctgctgcccaaactaactccatggtgaccctgggatgcctggtcaagggctatttccctgagccagtgacagtgacctggaactctggatccctgtccagcggtgtgcacaccttcccagctgtcctgcagtctgacctctacactctgagcagctcagtgactgtcccctccagcacctggcccagcgagaccgtcacctgcaacgttgcccacccggccagcagcaccaaggtggacaagaaaattgtgcccagggattgtggttgtaagccttgcatatgtacagtcccagaagtatcatctgtcttcatcttccccccaaagcccaaggatgtgctcaccattactctgactcctaaggtcacgtgtgttgtggtagacatcagcaaggatgatcccgaggtccagttcagctggtttgtagatgatgtggaggtgcacacagctcagacgcaaccccgggaggagcagttcaacagcactttccgctcagtcagtgaacttcccatcatgcaccaggactggctcaatggcaaggagttcaaatgcagggtcaacagtgcagctttccctgcccccatcgagaaaaccatctccaaaaccaaaggcagaccgaaggctccacaggtgtacaccattccacctcccaaggagcagatggccaaggataaagtcagtctgacctgcatgataacagacttcttccctgaagacattactgtggagtggcagtggaatgggcagccagcggagaactacaagaacactcagcccatcatggacacagatggctcttacttcgtctacagcaagctcaatgtgcagaagagcaactgggaggcaggaaatactttcacctgctctgtgttacatgagggcctgcacaaccaccatactgagaagagcctctcccactctcctggttagtaa

SEQ ID NO: 4284 - DNA, 2172 bp, Artificial Sequence
  Description of Artificial Sequence: Synthetic polynucleotide
atggaatggacctgggtctttctcttcctcctgtcagtaactgcaggtgtccactcccaggttcagctgcagcagtctggagctgagctgatgaagcctggggcctcagtgaagatatcctgcaaggctactggctacacattcagtaactactggatagagtgggtaaagcagaggcctggacatggccttgagtggattggagagattttacctggaagtgatagtattaagtacaatgagaatttcaagggcaaggccacattcactgcagatacatcctccaacacagcctacatgcaactcagcagcctgacatctgaggactctgccgtctattactgtgcaagaagggggaactacccagactactggggccaaggcaccactctcacagtctcctcagccaaaacgacacccccatctgtctatccactggcccctggatctgctgcccaaactaactccatggtgaccctgggatgcctggtcaagggctatttccctgagccagtgacagtgacctggaactctggatccctgtccagcggtgtgcacaccttcccagctgtcctgcagtctgacctctacactctgagcagctcagtgactgtcccctccagcacctggcccagcgagaccgtcacctgcaacgttgcccacccggccagcagcaccaaggtggacaagaaaattgtgcccagggattgtggttgtaagccttgcatatgtacagtcccagaagtatcatctgtcttcatcttccccccaaagcccaaggatgtgctcaccattactctgactcctaaggtcacgtgtgttgtggtagacatcagcaaggatgatcccgaggtccagttcagctggtttgtagatgatgtggaggtgcacacagctcagacgcaaccccgggaggagcagttcaacagcactttccgctcagtcagtgaacttcccatcatgcaccaggactggctcaatggcaaggagttcaaatgcagggtcaacagtgcagctttccctgcccccatcgagaaaaccatctccaaaaccaaaggcagaccgaaggctccacaggtgtacaccattccacctcccaaggagcagatggccaaggataaagtcagtctgacctgcatgataacagacttcttccctgaagacattactgtggagtggcagtggaatgggcagccagcggagaactacaagaacactcagcccatcatggacacagatggctcttacttcgtctacagcaagctcaatgtgcagaagagcaactgggaggcaggaaatactttcacctgctctgtgttacatgagggcctgcacaaccaccatactgagaagagcctctcccactctcctggtcgggccaagcggggaagcggagctactaacttcagcctgctgaagcaggctggagacgtggaggagaaccctggacctatgaagttgcctgttaggctgttggtgctgatgttctggattcctgcttccagcagtgatgttgtgatgacccaaactccactctccctgcctgtcagtcttggagatcaagcctccatctcttgcagatctagtcagagccttgtacacagtaatggaaacacctatttacattggtacctgcagaagccaggccagtctccaaagctcctgatctacaaagtttccaaccgattttctggggtcccagacaggttcagtggcagtggatcagggacagatttcacactcaagatcagcagagtggaggctgaggatctgggagtttatttctgctctcaaagtacacatgttccgctcacgttcggtgctgggaccaagctggagctgaaacgggctgatgctgcaccaactgtatccatcttcccaccatccagtgagcagttaacatctggaggtgcctcagtcgtgtgcttcttgaacaacttctaccccaaagacatcaatgtcaagtggaagattgatggcagtgaacgacaaaatggcgtcctgaacagttggactgatcaggacagcaaagacagcacctacagcatgagcagcaccctcacgttgaccaaggacgagtatgaacgacataacagctatacctgtgaggccactcacaagacatcaacttcacccattgtcaagagcttcaacaggaatgagtgttagtaa

SEQ ID NO: 4285 - DNA, 2172 bp, Artificial Sequence
  Description of Artificial Sequence: Synthetic polynucleotide
atgaagttgcctgttaggctgttggtgctgatgttctggattcctgcttccagcagtgatgttgtgatgacccaaactccactctccctgcctgtcagtcttggagatcaagcctccatctcttgcagatctagtcagagccttgtacacagtaatggaaacacctatttacattggtacctgcagaagccaggccagtctccaaagctcctgatctacaaagtttccaaccgattttctggggtcccagacaggttcagtggcagtggatcagggacagatttcacactcaagatcagcagagtggaggctgaggatctgggagtttatttctgctctcaaagtacacatgttccgctcacgttcggtgctgggaccaagctggagctgaaacgggctgatgctgcaccaactgtatccatcttcccaccatccagtgagcagttaacatctggaggtgcctcagtcgtgtgcttcttgaacaacttctaccccaaagacatcaatgtcaagtggaagattgatggcagtgaacgacaaaatggcgtcctgaacagttggactgatcaggacagcaaagacagcacctacagcatgagcagcaccctcacgttgaccaaggacgagtatgaacgacataacagctatacctgtgaggccactcacaagacatcaacttcacccattgtcaagagcttcaacaggaatgagtgtcgggccaagcggggaagcggagctactaacttcagcctgctgaagcaggctggagacgtggaggagaaccctggacctatggaatggacctgggtctttctcttcctcctgtcagtaactgcaggtgtccactcccaggttcagctgcagcagtctggagctgagctgatgaagcctggggcctcagtgaagatatcctgcaaggctactggctacacattcagtaactactggatagagtgggtaaagcagaggcctggacatggccttgagtggattggagagattttacctggaagtgatagtattaagtacaatgagaatttcaagggcaaggccacattcactgcagatacatcctccaacacagcctacatgcaactcagcagcctgacatctgaggactctgccgtctattactgtgcaagaagggggaactacccagactactggggccaaggcaccactctcacagtctcctcagccaaaacgacacccccatctgtctatccactggcccctggatctgctgcccaaactaactccatggtgaccctgggatgcctggtcaagggctatttccctgagccagtgacagtgacctggaactctggatccctgtccagcggtgtgcacaccttcccagctgtcctgcagtctgacctctacactctgagcagctcagtgactgtcccctccagcacctggcccagcgagaccgtcacctgcaacgttgcccacccggccagcagcaccaaggtggacaagaaaattgtgcccagggattgtggttgtaagccttgcatatgtacagtcccagaagtatcatctgtcttcatcttccccccaaagcccaaggatgtgctcaccattactctgactcctaaggtcacgtgtgttgtggtagacatcagcaaggatgatcccgaggtccagttcagctggtttgtagatgatgtggaggtgcacacagctcagacgcaaccccgggaggagcagttcaacagcactttccgctcagtcagtgaacttcccatcatgcaccaggactggctcaatggcaaggagttcaaatgcagggtcaacagtgcagctttccctgcccccatcgagaaaaccatctccaaaaccaaaggcagaccgaaggctccacaggtgtacaccattccacctcccaaggagcagatggccaaggataaagtcagtctgacctgcatgataacagacttcttccctgaagacattactgtggagtggcagtggaatgggcagccagcggagaactacaagaacactcagcccatcatggacacagatggctcttacttcgtctacagcaagctcaatgtgcagaagagcaactgggaggcaggaaatactttcacctgctctgtgttacatgagggcctgcacaaccaccatactgagaagagcctctcccactctcctggttagtaa

SEQ ID NO: 4286 - DNA, 2169 bp, Artificial Sequence
  Description of Artificial Sequence: Synthetic polynucleotide
atgaagttgcctgttaggctgttggtgctgatgttctggattcctgcttccagcagtgatgttgtgatgacccaaactccactctccctgcctgtcagtcttggagatcaagcctccatctcttgcagatctagtcagagccttgtacacagtaatggaaacacctatttacattggtacctgcagaagccaggccagtctccaaagctcctgatctacaaagtttccaaccgattttctggggtcccagacaggttcagtggcagtggatcagggacagatttcacactcaagatcagcagagtggaggctgaggatctgggagtttatttctgctctcaaagtacacatgttccgctcacgttcggtgctgggaccaagctggagctgaaacgggctgatgctgcaccaactgtatccatcttcccaccatccagtgagcagttaacatctggaggtgcctcagtcgtgtgcttcttgaacaacttctaccccaaagacatcaatgtcaagtggaagattgatggcagtgaacgacaaaatggcgtcctgaacagttggactgatcaggacagcaaagacagcacctacagcatgagcagcaccctcacgttgaccaaggacgagtatgaacgacataacagctatacctgtgaggccactcacaagacatcaacttcacccattgtcaagagcttcaacaggaatgagtgtggcggaggtggctccggaggcggaggcagcggcggaggtgggtctggcggaggcgggtgcggcggaggtggctccatggaatggacctgggtctttctcttcctcctgtcagtaactgcaggtgtccactcccaggttcagctgcagcagtctggagctgagctgatgaagcctggggcctcagtgaagatatcctgcaaggctactggctacacattcagtaactactggatagagtgggtaaagcagaggcctggacatggccttgagtggattggagagattttacctggaagtgatagtattaagtacaatgagaatttcaagggcaaggccacattcactgcagatacatcctccaacacagcctacatgcaactcagcagcctgacatctgaggactctgccgtctattactgtgcaagaagggggaactacccagactactggggccaaggcaccactctcacagtctcctcagccaaaacgacacccccatctgtctatccactggcccctggatctgctgcccaaactaactccatggtgaccctgggatgcctggtcaagggctatttccctgagccagtgacagtgacctggaactctggatccctgtccagcggtgtgcacaccttcccagctgtcctgcagtctgacctctacactctgagcagctcagtgactgtcccctccagcacctggcccagcgagaccgtcacctgcaacgttgcccacccggccagcagcaccaaggtggacaagaaaattgtgcccagggattgtggttgtaagccttgcatatgtacagtcccagaagtatcatctgtcttcatcttccccccaaagcccaaggatgtgctcaccattactctgactcctaaggtcacgtgtgttgtggtagacatcagcaaggatgatcccgaggtccagttcagctggtttgtagatgatgtggaggtgcacacagctcagacgcaaccccgggaggagcagttcaacagcactttccgctcagtcagtgaacttcccatcatgcaccaggactggctcaatggcaaggagttcaaatgcagggtcaacagtgcagctttccctgcccccatcgagaaaaccatctccaaaaccaaaggcagaccgaaggctccacaggtgtacaccattccacctcccaaggagcagatggccaaggataaagtcagtctgacctgcatgataacagacttcttccctgaagacattactgtggagtggcagtggaatgggcagccagcggagaactacaagaacactcagcccatcatggacacagatggctcttacttcgtctacagcaagctcaatgtgcagaagagcaactgggaggcaggaaatactttcacctgctctgtgttacatgagggcctgcacaaccaccatactgagaagagcctctcccactctcctggttagtaa

SEQ ID NO: 4287 - DNA, 2172 bp, Artificial Sequence
  Description of Artificial Sequence: Synthetic polynucleotide
atgaagttgcctgttaggctgttggtgctgatgttctggattcctgcttccagcagtgatgttttgatgacccaaactccactctccctgcctgtcagtcttggagatcaagcctccatctcttgcaaatctagtcagagcattgtacatagtaatggaaacacctatttagaatggtacctgcagaaaccaggccagtctccaaagctcctggtctacaaagtttccaatcgattttctggggtcccagacaggttcagtggcagtggatcagggacagatttcacactcaagatcagcagagtggaggctgaggatctgggaacttattactgctttcaaggttcacttgttccttgggcgttcggtggaggcaccaagctggaaatcaaacgggctgatgctgcaccaactgtatccatcttcccaccatccagtgagcagttaacatctggaggtgcctcagtcgtgtgcttcttgaacaacttctaccccaaagacatcaatgtcaagtggaagattgatggcagtgaacgacaaaatggcgtcctgaacagttggactgatcaggacagcaaagacagcacctacagcatgagcagcaccctcacgttgaccaaggacgagtatgaacgacataacagctatacctgtgaggccactcacaagacatcaacttcacccattgtcaagagcttcaacaggaatgagtgtggaagcggagtgaaacagactttgaattttgaccttctcaagttggcgggagacgtggagtccaaccctggacctatgaacttcgggctcagcttgattttccttgtccttgttttaaaaggtgtccagtgtgaggttcatctggtggagtctgggggagccttagtgaagcctggagggtccctgaaactctcctgtgcagcctctggattcagtttcagtaaatatggcatgtcttgggttcgccagactccagacaagaggctggagtgggtcgcaaccattagtagtagtgggagtcgcacctactatccagacagtgtgaagggccaattcaccatctccagagacaatgccaagaacaccctgtacctgcaaatgagcagtctgaagtctgaggacacagccatgtattactgttcaattagctgggacggtgctatggactactggggtcaagggacctcagtcaccgtctcctcagccaaaacgacacccccatctgtctatccactggcccctggatctgctgcccaaactaactccatggtgaccctgggatgcctggtcaagggctatttccctgagccagtgacagtgacctggaactctggatccctgtccagcggtgtgcacaccttcccagctgtcctgcagtctgacctctacactctgagcagctcagtgactgtcccctccagcacctggcccagcgagaccgtcacctgcaacgttgcccacccggccagcagcaccaaggtggacaagaaaattgtgcccagggattgtggttgtaagccttgcatatgtacagtcccagaagtatcatctgtcttcatcttccccccaaagcccaaggatgtgctcaccattactctgactcctaaggtcacgtgtgttgtggtagacatcagcaaggatgatcccgaggtccagttcagctggtttgtagatgatgtggaggtgcacacagctcagacgcaaccccgggaggagcagttcaacagcactttccgctcagtcagtgaacttcccatcatgcaccaggactggctcaatggcaaggagttcaaatgcagggtcaacagtgcagctttccctgcccccatcgagaaaaccatctccaaaaccaaaggcagaccgaaggctccacaggtgtacaccattccacctcccaaggagcagatggccaaggataaagtcagtctgacctgcatgataacagacttcttccctgaagacattactgtggagtggcagtggaatgggcagccagcggagaactacaagaacactcagcccatcatggacacagatggctcttacttcgtctacagcaagctcaatgtgcagaagagcaactgggaggcaggaaatactttcacctgctctgtgttacatgagggcctgcacaaccaccatactgagaagagcctctcccactctcctggttagtaa

SEQ ID NO: 4288 - DNA, 2184 bp, Artificial Sequence
  Description of Artificial Sequence: Synthetic polynucleotide
atgaacttcgggctcagcttgattttccttgtccttgttttaaaaggtgtccagtgtgaggttcatctggtggagtctgggggagccttagtgaagcctggagggtccctgaaactctcctgtgcagcctctggattcagtttcagtaaatatggcatgtcttgggttcgccagactccagacaagaggctggagtgggtcgcaaccattagtagtagtgggagtcgcacctactatccagacagtgtgaagggccaattcaccatctccagagacaatgccaagaacaccctgtacctgcaaatgagcagtctgaagtctgaggacacagccatgtattactgttcaattagctgggacggtgctatggactactggggtcaagggacctcagtcaccgtctcctcagccaaaacgacacccccatctgtctatccactggcccctggatctgctgcccaaactaactccatggtgaccctgggatgcctggtcaagggctatttccctgagccagtgacagtgacctggaactctggatccctgtccagcggtgtgcacaccttcccagctgtcctgcagtctgacctctacactctgagcagctcagtgactgtcccctccagcacctggcccagcgagaccgtcacctgcaacgttgcccacccggccagcagcaccaaggtggacaagaaaattgtgcccagggattgtggttgtaagccttgcatatgtacagtcccagaagtatcatctgtcttcatcttccccccaaagcccaaggatgtgctcaccattactctgactcctaaggtcacgtgtgttgtggtagacatcagcaaggatgatcccgaggtccagttcagctggtttgtagatgatgtggaggtgcacacagctcagacgcaaccccgggaggagcagttcaacagcactttccgctcagtcagtgaacttcccatcatgcaccaggactggctcaatggcaaggagttcaaatgcagggtcaacagtgcagctttccctgcccccatcgagaaaaccatctccaaaaccaaaggcagaccgaaggctccacaggtgtacaccattccacctcccaaggagcagatggccaaggataaagtcagtctgacctgcatgataacagacttcttccctgaagacattactgtggagtggcagtggaatgggcagccagcggagaactacaagaacactcagcccatcatggacacagatggctcttacttcgtctacagcaagctcaatgtgcagaagagcaactgggaggcaggaaatactttcacctgctctgtgttacatgagggcctgcacaaccaccatactgagaagagcctctcccactctcctggtcgggccaagcggggaagcggagtgaaacagactttgaattttgaccttctcaagttggcgggagacgtggagtccaaccctggacctatgaagttgcctgttaggctgttggtgctgatgttctggattcctgcttccagcagtgatgttttgatgacccaaactccactctccctgcctgtcagtcttggagatcaagcctccatctcttgcaaatctagtcagagcattgtacatagtaatggaaacacctatttagaatggtacctgcagaaaccaggccagtctccaaagctcctggtctacaaagtttccaatcgattttctggggtcccagacaggttcagtggcagtggatcagggacagatttcacactcaagatcagcagagtggaggctgaggatctgggaacttattactgctttcaaggttcacttgttccttgggcgttcggtggaggcaccaagctggaaatcaaacgggctgatgctgcaccaactgtatccatcttcccaccatccagtgagcagttaacatctggaggtgcctcagtcgtgtgcttcttgaacaacttctaccccaaagacatcaatgtcaagtggaagattgatggcagtgaacgacaaaatggcgtcctgaacagttggactgatcaggacagcaaagacagcacctacagcatgagcagcaccctcacgttgaccaaggacgagtatgaacgacataacagctatacctgtgaggccactcacaagacatcaacttcacccattgtcaagagcttcaacaggaatgagtgttagtaa

SEQ ID NO: 4289 - DNA, 2172 bp, Artificial Sequence
  Description of Artificial Sequence: Synthetic polynucleotide
atgagtcctgcccagttcctgtttctgttagtgctctggattcgggaaaccaacggtgatgttgtgatgacccagactccactcactttgtcggttaccattggacaaccagcctccatctcttgcaagtcaagtcagagcctcttagatagtgatggaaagacatatttgaattggttgttacagaggccaggccagtctccaaagcgcctaatctatctggtgtctaaactggactctggagtccctgacagattcactggcagtggatcagggacagatttcacactgaaaattagcagagtggaggctgaggatttgggagtttattattgctggcaaggtacacattttcctcggacgttcggtggaggcaccaagctggaaatcaaacgggctgatgctgcaccaactgtatccatcttcccaccatccagtgagcagttaacatctggaggtgcctcagtcgtgtgcttcttgaacaacttctaccccaaagacatcaatgtcaagtggaagattgatggcagtgaacgacaaaatggcgtcctgaacagttggactgatcaggacagcaaagacagcacctacagcatgagcagcaccctcacgttgaccaaggacgagtatgaacgacataacagctatacctgtgaggccactcacaagacatcaacttcacccattgtcaagagcttcaacaggaatgagtgtggaagcggagtgaaacagactttgaattttgaccttctcaagttggcgggagacgtggagtccaaccctggacctatgggatggagctggatctttctctttctcctgtcaggaactacaggtgtcctctctgaggtccagctgcaacagtctggacctgagctggtgaagcctggggcttcagtgaagatatcctgcaagacttctggatacacattcactgaatacaccatacactgggtgaagcagagccatggagagagccttgagtggattggaggtattaatccaaacgatggtggtactatttacaaccagaagttcaagggcaaggccacattgactgtagacaagtcctccaaaacagcctacatggagctccgcagcctgacatctgaggattctgcagtcttttactgtgcaagagggccctccgccaggtttccttactggggccaagggactctggtcactgtctctgcagccaaaacgacacccccatctgtctatccactggcccctggatctgctgcccaaactaactccatggtgaccctgggatgcctggtcaagggctatttccctgagccagtgacagtgacctggaactctggatccctgtccagcggtgtgcacaccttcccagctgtcctgcagtctgacctctacactctgagcagctcagtgactgtcccctccagcacctggcccagcgagaccgtcacctgcaacgttgcccacccggccagcagcaccaaggtggacaagaaaattgtgcccagggattgtggttgtaagccttgcatatgtacagtcccagaagtatcatctgtcttcatcttccccccaaagcccaaggatgtgctcaccattactctgactcctaaggtcacgtgtgttgtggtagacatcagcaaggatgatcccgaggtccagttcagctggtttgtagatgatgtggaggtgcacacagctcagacgcaaccccgggaggagcagttcaacagcactttccgctcagtcagtgaacttcccatcatgcaccaggactggctcaatggcaaggagttcaaatgcagggtcaacagtgcagctttccctgcccccatcgagaaaaccatctccaaaaccaaaggcagaccgaaggctccacaggtgtacaccattccacctcccaaggagcagatggccaaggataaagtcagtctgacctgcatgataacagacttcttccctgaagacattactgtggagtggcagtggaatgggcagccagcggagaactacaagaacactcagcccatcatggacacagatggctcttacttcgtctacagcaagctcaatgtgcagaagagcaactgggaggcaggaaatactttcacctgctctgtgttacatgagggcctgcacaaccaccatactgagaagagcctctcccactctcctggttagtaa

SEQ ID NO: 4290 - DNA, 2184 bp, Artificial Sequence
  Description of Artificial Sequence: Synthetic polynucleotide
atgggatggagctggatctttctctttctcctgtcaggaactacaggtgtcctctctgaggtccagctgcaacagtctggacctgagctggtgaagcctggggcttcagtgaagatatcctgcaagacttctggatacacattcactgaatacaccatacactgggtgaagcagagccatggagagagccttgagtggattggaggtattaatccaaacgatggtggtactatttacaaccagaagttcaagggcaaggccacattgactgtagacaagtcctccaaaacagcctacatggagctccgcagcctgacatctgaggattctgcagtcttttactgtgcaagagggccctccgccaggtttccttactggggccaagggactctggtcactgtctctgcagccaaaacgacacccccatctgtctatccactggcccctggatctgctgcccaaactaactccatggtgaccctgggatgcctggtcaagggctatttccctgagccagtgacagtgacctggaactctggatccctgtccagcggtgtgcacaccttcccagctgtcctgcagtctgacctctacactctgagcagctcagtgactgtcccctccagcacctggcccagcgagaccgtcacctgcaacgttgcccacccggccagcagcaccaaggtggacaagaaaattgtgcccagggattgtggttgtaagccttgcatatgtacagtcccagaagtatcatctgtcttcatcttccccccaaagcccaaggatgtgctcaccattactctgactcctaaggtcacgtgtgttgtggtagacatcagcaaggatgatcccgaggtccagttcagctggtttgtagatgatgtggaggtgcacacagctcagacgcaaccccgggaggagcagttcaacagcactttccgctcagtcagtgaacttcccatcatgcaccaggactggctcaatggcaaggagttcaaatgcagggtcaacagtgcagctttccctgcccccatcgagaaaaccatctccaaaaccaaaggcagaccgaaggctccacaggtgtacaccattccacctcccaaggagcagatggccaaggataaagtcagtctgacctgcatgataacagacttcttccctgaagacattactgtggagtggcagtggaatgggcagccagcggagaactacaagaacactcagcccatcatggacacagatggctcttacttcgtctacagcaagctcaatgtgcagaagagcaactgggaggcaggaaatactttcacctgctctgtgttacatgagggcctgcacaaccaccatactgagaagagcctctcccactctcctggtcgggccaagcggggaagcggagtgaaacagactttgaattttgaccttctcaagttggcgggagacgtggagtccaaccctggacctatgagtcctgcccagttcctgtttctgttagtgctctggattcgggaaaccaacggtgatgttgtgatgacccagactccactcactttgtcggttaccattggacaaccagcctccatctcttgcaagtcaagtcagagcctcttagatagtgatggaaagacatatttgaattggttgttacagaggccaggccagtctccaaagcgcctaatctatctggtgtctaaactggactctggagtccctgacagattcactggcagtggatcagggacagatttcacactgaaaattagcagagtggaggctgaggatttgggagtttattattgctggcaaggtacacattttcctcggacgttcggtggaggcaccaagctggaaatcaaacgggctgatgctgcaccaactgtatccatcttcccaccatccagtgagcagttaacatctggaggtgcctcagtcgtgtgcttcttgaacaacttctaccccaaagacatcaatgtcaagtggaagattgatggcagtgaacgacaaaatggcgtcctgaacagttggactgatcaggacagcaaagacagcacctacagcatgagcagcaccctcacgttgaccaaggacgagtatgaacgacataacagctatacctgtgaggccactcacaagacatcaacttcacccattgtcaagagcttcaacaggaatgagtgttagtaa

SEQ ID NO: 4291 - DNA, 6979 bp, Artificial Sequence
  Description of Artificial Sequence: Synthetic polynucleotide
gccttaattaggctgcgcgctcgctcgctcactgaggccgcccgggcaaagcccgggcgtcgggcgacctttggtcgcccggcctcagtgagcgagcgagcgcgcagagagggagtggccaactccatcactaggggttccttgtagttaatgattaacccgccatgctacttatctaccagggtaatggggatcctctagaactatagctagtcgacattgattattgactagttattaatagtaatcaattacggggtcattagttcatagcccatatatggagttccgcgttacataacttacggtaaatggcccgcctggctgaccgcccaacgacccccgcccattgacgtcaataatgacgtatgttcccatagtaacgccaatagggactttccattgacgtcaatgggtggagtatttacggtaaactgcccacttggcagtacatcaagtgtatcatatgccaagtacgccccctattgacgtcaatgacggtaaatggcccgcctggcattatgcccagtacatgaccttatgggactttcctacttggcagtacatctacgtattagtcatcgctattaccatgtcgaggccacgttctgcttcactctccccatctcccccccctccccacccccaattttgtatttatttattttttaattattttgtgcagcgatgggggcggggggggggggcgcgcgccaggcggggcggggcggggcgaggggcggggcggggcgaggcggagaggtgcggcggcagccaatcagagcggcgcgctccgaaagtttccttttatggcgaggcggcggcggcggcggccctataaaaagcgaagcgcgcggcgggcgggagcaagcttgaactgaaaaaccagaaagttaactggtaagtttagtctttttgtcttttatttcaggtcccggatccggtggtggtgcaaatcaaagaactgctcctcagtggatgttgcctttacttctaggcctgtacggaagtgttacttctgctctaaaagctgcggaattgtacccgcggccgatccaccggtgccgccaccatggaatggacctgggtctttctcttcctcctgtcagtaactgcaggtgtccactcccaggttcagctgcagcagtctggagctgagctgatgaagcctggggcctcagtgaagatatcctgcaaggctactggctacacattcagtaactactggatagagtgggtaaagcagaggcctggacatggccttgagtggattggagagattttacctggaagtgatagtattaagtacaatgagaatttcaagggcaaggccacattcactgcagatacatcctccaacacagcctacatgcaactcagcagcctgacatctgaggactctgccgtctattactgtgcaagaagggggaactacccagactactggggccaaggcaccactctcacagtctcctcagccaaaacgacacccccatctgtctatccactggcccctggatctgctgcccaaactaactccatggtgaccctgggatgcctggtcaagggctatttccctgagccagtgacagtgacctggaactctggatccctgtccagcggtgtgcacaccttcccagctgtcctgcagtctgacctctacactctgagcagctcagtgactgtcccctccagcacctggcccagcgagaccgtcacctgcaacgttgcccacccggccagcagcaccaaggtggacaagaaaattgtgcccagggattgtggttgtaagccttgcatatgtacagtcccagaagtatcatctgtcttcatcttccccccaaagcccaaggatgtgctcaccattactctgactcctaaggtcacgtgtgttgtggtagacatcagcaaggatgatcccgaggtccagttcagctggtttgtagatgatgtggaggtgcacacagctcagacgcaaccccgggaggagcagttcaacagcactttccgctcagtcagtgaacttcccatcatgcaccaggactggctcaatggcaaggagttcaaatgcagggtcaacagtgcagctttccctgcccccatcgagaaaaccatctccaaaaccaaaggcagaccgaaggctccacaggtgtacaccattccacctcccaaggagcagatggccaaggataaagtcagtctgacctgcatgataacagacttcttccctgaagacattactgtggagtggcagtggaatgggcagccagcggagaactacaagaacactcagcccatcatggacacagatggctcttacttcgtctacagcaagctcaatgtgcagaagagcaactgggaggcaggaaatactttcacctgctctgtgttacatgagggcctgcacaaccaccatactgagaagagcctctcccactctcctggttagtaacgaattccgcccctctcccccccccccctctccctcccccccccctaacgttactggccgaagccgcttggaataaggccggtgtgcgtttgtctatatgttattttccaccatattgccgtcttttggcaatgtgagggcccggaaacctggccctgtcttcttgacgagcattcctaggggtctttcccctctcgccaaaggaatgcaaggtctgttgaatgtcgtgaaggaagcagttcctctggaagcttcttgaagacaaacaacgtctgtagcgaccctttgcaggcagcggaaccccccacctggcgacaggtgcctctgcggccaaaagccacgtgtataagatacacctgcaaaggcggcacaaccccagtgccacgttgtgagttggatagttgtggaaagagtcaaatggctctcctcaagcgtattcaacaaggggctgaaggatgcccagaaggtaccccattgtatgggatctgatctggggcctcggtgcacatgctttacatgtgtttagtcgaggttaaaaaaacgtctaggccccccgaaccacggggacgtggttttcctttgaaaaacacgatgataatatggccacaaccgccgccaccatgaagttgcctgttaggctgttggtgctgatgttctggattcctgcttccagcagtgatgttgtgatgacccaaactccactctccctgcctgtcagtcttggagatcaagcctccatctcttgcagatctagtcagagccttgtacacagtaatggaaacacctatttacattggtacctgcagaagccaggccagtctccaaagctcctgatctacaaagtttccaaccgattttctggggtcccagacaggttcagtggcagtggatcagggacagatttcacactcaagatcagcagagtggaggctgaggatctgggagtttatttctgctctcaaagtacacatgttccgctcacgttcggtgctgggaccaagctggagctgaaacgggctgatgctgcaccaactgtatccatcttcccaccatccagtgagcagttaacatctggaggtgcctcagtcgtgtgcttcttgaacaacttctaccccaaagacatcaatgtcaagtggaagattgatggcagtgaacgacaaaatggcgtcctgaacagttggactgatcaggacagcaaagacagcacctacagcatgagcagcaccctcacgttgaccaaggacgagtatgaacgacataacagctatacctgtgaggccactcacaagacatcaacttcacccattgtcaagagcttcaacaggaatgagtgttagtaactcgaggacggggtgaactacgcctgaggatccgatctttttccctctgccaaaaattatggggacatcatgaagccccttgagcatctgacttctggctaataaaggaaatttattttcattgcaatagtgtgttggaattttttgtgtctctcactcggaagcaattcgttgatctgaatttcgaccacccataatacccattaccctggtagataagtagcatggcgggttaatcattaactacaaggaacccctagtgatggagttggccactccctctctgcgcgctcgctcgctcactgaggccgggcgaccaaaggtcgcccgacgcccgggctttgcccgggcggcctcagtgagcgagcgagcgcgcagccttaattaacctaattcactggccgtcgttttacaacgtcgtgactgggaaaaccctggcgttacccaacttaatcgccttgcagcacatccccctttcgccagctggcgtaatagcgaagaggcccgcaccgatcgcccttcccaacagttgcgcagcctgaatggcgaatgggacgcgccctgtagcggcgcattaagcgcggcgggtgtggtggttacgcgcagcgtgaccgctacacttgccagcgccctagcgcccgctcctttcgctttcttcccttcctttctcgccacgttcgccggctttccccgtcaagctctaaatcgggggctccctttagggttccgatttagtgctttacggcacctcgaccccaaaaaacttgattagggtgatggttcacgtagtgggccatcgccctgatagacggtttttcgccctttgacgttggagtccacgttctttaatagtggactcttgttccaaactggaacaacactcaaccctatctcggtctattcttttgatttataagggattttgccgatttcggcctattggttaaaaaatgagctgatttaacaaaaatttaacgcgaattttaacaaaatattaacgcttacaatttaggtggcacttttcggggaaatgtgcgcggaacccctatttgtttatttttctaaatacattcaaatatgtatccgctcatgagacaataaccctgataaatgcttcaataatattgaaaaaggaagagtatgagtattcaacatttccgtgtcgcccttattcccttttttgcggcattttgccttcctgtttttgctcacccagaaacgctggtgaaagtaaaagatgctgaagatcagttgggtgcacgagtgggttacatcgaactggatctcaacagcggtaagatccttgagagttttcgccccgaagaacgttttccaatgatgagcacttttaaagttctgctatgtggcgcggtattatcccgtattgacgccgggcaagagcaactcggtcgccgcatacactattctcagaatgacttggttgagtactcaccagtcacagaaaagcatcttacggatggcatgacagtaagagaattatgcagtgctgccataaccatgagtgataacactgcggccaacttacttctgacaacgatcggaggaccgaaggagctaaccgcttttttgcacaacatgggggatcatgtaactcgccttgatcgttgggaaccggagctgaatgaagccataccaaacgacgagcgtgacaccacgatgcctgtagcaatggcaacaacgttgcgcaaactattaactggcgaactacttactctagcttcccggcaacaattaatagactggatggaggcggataaagttgcaggaccacttctgcgctcggcccttccggctggctggtttattgctgataaatctggagccggtgagcgtgggtctcgcggtatcattgcagcactggggccagatggtaagccctcccgtatcgtagttatctacacgacggggagtcaggcaactatggatgaacgaaatagacagatcgctgagataggtgcctcactgattaagcattggtaactgtcagaccaagtttactcatatatactttagattgatttaaaacttcatttttaatttaaaaggatctaggtgaagatcctttttgataatctcatgaccaaaatcccttaacgtgagttttcgttccactgagcgtcagaccccgtagaaaagatcaaaggatcttcttgagatcctttttttctgcgcgtaatctgctgcttgcaaacaaaaaaaccaccgctaccagcggtggtttgtttgccggatcaagagctaccaactctttttccgaaggtaactggcttcagcagagcgcagataccaaatactgttcttctagtgtagccgtagttaggccaccacttcaagaactctgtagcaccgcctacatacctcgctctgctaatcctgttaccagtggctgctgccagtggcgataagtcgtgtcttaccgggttggactcaagacgatagttaccggataaggcgcagcggtcgggctgaacggggggttcgtgcacacagcccagcttggagcgaacgacctacaccgaactgagatacctacagcgtgagctatgagaaagcgccacgcttcccgaagggagaaaggcggacaggtatccggtaagcggcagggtcggaacaggagagcgcacgagggagcttccagggggaaacgcctggtatctttatagtcctgtcgggtttcgccacctctgacttgagcgtcgatttttgtgatgctcgtcaggggggcggagcctatggaaaaacgccagcaacgcggcctttttacggttcctggccttttgctggccttttgctcacatgttctttcctgcgttatcccctgattctgtggataaccgtattaccgcctttgagtgagctgataccgctcgccgcagccgaacgaccgagcgcagcgagtcagtgagcgaggaagcggaagagcgcccaatacgcaaaccgcctctccccgcgcgttggccgattcattaatgcagctggcacgacaggtttcccgactggaaagcgggcagtgagcgcaacgcaattaatgtgagttagctcactcattaggcaccccaggctttacactttatgcttccggctcgtatgttgtgtggaattgtgagcggataacaatttcacacaggaaacagctatgaccatgattacgccagatttaattaag

SEQ ID NO: 4292 - DNA, 4158 bp, Artificial Sequence
  Description of Artificial Sequence: Synthetic polynucleotide
ctgcgcgctcgctcgctcactgaggccgcccgggcaaagcccgggcgtcgggcgacctttggtcgcccggcctcagtgagcgagcgagcgcgcagagagggagtggccaactccatcactaggggttccttgtagttaatgattaacccgccatgctacttatctaccagggtaatggggatcctctagaactatagctagtcgacattgattattgactagttattaatagtaatcaattacggggtcattagttcatagcccatatatggagttccgcgttacataacttacggtaaatggcccgcctggctgaccgcccaacgacccccgcccattgacgtcaataatgacgtatgttcccatagtaacgccaatagggactttccattgacgtcaatgggtggagtatttacggtaaactgcccacttggcagtacatcaagtgtatcatatgccaagtacgccccctattgacgtcaatgacggtaaatggcccgcctggcattatgcccagtacatgaccttatgggactttcctacttggcagtacatctacgtattagtcatcgctattaccatgtcgaggccacgttctgcttcactctccccatctcccccccctccccacccccaattttgtatttatttattttttaattattttgtgcagcgatgggggcggggggggggggcgcgcgccaggcggggcggggcggggcgaggggcggggcggggcgaggcggagaggtgcggcggcagccaatcagagcggcgcgctccgaaagtttccttttatggcgaggcggcggcggcggcggccctataaaaagcgaagcgcgcggcgggcgggagcaagcttgaactgaaaaaccagaaagttaactggtaagtttagtctttttgtcttttatttcaggtcccggatccggtggtggtgcaaatcaaagaactgctcctcagtggatgttgcctttacttctaggcctgtacggaagtgttacttctgctctaaaagctgcggaattgtacccgcggccgatccaccggtgccgccaccatggaatggacctgggtctttctcttcctcctgtcagtaactgcaggtgtccactcccaggttcagctgcagcagtctggagctgagctgatgaagcctggggcctcagtgaagatatcctgcaaggctactggctacacattcagtaactactggatagagtgggtaaagcagaggcctggacatggccttgagtggattggagagattttacctggaagtgatagtattaagtacaatgagaatttcaagggcaaggccacattcactgcagatacatcctccaacacagcctacatgcaactcagcagcctgacatctgaggactctgccgtctattactgtgcaagaagggggaactacccagactactggggccaaggcaccactctcacagtctcctcagccaaaacgacacccccatctgtctatccactggcccctggatctgctgcccaaactaactccatggtgaccctgggatgcctggtcaagggctatttccctgagccagtgacagtgacctggaactctggatccctgtccagcggtgtgcacaccttcccagctgtcctgcagtctgacctctacactctgagcagctcagtgactgtcccctccagcacctggcccagcgagaccgtcacctgcaacgttgcccacccggccagcagcaccaaggtggacaagaaaattgtgcccagggattgtggttgtaagccttgcatatgtacagtcccagaagtatcatctgtcttcatcttccccccaaagcccaaggatgtgctcaccattactctgactcctaaggtcacgtgtgttgtggtagacatcagcaaggatgatcccgaggtccagttcagctggtttgtagatgatgtggaggtgcacacagctcagacgcaaccccgggaggagcagttcaacagcactttccgctcagtcagtgaacttcccatcatgcaccaggactggctcaatggcaaggagttcaaatgcagggtcaacagtgcagctttccctgcccccatcgagaaaaccatctccaaaaccaaaggcagaccgaaggctccacaggtgtacaccattccacctcccaaggagcagatggccaaggataaagtcagtctgacctgcatgataacagacttcttccctgaagacattactgtggagtggcagtggaatgggcagccagcggagaactacaagaacactcagcccatcatggacacagatggctcttacttcgtctacagcaagctcaatgtgcagaagagcaactgggaggcaggaaatactttcacctgctctgtgttacatgagggcctgcacaaccaccatactgagaagagcctctcccactctcctggttagtaacgaattccgcccctctcccccccccccctctccctcccccccccctaacgttactggccgaagccgcttggaataaggccggtgtgcgtttgtctatatgttattttccaccatattgccgtcttttggcaatgtgagggcccggaaacctggccctgtcttcttgacgagcattcctaggggtctttcccctctcgccaaaggaatgcaaggtctgttgaatgtcgtgaaggaagcagttcctctggaagcttcttgaagacaaacaacgtctgtagcgaccctttgcaggcagcggaaccccccacctggcgacaggtgcctctgcggccaaaagccacgtgtataagatacacctgcaaaggcggcacaaccccagtgccacgttgtgagttggatagttgtggaaagagtcaaatggctctcctcaagcgtattcaacaaggggctgaaggatgcccagaaggtaccccattgtatgggatctgatctggggcctcggtgcacatgctttacatgtgtttagtcgaggttaaaaaaacgtctaggccccccgaaccacggggacgtggttttcctttgaaaaacacgatgataatatggccacaaccgccgccaccatgaagttgcctgttaggctgttggtgctgatgttctggattcctgcttccagcagtgatgttgtgatgacccaaactccactctccctgcctgtcagtcttggagatcaagcctccatctcttgcagatctagtcagagccttgtacacagtaatggaaacacctatttacattggtacctgcagaagccaggccagtctccaaagctcctgatctacaaagtttccaaccgattttctggggtcccagacaggttcagtggcagtggatcagggacagatttcacactcaagatcagcagagtggaggctgaggatctgggagtttatttctgctctcaaagtacacatgttccgctcacgttcggtgctgggaccaagctggagctgaaacgggctgatgctgcaccaactgtatccatcttcccaccatccagtgagcagttaacatctggaggtgcctcagtcgtgtgcttcttgaacaacttctaccccaaagacatcaatgtcaagtggaagattgatggcagtgaacgacaaaatggcgtcctgaacagttggactgatcaggacagcaaagacagcacctacagcatgagcagcaccctcacgttgaccaaggacgagtatgaacgacataacagctatacctgtgaggccactcacaagacatcaacttcacccattgtcaagagcttcaacaggaatgagtgttagtaactcgaggacggggtgaactacgcctgaggatccgatctttttccctctgccaaaaattatggggacatcatgaagccccttgagcatctgacttctggctaataaaggaaatttattttcattgcaatagtgtgttggaattttttgtgtctctcactcggaagcaattcgttgatctgaatttcgaccacccataatacccattaccctggtagataagtagcatggcgggttaatcattaactacaaggaacccctagtgatggagttggccactccctctctgcgcgctcgctcgctcactgaggccgggcgaccaaaggtcgcccgacgcccgggctttgcccgggcggcctcagtgagcgagcgagcgcgcag

SEQ ID NO: 4293 - DNA, 6979 bp, Artificial Sequence
  Description of Artificial Sequence: Synthetic polynucleotide
gccttaattaggctgcgcgctcgctcgctcactgaggccgcccgggcaaagcccgggcgtcgggcgacctttggtcgcccggcctcagtgagcgagcgagcgcgcagagagggagtggccaactccatcactaggggttccttgtagttaatgattaacccgccatgctacttatctaccagggtaatggggatcctctagaactatagctagtcgacattgattattgactagttattaatagtaatcaattacggggtcattagttcatagcccatatatggagttccgcgttacataacttacggtaaatggcccgcctggctgaccgcccaacgacccccgcccattgacgtcaataatgacgtatgttcccatagtaacgccaatagggactttccattgacgtcaatgggtggagtatttacggtaaactgcccacttggcagtacatcaagtgtatcatatgccaagtacgccccctattgacgtcaatgacggtaaatggcccgcctggcattatgcccagtacatgaccttatgggactttcctacttggcagtacatctacgtattagtcatcgctattaccatgtcgaggccacgttctgcttcactctccccatctcccccccctccccacccccaattttgtatttatttattttttaattattttgtgcagcgatgggggcggggggggggggcgcgcgccaggcggggcggggcggggcgaggggcggggcggggcgaggcggagaggtgcggcggcagccaatcagagcggcgcgctccgaaagtttccttttatggcgaggcggcggcggcggcggccctataaaaagcgaagcgcgcggcgggcgggagcaagcttgaactgaaaaaccagaaagttaactggtaagtttagtctttttgtcttttatttcaggtcccggatccggtggtggtgcaaatcaaagaactgctcctcagtggatgttgcctttacttctaggcctgtacggaagtgttacttctgctctaaaagctgcggaattgtacccgcggccgatccaccggtgccgccaccatgaagttgcctgttaggctgttggtgctgatgttctggattcctgcttccagcagtgatgttgtgatgacccaaactccactctccctgcctgtcagtcttggagatcaagcctccatctcttgcagatctagtcagagccttgtacacagtaatggaaacacctatttacattggtacctgcagaagccaggccagtctccaaagctcctgatctacaaagtttccaaccgattttctggggtcccagacaggttcagtggcagtggatcagggacagatttcacactcaagatcagcagagtggaggctgaggatctgggagtttatttctgctctcaaagtacacatgttccgctcacgttcggtgctgggaccaagctggagctgaaacgggctgatgctgcaccaactgtatccatcttcccaccatccagtgagcagttaacatctggaggtgcctcagtcgtgtgcttcttgaacaacttctaccccaaagacatcaatgtcaagtggaagattgatggcagtgaacgacaaaatggcgtcctgaacagttggactgatcaggacagcaaagacagcacctacagcatgagcagcaccctcacgttgaccaaggacgagtatgaacgacataacagctatacctgtgaggccactcacaagacatcaacttcacccattgtcaagagcttcaacaggaatgagtgttagtaacgaattccgcccctctcccccccccccctctccctcccccccccctaacgttactggccgaagccgcttggaataaggccggtgtgcgtttgtctatatgttattttccaccatattgccgtcttttggcaatgtgagggcccggaaacctggccctgtcttcttgacgagcattcctaggggtctttcccctctcgccaaaggaatgcaaggtctgttgaatgtcgtgaaggaagcagttcctctggaagcttcttgaagacaaacaacgtctgtagcgaccctttgcaggcagcggaaccccccacctggcgacaggtgcctctgcggccaaaagccacgtgtataagatacacctgcaaaggcggcacaaccccagtgccacgttgtgagttggatagttgtggaaagagtcaaatggctctcctcaagcgtattcaacaaggggctgaaggatgcccagaaggtaccccattgtatgggatctgatctggggcctcggtgcacatgctttacatgtgtttagtcgaggttaaaaaaacgtctaggccccccgaaccacggggacgtggttttcctttgaaaaacacgatgataatatggccacaaccgccgccaccatggaatggacctgggtctttctcttcctcctgtcagtaactgcaggtgtccactcccaggttcagctgcagcagtctggagctgagctgatgaagcctggggcctcagtgaagatatcctgcaaggctactggctacacattcagtaactactggatagagtgggtaaagcagaggcctggacatggccttgagtggattggagagattttacctggaagtgatagtattaagtacaatgagaatttcaagggcaaggccacattcactgcagatacatcctccaacacagcctacatgcaactcagcagcctgacatctgaggactctgccgtctattactgtgcaagaagggggaactacccagactactggggccaaggcaccactctcacagtctcctcagccaaaacgacacccccatctgtctatccactggcccctggatctgctgcccaaactaactccatggtgaccctgggatgcctggtcaagggctatttccctgagccagtgacagtgacctggaactctggatccctgtccagcggtgtgcacaccttcccagctgtcctgcagtctgacctctacactctgagcagctcagtgactgtcccctccagcacctggcccagcgagaccgtcacctgcaacgttgcccacccggccagcagcaccaaggtggacaagaaaattgtgcccagggattgtggttgtaagccttgcatatgtacagtcccagaagtatcatctgtcttcatcttccccccaaagcccaaggatgtgctcaccattactctgactcctaaggtcacgtgtgttgtggtagacatcagcaaggatgatcccgaggtccagttcagctggtttgtagatgatgtggaggtgcacacagctcagacgcaaccccgggaggagcagttcaacagcactttccgctcagtcagtgaacttcccatcatgcaccaggactggctcaatggcaaggagttcaaatgcagggtcaacagtgcagctttccctgcccccatcgagaaaaccatctccaaaaccaaaggcagaccgaaggctccacaggtgtacaccattccacctcccaaggagcagatggccaaggataaagtcagtctgacctgcatgataacagacttcttccctgaagacattactgtggagtggcagtggaatgggcagccagcggagaactacaagaacactcagcccatcatggacacagatggctcttacttcgtctacagcaagctcaatgtgcagaagagcaactgggaggcaggaaatactttcacctgctctgtgttacatgagggcctgcacaaccaccatactgagaagagcctctcccactctcctggttagtaactcgaggacggggtgaactacgcctgaggatccgatctttttccctctgccaaaaattatggggacatcatgaagccccttgagcatctgacttctggctaataaaggaaatttattttcattgcaatagtgtgttggaattttttgtgtctctcactcggaagcaattcgttgatctgaatttcgaccacccataatacccattaccctggtagataagtagcatggcgggttaatcattaactacaaggaacccctagtgatggagttggccactccctctctgcgcgctcgctcgctcactgaggccgggcgaccaaaggtcgcccgacgcccgggctttgcccgggcggcctcagtgagcgagcgagcgcgcagccttaattaacctaattcactggccgtcgttttacaacgtcgtgactgggaaaaccctggcgttacccaacttaatcgccttgcagcacatccccctttcgccagctggcgtaatagcgaagaggcccgcaccgatcgcccttcccaacagttgcgcagcctgaatggcgaatgggacgcgccctgtagcggcgcattaagcgcggcgggtgtggtggttacgcgcagcgtgaccgctacacttgccagcgccctagcgcccgctcctttcgctttcttcccttcctttctcgccacgttcgccggctttccccgtcaagctctaaatcgggggctccctttagggttccgatttagtgctttacggcacctcgaccccaaaaaacttgattagggtgatggttcacgtagtgggccatcgccctgatagacggtttttcgccctttgacgttggagtccacgttctttaatagtggactcttgttccaaactggaacaacactcaaccctatctcggtctattcttttgatttataagggattttgccgatttcggcctattggttaaaaaatgagctgatttaacaaaaatttaacgcgaattttaacaaaatattaacgcttacaatttaggtggcacttttcggggaaatgtgcgcggaacccctatttgtttatttttctaaatacattcaaatatgtatccgctcatgagacaataaccctgataaatgcttcaataatattgaaaaaggaagagtatgagtattcaacatttccgtgtcgcccttattcccttttttgcggcattttgccttcctgtttttgctcacccagaaacgctggtgaaagtaaaagatgctgaagatcagttgggtgcacgagtgggttacatcgaactggatctcaacagcggtaagatccttgagagttttcgccccgaagaacgttttccaatgatgagcacttttaaagttctgctatgtggcgcggtattatcccgtattgacgccgggcaagagcaactcggtcgccgcatacactattctcagaatgacttggttgagtactcaccagtcacagaaaagcatcttacggatggcatgacagtaagagaattatgcagtgctgccataaccatgagtgataacactgcggccaacttacttctgacaacgatcggaggaccgaaggagctaaccgcttttttgcacaacatgggggatcatgtaactcgccttgatcgttgggaaccggagctgaatgaagccataccaaacgacgagcgtgacaccacgatgcctgtagcaatggcaacaacgttgcgcaaactattaactggcgaactacttactctagcttcccggcaacaattaatagactggatggaggcggataaagttgcaggaccacttctgcgctcggcccttccggctggctggtttattgctgataaatctggagccggtgagcgtgggtctcgcggtatcattgcagcactggggccagatggtaagccctcccgtatcgtagttatctacacgacggggagtcaggcaactatggatgaacgaaatagacagatcgctgagataggtgcctcactgattaagcattggtaactgtcagaccaagtttactcatatatactttagattgatttaaaacttcatttttaatttaaaaggatctaggtgaagatcctttttgataatctcatgaccaaaatcccttaacgtgagttttcgttccactgagcgtcagaccccgtagaaaagatcaaaggatcttcttgagatcctttttttctgcgcgtaatctgctgcttgcaaacaaaaaaaccaccgctaccagcggtggtttgtttgccggatcaagagctaccaactctttttccgaaggtaactggcttcagcagagcgcagataccaaatactgttcttctagtgtagccgtagttaggccaccacttcaagaactctgtagcaccgcctacatacctcgctctgctaatcctgttaccagtggctgctgccagtggcgataagtcgtgtcttaccgggttggactcaagacgatagttaccggataaggcgcagcggtcgggctgaacggggggttcgtgcacacagcccagcttggagcgaacgacctacaccgaactgagatacctacagcgtgagctatgagaaagcgccacgcttcccgaagggagaaaggcggacaggtatccggtaagcggcagggtcggaacaggagagcgcacgagggagcttccagggggaaacgcctggtatctttatagtcctgtcgggtttcgccacctctgacttgagcgtcgatttttgtgatgctcgtcaggggggcggagcctatggaaaaacgccagcaacgcggcctttttacggttcctggccttttgctggccttttgctcacatgttctttcctgcgttatcccctgattctgtggataaccgtattaccgcctttgagtgagctgataccgctcgccgcagccgaacgaccgagcgcagcgagtcagtgagcgaggaagcggaagagcgcccaatacgcaaaccgcctctccccgcgcgttggccgattcattaatgcagctggcacgacaggtttcccgactggaaagcgggcagtgagcgcaacgcaattaatgtgagttagctcactcattaggcaccccaggctttacactttatgcttccggctcgtatgttgtgtggaattgtgagcggataacaatttcacacaggaaacagctatgaccatgattacgccagatttaattaag

SEQ ID NO: 4294 - DNA, 4158 bp, Artificial Sequence
  Description of Artificial Sequence: Synthetic polynucleotide
ctgcgcgctcgctcgctcactgaggccgcccgggcaaagcccgggcgtcgggcgacctttggtcgcccggcctcagtgagcgagcgagcgcgcagagagggagtggccaactccatcactaggggttccttgtagttaatgattaacccgccatgctacttatctaccagggtaatggggatcctctagaactatagctagtcgacattgattattgactagttattaatagtaatcaattacggggtcattagttcatagcccatatatggagttccgcgttacataacttacggtaaatggcccgcctggctgaccgcccaacgacccccgcccattgacgtcaataatgacgtatgttcccatagtaacgccaatagggactttccattgacgtcaatgggtggagtatttacggtaaactgcccacttggcagtacatcaagtgtatcatatgccaagtacgccccctattgacgtcaatgacggtaaatggcccgcctggcattatgcccagtacatgaccttatgggactttcctacttggcagtacatctacgtattagtcatcgctattaccatgtcgaggccacgttctgcttcactctccccatctcccccccctccccacccccaattttgtatttatttattttttaattattttgtgcagcgatgggggcggggggggggggcgcgcgccaggcggggcggggcggggcgaggggcggggcggggcgaggcggagaggtgcggcggcagccaatcagagcggcgcgctccgaaagtttccttttatggcgaggcggcggcggcggcggccctataaaaagcgaagcgcgcggcgggcgggagcaagcttgaactgaaaaaccagaaagttaactggtaagtttagtctttttgtcttttatttcaggtcccggatccggtggtggtgcaaatcaaagaactgctcctcagtggatgttgcctttacttctaggcctgtacggaagtgttacttctgctctaaaagctgcggaattgtacccgcggccgatccaccggtgccgccaccatgaagttgcctgttaggctgttggtgctgatgttctggattcctgcttccagcagtgatgttgtgatgacccaaactccactctccctgcctgtcagtcttggagatcaagcctccatctcttgcagatctagtcagagccttgtacacagtaatggaaacacctatttacattggtacctgcagaagccaggccagtctccaaagctcctgatctacaaagtttccaaccgattttctggggtcccagacaggttcagtggcagtggatcagggacagatttcacactcaagatcagcagagtggaggctgaggatctgggagtttatttctgctctcaaagtacacatgttccgctcacgttcggtgctgggaccaagctggagctgaaacgggctgatgctgcaccaactgtatccatcttcccaccatccagtgagcagttaacatctggaggtgcctcagtcgtgtgcttcttgaacaacttctaccccaaagacatcaatgtcaagtggaagattgatggcagtgaacgacaaaatggcgtcctgaacagttggactgatcaggacagcaaagacagcacctacagcatgagcagcaccctcacgttgaccaaggacgagtatgaacgacataacagctatacctgtgaggccactcacaagacatcaacttcacccattgtcaagagcttcaacaggaatgagtgttagtaacgaattccgcccctctcccccccccccctctccctcccccccccctaacgttactggccgaagccgcttggaataaggccggtgtgcgtttgtctatatgttattttccaccatattgccgtcttttggcaatgtgagggcccggaaacctggccctgtcttcttgacgagcattcctaggggtctttcccctctcgccaaaggaatgcaaggtctgttgaatgtcgtgaaggaagcagttcctctggaagcttcttgaagacaaacaacgtctgtagcgaccctttgcaggcagcggaaccccccacctggcgacaggtgcctctgcggccaaaagccacgtgtataagatacacctgcaaaggcggcacaaccccagtgccacgttgtgagttggatagttgtggaaagagtcaaatggctctcctcaagcgtattcaacaaggggctgaaggatgcccagaaggtaccccattgtatgggatctgatctggggcctcggtgcacatgctttacatgtgtttagtcgaggttaaaaaaacgtctaggccccccgaaccacggggacgtggttttcctttgaaaaacacgatgataatatggccacaaccgccgccaccatggaatggacctgggtctttctcttcctcctgtcagtaactgcaggtgtccactcccaggttcagctgcagcagtctggagctgagctgatgaagcctggggcctcagtgaagatatcctgcaaggctactggctacacattcagtaactactggatagagtgggtaaagcagaggcctggacatggccttgagtggattggagagattttacctggaagtgatagtattaagtacaatgagaatttcaagggcaaggccacattcactgcagatacatcctccaacacagcctacatgcaactcagcagcctgacatctgaggactctgccgtctattactgtgcaagaagggggaactacccagactactggggccaaggcaccactctcacagtctcctcagccaaaacgacacccccatctgtctatccactggcccctggatctgctgcccaaactaactccatggtgaccctgggatgcctggtcaagggctatttccctgagccagtgacagtgacctggaactctggatccctgtccagcggtgtgcacaccttcccagctgtcctgcagtctgacctctacactctgagcagctcagtgactgtcccctccagcacctggcccagcgagaccgtcacctgcaacgttgcccacccggccagcagcaccaaggtggacaagaaaattgtgcccagggattgtggttgtaagccttgcatatgtacagtcccagaagtatcatctgtcttcatcttccccccaaagcccaaggatgtgctcaccattactctgactcctaaggtcacgtgtgttgtggtagacatcagcaaggatgatcccgaggtccagttcagctggtttgtagatgatgtggaggtgcacacagctcagacgcaaccccgggaggagcagttcaacagcactttccgctcagtcagtgaacttcccatcatgcaccaggactggctcaatggcaaggagttcaaatgcagggtcaacagtgcagctttccctgcccccatcgagaaaaccatctccaaaaccaaaggcagaccgaaggctccacaggtgtacaccattccacctcccaaggagcagatggccaaggataaagtcagtctgacctgcatgataacagacttcttccctgaagacattactgtggagtggcagtggaatgggcagccagcggagaactacaagaacactcagcccatcatggacacagatggctcttacttcgtctacagcaagctcaatgtgcagaagagcaactgggaggcaggaaatactttcacctgctctgtgttacatgagggcctgcacaaccaccatactgagaagagcctctcccactctcctggttagtaactcgaggacggggtgaactacgcctgaggatccgatctttttccctctgccaaaaattatggggacatcatgaagccccttgagcatctgacttctggctaataaaggaaatttattttcattgcaatagtgtgttggaattttttgtgtctctcactcggaagcaattcgttgatctgaatttcgaccacccataatacccattaccctggtagataagtagcatggcgggttaatcattaactacaaggaacccctagtgatggagttggccactccctctctgcgcgctcgctcgctcactgaggccgggcgaccaaaggtcgcccgacgcccgggctttgcccgggcggcctcagtgagcgagcgagcgcgcag

SEQ ID NO: 4295 - DNA, 6428 bp, Artificial Sequence
  Description of Artificial Sequence: Synthetic polynucleotide
gccttaattaggctgcgcgctcgctcgctcactgaggccgcccgggcaaagcccgggcgtcgggcgacctttggtcgcccggcctcagtgagcgagcgagcgcgcagagagggagtggccaactccatcactaggggttccttgtagttaatgattaacccgccatgctacttatctaccagggtaatggggatcctctagaactatagctagtcgacattgattattgactagttattaatagtaatcaattacggggtcattagttcatagcccatatatggagttccgcgttacataacttacggtaaatggcccgcctggctgaccgcccaacgacccccgcccattgacgtcaataatgacgtatgttcccatagtaacgccaatagggactttccattgacgtcaatgggtggagtatttacggtaaactgcccacttggcagtacatcaagtgtatcatatgccaagtacgccccctattgacgtcaatgacggtaaatggcccgcctggcattatgcccagtacatgaccttatgggactttcctacttggcagtacatctacgtattagtcatcgctattaccatgtcgaggccacgttctgcttcactctccccatctcccccccctccccacccccaattttgtatttatttattttttaattattttgtgcagcgatgggggcggggggggggggcgcgcgccaggcggggcggggcggggcgaggggcggggcggggcgaggcggagaggtgcggcggcagccaatcagagcggcgcgctccgaaagtttccttttatggcgaggcggcggcggcggcggccctataaaaagcgaagcgcgcggcgggcgggagcaagcttgaactgaaaaaccagaaagttaactggtaagtttagtctttttgtcttttatttcaggtcccggatccggtggtggtgcaaatcaaagaactgctcctcagtggatgttgcctttacttctaggcctgtacggaagtgttacttctgctctaaaagctgcggaattgtacccgcggccgatccaccggtgccgccaccatggaatggacctgggtctttctcttcctcctgtcagtaactgcaggtgtccactcccaggttcagctgcagcagtctggagctgagctgatgaagcctggggcctcagtgaagatatcctgcaaggctactggctacacattcagtaactactggatagagtgggtaaagcagaggcctggacatggccttgagtggattggagagattttacctggaagtgatagtattaagtacaatgagaatttcaagggcaaggccacattcactgcagatacatcctccaacacagcctacatgcaactcagcagcctgacatctgaggactctgccgtctattactgtgcaagaagggggaactacccagactactggggccaaggcaccactctcacagtctcctcagccaaaacgacacccccatctgtctatccactggcccctggatctgctgcccaaactaactccatggtgaccctgggatgcctggtcaagggctatttccctgagccagtgacagtgacctggaactctggatccctgtccagcggtgtgcacaccttcccagctgtcctgcagtctgacctctacactctgagcagctcagtgactgtcccctccagcacctggcccagcgagaccgtcacctgcaacgttgcccacccggccagcagcaccaaggtggacaagaaaattgtgcccagggattgtggttgtaagccttgcatatgtacagtcccagaagtatcatctgtcttcatcttccccccaaagcccaaggatgtgctcaccattactctgactcctaaggtcacgtgtgttgtggtagacatcagcaaggatgatcccgaggtccagttcagctggtttgtagatgatgtggaggtgcacacagctcagacgcaaccccgggaggagcagttcaacagcactttccgctcagtcagtgaacttcccatcatgcaccaggactggctcaatggcaaggagttcaaatgcagggtcaacagtgcagctttccctgcccccatcgagaaaaccatctccaaaaccaaaggcagaccgaaggctccacaggtgtacaccattccacctcccaaggagcagatggccaaggataaagtcagtctgacctgcatgataacagacttcttccctgaagacattactgtggagtggcagtggaatgggcagccagcggagaactacaagaacactcagcccatcatggacacagatggctcttacttcgtctacagcaagctcaatgtgcagaagagcaactgggaggcaggaaatactttcacctgctctgtgttacatgagggcctgcacaaccaccatactgagaagagcctctcccactctcctggtggaagcggagtgaaacagactttgaattttgaccttctcaagttggcgggagacgtggagtccaaccctggacctatgaagttgcctgttaggctgttggtgctgatgttctggattcctgcttccagcagtgatgttgtgatgacccaaactccactctccctgcctgtcagtcttggagatcaagcctccatctcttgcagatctagtcagagccttgtacacagtaatggaaacacctatttacattggtacctgcagaagccaggccagtctccaaagctcctgatctacaaagtttccaaccgattttctggggtcccagacaggttcagtggcagtggatcagggacagatttcacactcaagatcagcagagtggaggctgaggatctgggagtttatttctgctctcaaagtacacatgttccgctcacgttcggtgctgggaccaagctggagctgaaacgggctgatgctgcaccaactgtatccatcttcccaccatccagtgagcagttaacatctggaggtgcctcagtcgtgtgcttcttgaacaacttctaccccaaagacatcaatgtcaagtggaagattgatggcagtgaacgacaaaatggcgtcctgaacagttggactgatcaggacagcaaagacagcacctacagcatgagcagcaccctcacgttgaccaaggacgagtatgaacgacataacagctatacctgtgaggccactcacaagacatcaacttcacccattgtcaagagcttcaacaggaatgagtgttagtaactcgaggacggggtgaactacgcctgaggatccgatctttttccctctgccaaaaattatggggacatcatgaagccccttgagcatctgacttctggctaataaaggaaatttattttcattgcaatagtgtgttggaattttttgtgtctctcactcggaagcaattcgttgatctgaatttcgaccacccataatacccattaccctggtagataagtagcatggcgggttaatcattaactacaaggaacccctagtgatggagttggccactccctctctgcgcgctcgctcgctcactgaggccgggcgaccaaaggtcgcccgacgcccgggctttgcccgggcggcctcagtgagcgagcgagcgcgcagccttaattaacctaattcactggccgtcgttttacaacgtcgtgactgggaaaaccctggcgttacccaacttaatcgccttgcagcacatccccctttcgccagctggcgtaatagcgaagaggcccgcaccgatcgcccttcccaacagttgcgcagcctgaatggcgaatgggacgcgccctgtagcggcgcattaagcgcggcgggtgtggtggttacgcgcagcgtgaccgctacacttgccagcgccctagcgcccgctcctttcgctttcttcccttcctttctcgccacgttcgccggctttccccgtcaagctctaaatcgggggctccctttagggttccgatttagtgctttacggcacctcgaccccaaaaaacttgattagggtgatggttcacgtagtgggccatcgccctgatagacggtttttcgccctttgacgttggagtccacgttctttaatagtggactcttgttccaaactggaacaacactcaaccctatctcggtctattcttttgatttataagggattttgccgatttcggcctattggttaaaaaatgagctgatttaacaaaaatttaacgcgaattttaacaaaatattaacgcttacaatttaggtggcacttttcggggaaatgtgcgcggaacccctatttgtttatttttctaaatacattcaaatatgtatccgctcatgagacaataaccctgataaatgcttcaataatattgaaaaaggaagagtatgagtattcaacatttccgtgtcgcccttattcccttttttgcggcattttgccttcctgtttttgctcacccagaaacgctggtgaaagtaaaagatgctgaagatcagttgggtgcacgagtgggttacatcgaactggatctcaacagcggtaagatccttgagagttttcgccccgaagaacgttttccaatgatgagcacttttaaagttctgctatgtggcgcggtattatcccgtattgacgccgggcaagagcaactcggtcgccgcatacactattctcagaatgacttggttgagtactcaccagtcacagaaaagcatcttacggatggcatgacagtaagagaattatgcagtgctgccataaccatgagtgataacactgcggccaacttacttctgacaacgatcggaggaccgaaggagctaaccgcttttttgcacaacatgggggatcatgtaactcgccttgatcgttgggaaccggagctgaatgaagccataccaaacgacgagcgtgacaccacgatgcctgtagcaatggcaacaacgttgcgcaaactattaactggcgaactacttactctagcttcccggcaacaattaatagactggatggaggcggataaagttgcaggaccacttctgcgctcggcccttccggctggctggtttattgctgataaatctggagccggtgagcgtgggtctcgcggtatcattgcagcactggggccagatggtaagccctcccgtatcgtagttatctacacgacggggagtcaggcaactatggatgaacgaaatagacagatcgctgagataggtgcctcactgattaagcattggtaactgtcagaccaagtttactcatatatactttagattgatttaaaacttcatttttaatttaaaaggatctaggtgaagatcctttttgataatctcatgaccaaaatcccttaacgtgagttttcgttccactgagcgtcagaccccgtagaaaagatcaaaggatcttcttgagatcctttttttctgcgcgtaatctgctgcttgcaaacaaaaaaaccaccgctaccagcggtggtttgtttgccggatcaagagctaccaactctttttccgaaggtaactggcttcagcagagcgcagataccaaatactgttcttctagtgtagccgtagttaggccaccacttcaagaactctgtagcaccgcctacatacctcgctctgctaatcctgttaccagtggctgctgccagtggcgataagtcgtgtcttaccgggttggactcaagacgatagttaccggataaggcgcagcggtcgggctgaacggggggttcgtgcacacagcccagcttggagcgaacgacctacaccgaactgagatacctacagcgtgagctatgagaaagcgccacgcttcccgaagggagaaaggcggacaggtatccggtaagcggcagggtcggaacaggagagcgcacgagggagcttccagggggaaacgcctggtatctttatagtcctgtcgggtttcgccacctctgacttgagcgtcgatttttgtgatgctcgtcaggggggcggagcctatggaaaaacgccagcaacgcggcctttttacggttcctggccttttgctggccttttgctcacatgttctttcctgcgttatcccctgattctgtggataaccgtattaccgcctttgagtgagctgataccgctcgccgcagccgaacgaccgagcgcagcgagtcagtgagcgaggaagcggaagagcgcccaatacgcaaaccgcctctccccgcgcgttggccgattcattaatgcagctggcacgacaggtttcccgactggaaagcgggcagtgagcgcaacgcaattaatgtgagttagctcactcattaggcaccccaggctttacactttatgcttccggctcgtatgttgtgtggaattgtgagcggataacaatttcacacaggaaacagctatgaccatgattacgccagatttaattaag

SEQ ID NO: 4296 - DNA, 3607 bp, Artificial Sequence
  Description of Artificial Sequence: Synthetic polynucleotide
ctgcgcgctcgctcgctcactgaggccgcccgggcaaagcccgggcgtcgggcgacctttggtcgcccggcctcagtgagcgagcgagcgcgcagagagggagtggccaactccatcactaggggttccttgtagttaatgattaacccgccatgctacttatctaccagggtaatggggatcctctagaactatagctagtcgacattgattattgactagttattaatagtaatcaattacggggtcattagttcatagcccatatatggagttccgcgttacataacttacggtaaatggcccgcctggctgaccgcccaacgacccccgcccattgacgtcaataatgacgtatgttcccatagtaacgccaatagggactttccattgacgtcaatgggtggagtatttacggtaaactgcccacttggcagtacatcaagtgtatcatatgccaagtacgccccctattgacgtcaatgacggtaaatggcccgcctggcattatgcccagtacatgaccttatgggactttcctacttggcagtacatctacgtattagtcatcgctattaccatgtcgaggccacgttctgcttcactctccccatctcccccccctccccacccccaattttgtatttatttattttttaattattttgtgcagcgatgggggcggggggggggggcgcgcgccaggcggggcggggcggggcgaggggcggggcggggcgaggcggagaggtgcggcggcagccaatcagagcggcgcgctccgaaagtttccttttatggcgaggcggcggcggcggcggccctataaaaagcgaagcgcgcggcgggcgggagcaagcttgaactgaaaaaccagaaagttaactggtaagtttagtctttttgtcttttatttcaggtcccggatccggtggtggtgcaaatcaaagaactgctcctcagtggatgttgcctttacttctaggcctgtacggaagtgttacttctgctctaaaagctgcggaattgtacccgcggccgatccaccggtgccgccaccatggaatggacctgggtctttctcttcctcctgtcagtaactgcaggtgtccactcccaggttcagctgcagcagtctggagctgagctgatgaagcctggggcctcagtgaagatatcctgcaaggctactggctacacattcagtaactactggatagagtgggtaaagcagaggcctggacatggccttgagtggattggagagattttacctggaagtgatagtattaagtacaatgagaatttcaagggcaaggccacattcactgcagatacatcctccaacacagcctacatgcaactcagcagcctgacatctgaggactctgccgtctattactgtgcaagaagggggaactacccagactactggggccaaggcaccactctcacagtctcctcagccaaaacgacacccccatctgtctatccactggcccctggatctgctgcccaaactaactccatggtgaccctgggatgcctggtcaagggctatttccctgagccagtgacagtgacctggaactctggatccctgtccagcggtgtgcacaccttcccagctgtcctgcagtctgacctctacactctgagcagctcagtgactgtcccctccagcacctggcccagcgagaccgtcacctgcaacgttgcccacccggccagcagcaccaaggtggacaagaaaattgtgcccagggattgtggttgtaagccttgcatatgtacagtcccagaagtatcatctgtcttcatcttccccccaaagcccaaggatgtgctcaccattactctgactcctaaggtcacgtgtgttgtggtagacatcagcaaggatgatcccgaggtccagttcagctggtttgtagatgatgtggaggtgcacacagctcagacgcaaccccgggaggagcagttcaacagcactttccgctcagtcagtgaacttcccatcatgcaccaggactggctcaatggcaaggagttcaaatgcagggtcaacagtgcagctttccctgcccccatcgagaaaaccatctccaaaaccaaaggcagaccgaaggctccacaggtgtacaccattccacctcccaaggagcagatggccaaggataaagtcagtctgacctgcatgataacagacttcttccctgaagacattactgtggagtggcagtggaatgggcagccagcggagaactacaagaacactcagcccatcatggacacagatggctcttacttcgtctacagcaagctcaatgtgcagaagagcaactgggaggcaggaaatactttcacctgctctgtgttacatgagggcctgcacaaccaccatactgagaagagcctctcccactctcctggtggaagcggagtgaaacagactttgaattttgaccttctcaagttggcgggagacgtggagtccaaccctggacctatgaagttgcctgttaggctgttggtgctgatgttctggattcctgcttccagcagtgatgttgtgatgacccaaactccactctccctgcctgtcagtcttggagatcaagcctccatctcttgcagatctagtcagagccttgtacacagtaatggaaacacctatttacattggtacctgcagaagccaggccagtctccaaagctcctgatctacaaagtttccaaccgattttctggggtcccagacaggttcagtggcagtggatcagggacagatttcacactcaagatcagcagagtggaggctgaggatctgggagtttatttctgctctcaaagtacacatgttccgctcacgttcggtgctgggaccaagctggagctgaaacgggctgatgctgcaccaactgtatccatcttcccaccatccagtgagcagttaacatctggaggtgcctcagtcgtgtgcttcttgaacaacttctaccccaaagacatcaatgtcaagtggaagattgatggcagtgaacgacaaaatggcgtcctgaacagttggactgatcaggacagcaaagacagcacctacagcatgagcagcaccctcacgttgaccaaggacgagtatgaacgacataacagctatacctgtgaggccactcacaagacatcaacttcacccattgtcaagagcttcaacaggaatgagtgttagtaactcgaggacggggtgaactacgcctgaggatccgatctttttccctctgccaaaaattatggggacatcatgaagccccttgagcatctgacttctggctaataaaggaaatttattttcattgcaatagtgtgttggaattttttgtgtctctcactcggaagcaattcgttgatctgaatttcgaccacccataatacccattaccctggtagataagtagcatggcgggttaatcattaactacaaggaacccctagtgatggagttggccactccctctctgcgcgctcgctcgctcactgaggccgggcgaccaaaggtcgcccgacgcccgggctttgcccgggcggcctcagtgagcgagcgagcgcgcag

SEQ ID NO: 4297 - DNA, 6428 bp, Artificial Sequence
  Description of Artificial Sequence: Synthetic polynucleotide
gccttaattaggctgcgcgctcgctcgctcactgaggccgcccgggcaaagcccgggcgtcgggcgacctttggtcgcccggcctcagtgagcgagcgagcgcgcagagagggagtggccaactccatcactaggggttccttgtagttaatgattaacccgccatgctacttatctaccagggtaatggggatcctctagaactatagctagtcgacattgattattgactagttattaatagtaatcaattacggggtcattagttcatagcccatatatggagttccgcgttacataacttacggtaaatggcccgcctggctgaccgcccaacgacccccgcccattgacgtcaataatgacgtatgttcccatagtaacgccaatagggactttccattgacgtcaatgggtggagtatttacggtaaactgcccacttggcagtacatcaagtgtatcatatgccaagtacgccccctattgacgtcaatgacggtaaatggcccgcctggcattatgcccagtacatgaccttatgggactttcctacttggcagtacatctacgtattagtcatcgctattaccatgtcgaggccacgttctgcttcactctccccatctcccccccctccccacccccaattttgtatttatttattttttaattattttgtgcagcgatgggggcggggggggggggcgcgcgccaggcggggcggggcggggcgaggggcggggcggggcgaggcggagaggtgcggcggcagccaatcagagcggcgcgctccgaaagtttccttttatggcgaggcggcggcggcggcggccctataaaaagcgaagcgcgcggcgggcgggagcaagcttgaactgaaaaaccagaaagttaactggtaagtttagtctttttgtcttttatttcaggtcccggatccggtggtggtgcaaatcaaagaactgctcctcagtggatgttgcctttacttctaggcctgtacggaagtgttacttctgctctaaaagctgcggaattgtacccgcggccgatccaccggtgccgccaccatgaagttgcctgttaggctgttggtgctgatgttctggattcctgcttccagcagtgatgttgtgatgacccaaactccactctccctgcctgtcagtcttggagatcaagcctccatctcttgcagatctagtcagagccttgtacacagtaatggaaacacctatttacattggtacctgcagaagccaggccagtctccaaagctcctgatctacaaagtttccaaccgattttctggggtcccagacaggttcagtggcagtggatcagggacagatttcacactcaagatcagcagagtggaggctgaggatctgggagtttatttctgctctcaaagtacacatgttccgctcacgttcggtgctgggaccaagctggagctgaaacgggctgatgctgcaccaactgtatccatcttcccaccatccagtgagcagttaacatctggaggtgcctcagtcgtgtgcttcttgaacaacttctaccccaaagacatcaatgtcaagtggaagattgatggcagtgaacgacaaaatggcgtcctgaacagttggactgatcaggacagcaaagacagcacctacagcatgagcagcaccctcacgttgaccaaggacgagtatgaacgacataacagctatacctgtgaggccactcacaagacatcaacttcacccattgtcaagagcttcaacaggaatgagtgtggaagcggagtgaaacagactttgaattttgaccttctcaagttggcgggagacgtggagtccaaccctggacctatggaatggacctgggtctttctcttcctcctgtcagtaactgcaggtgtccactcccaggttcagctgcagcagtctggagctgagctgatgaagcctggggcctcagtgaagatatcctgcaaggctactggctacacattcagtaactactggatagagtgggtaaagcagaggcctggacatggccttgagtggattggagagattttacctggaagtgatagtattaagtacaatgagaatttcaagggcaaggccacattcactgcagatacatcctccaacacagcctacatgcaactcagcagcctgacatctgaggactctgccgtctattactgtgcaagaagggggaactacccagactactggggccaaggcaccactctcacagtctcctcagccaaaacgacacccccatctgtctatccactggcccctggatctgctgcccaaactaactccatggtgaccctgggatgcctggtcaagggctatttccctgagccagtgacagtgacctggaactctggatccctgtccagcggtgtgcacaccttcccagctgtcctgcagtctgacctctacactctgagcagctcagtgactgtcccctccagcacctggcccagcgagaccgtcacctgcaacgttgcccacccggccagcagcaccaaggtggacaagaaaattgtgcccagggattgtggttgtaagccttgcatatgtacagtcccagaagtatcatctgtcttcatcttccccccaaagcccaaggatgtgctcaccattactctgactcctaaggtcacgtgtgttgtggtagacatcagcaaggatgatcccgaggtccagttcagctggtttgtagatgatgtggaggtgcacacagctcagacgcaaccccgggaggagcagttcaacagcactttccgctcagtcagtgaacttcccatcatgcaccaggactggctcaatggcaaggagttcaaatgcagggtcaacagtgcagctttccctgcccccatcgagaaaaccatctccaaaaccaaaggcagaccgaaggctccacaggtgtacaccattccacctcccaaggagcagatggccaaggataaagtcagtctgacctgcatgataacagacttcttccctgaagacattactgtggagtggcagtggaatgggcagccagcggagaactacaagaacactcagcccatcatggacacagatggctcttacttcgtctacagcaagctcaatgtgcagaagagcaactgggaggcaggaaatactttcacctgctctgtgttacatgagggcctgcacaaccaccatactgagaagagcctctcccactctcctggttagtaactcgaggacggggtgaactacgcctgaggatccgatctttttccctctgccaaaaattatggggacatcatgaagccccttgagcatctgacttctggctaataaaggaaatttattttcattgcaatagtgtgttggaattttttgtgtctctcactcggaagcaattcgttgatctgaatttcgaccacccataatacccattaccctggtagataagtagcatggcgggttaatcattaactacaaggaacccctagtgatggagttggccactccctctctgcgcgctcgctcgctcactgaggccgggcgaccaaaggtcgcccgacgcccgggctttgcccgggcggcctcagtgagcgagcgagcgcgcagccttaattaacctaattcactggccgtcgttttacaacgtcgtgactgggaaaaccctggcgttacccaacttaatcgccttgcagcacatccccctttcgccagctggcgtaatagcgaagaggcccgcaccgatcgcccttcccaacagttgcgcagcctgaatggcgaatgggacgcgccctgtagcggcgcattaagcgcggcgggtgtggtggttacgcgcagcgtgaccgctacacttgccagcgccctagcgcccgctcctttcgctttcttcccttcctttctcgccacgttcgccggctttccccgtcaagctctaaatcgggggctccctttagggttccgatttagtgctttacggcacctcgaccccaaaaaacttgattagggtgatggttcacgtagtgggccatcgccctgatagacggtttttcgccctttgacgttggagtccacgttctttaatagtggactcttgttccaaactggaacaacactcaaccctatctcggtctattcttttgatttataagggattttgccgatttcggcctattggttaaaaaatgagctgatttaacaaaaatttaacgcgaattttaacaaaatattaacgcttacaatttaggtggcacttttcggggaaatgtgcgcggaacccctatttgtttatttttctaaatacattcaaatatgtatccgctcatgagacaataaccctgataaatgcttcaataatattgaaaaaggaagagtatgagtattcaacatttccgtgtcgcccttattcccttttttgcggcattttgccttcctgtttttgctcacccagaaacgctggtgaaagtaaaagatgctgaagatcagttgggtgcacgagtgggttacatcgaactggatctcaacagcggtaagatccttgagagttttcgccccgaagaacgttttccaatgatgagcacttttaaagttctgctatgtggcgcggtattatcccgtattgacgccgggcaagagcaactcggtcgccgcatacactattctcagaatgacttggttgagtactcaccagtcacagaaaagcatcttacggatggcatgacagtaagagaattatgcagtgctgccataaccatgagtgataacactgcggccaacttacttctgacaacgatcggaggaccgaaggagctaaccgcttttttgcacaacatgggggatcatgtaactcgccttgatcgttgggaaccggagctgaatgaagccataccaaacgacgagcgtgacaccacgatgcctgtagcaatggcaacaacgttgcgcaaactattaactggcgaactacttactctagcttcccggcaacaattaatagactggatggaggcggataaagttgcaggaccacttctgcgctcggcccttccggctggctggtttattgctgataaatctggagccggtgagcgtgggtctcgcggtatcattgcagcactggggccagatggtaagccctcccgtatcgtagttatctacacgacggggagtcaggcaactatggatgaacgaaatagacagatcgctgagataggtgcctcactgattaagcattggtaactgtcagaccaagtttactcatatatactttagattgatttaaaacttcatttttaatttaaaaggatctaggtgaagatcctttttgataatctcatgaccaaaatcccttaacgtgagttttcgttccactgagcgtcagaccccgtagaaaagatcaaaggatcttcttgagatcctttttttctgcgcgtaatctgctgcttgcaaacaaaaaaaccaccgctaccagcggtggtttgtttgccggatcaagagctaccaactctttttccgaaggtaactggcttcagcagagcgcagataccaaatactgttcttctagtgtagccgtagttaggccaccacttcaagaactctgtagcaccgcctacatacctcgctctgctaatcctgttaccagtggctgctgccagtggcgataagtcgtgtcttaccgggttggactcaagacgatagttaccggataaggcgcagcggtcgggctgaacggggggttcgtgcacacagcccagcttggagcgaacgacctacaccgaactgagatacctacagcgtgagctatgagaaagcgccacgcttcccgaagggagaaaggcggacaggtatccggtaagcggcagggtcggaacaggagagcgcacgagggagcttccagggggaaacgcctggtatctttatagtcctgtcgggtttcgccacctctgacttgagcgtcgatttttgtgatgctcgtcaggggggcggagcctatggaaaaacgccagcaacgcggcctttttacggttcctggccttttgctggccttttgctcacatgttctttcctgcgttatcccctgattctgtggataaccgtattaccgcctttgagtgagctgataccgctcgccgcagccgaacgaccgagcgcagcgagtcagtgagcgaggaagcggaagagcgcccaatacgcaaaccgcctctccccgcgcgttggccgattcattaatgcagctggcacgacaggtttcccgactggaaagcgggcagtgagcgcaacgcaattaatgtgagttagctcactcattaggcaccccaggctttacactttatgcttccggctcgtatgttgtgtggaattgtgagcggataacaatttcacacaggaaacagctatgaccatgattacgccagatttaattaag

SEQ ID NO: 4298 - DNA, 3607 bp, Artificial Sequence
  Description of Artificial Sequence: Synthetic polynucleotide
ctgcgcgctcgctcgctcactgaggccgcccgggcaaagcccgggcgtcgggcgacctttggtcgcccggcctcagtgagcgagcgagcgcgcagagagggagtggccaactccatcactaggggttccttgtagttaatgattaacccgccatgctacttatctaccagggtaatggggatcctctagaactatagctagtcgacattgattattgactagttattaatagtaatcaattacggggtcattagttcatagcccatatatggagttccgcgttacataacttacggtaaatggcccgcctggctgaccgcccaacgacccccgcccattgacgtcaataatgacgtatgttcccatagtaacgccaatagggactttccattgacgtcaatgggtggagtatttacggtaaactgcccacttggcagtacatcaagtgtatcatatgccaagtacgccccctattgacgtcaatgacggtaaatggcccgcctggcattatgcccagtacatgaccttatgggactttcctacttggcagtacatctacgtattagtcatcgctattaccatgtcgaggccacgttctgcttcactctccccatctcccccccctccccacccccaattttgtatttatttattttttaattattttgtgcagcgatgggggcggggggggggggcgcgcgccaggcggggcggggcggggcgaggggcggggcggggcgaggcggagaggtgcggcggcagccaatcagagcggcgcgctccgaaagtttccttttatggcgaggcggcggcggcggcggccctataaaaagcgaagcgcgcggcgggcgggagcaagcttgaactgaaaaaccagaaagttaactggtaagtttagtctttttgtcttttatttcaggtcccggatccggtggtggtgcaaatcaaagaactgctcctcagtggatgttgcctttacttctaggcctgtacggaagtgttacttctgctctaaaagctgcggaattgtacccgcggccgatccaccggtgccgccaccatgaagttgcctgttaggctgttggtgctgatgttctggattcctgcttccagcagtgatgttgtgatgacccaaactccactctccctgcctgtcagtcttggagatcaagcctccatctcttgcagatctagtcagagccttgtacacagtaatggaaacacctatttacattggtacctgcagaagccaggccagtctccaaagctcctgatctacaaagtttccaaccgattttctggggtcccagacaggttcagtggcagtggatcagggacagatttcacactcaagatcagcagagtggaggctgaggatctgggagtttatttctgctctcaaagtacacatgttccgctcacgttcggtgctgggaccaagctggagctgaaacgggctgatgctgcaccaactgtatccatcttcccaccatccagtgagcagttaacatctggaggtgcctcagtcgtgtgcttcttgaacaacttctaccccaaagacatcaatgtcaagtggaagattgatggcagtgaacgacaaaatggcgtcctgaacagttggactgatcaggacagcaaagacagcacctacagcatgagcagcaccctcacgttgaccaaggacgagtatgaacgacataacagctatacctgtgaggccactcacaagacatcaacttcacccattgtcaagagcttcaacaggaatgagtgtggaagcggagtgaaacagactttgaattttgaccttctcaagttggcgggagacgtggagtccaaccctggacctatggaatggacctgggtctttctcttcctcctgtcagtaactgcaggtgtccactcccaggttcagctgcagcagtctggagctgagctgatgaagcctggggcctcagtgaagatatcctgcaaggctactggctacacattcagtaactactggatagagtgggtaaagcagaggcctggacatggccttgagtggattggagagattttacctggaagtgatagtattaagtacaatgagaatttcaagggcaaggccacattcactgcagatacatcctccaacacagcctacatgcaactcagcagcctgacatctgaggactctgccgtctattactgtgcaagaagggggaactacccagactactggggccaaggcaccactctcacagtctcctcagccaaaacgacacccccatctgtctatccactggcccctggatctgctgcccaaactaactccatggtgaccctgggatgcctggtcaagggctatttccctgagccagtgacagtgacctggaactctggatccctgtccagcggtgtgcacaccttcccagctgtcctgcagtctgacctctacactctgagcagctcagtgactgtcccctccagcacctggcccagcgagaccgtcacctgcaacgttgcccacccggccagcagcaccaaggtggacaagaaaattgtgcccagggattgtggttgtaagccttgcatatgtacagtcccagaagtatcatctgtcttcatcttccccccaaagcccaaggatgtgctcaccattactctgactcctaaggtcacgtgtgttgtggtagacatcagcaaggatgatcccgaggtccagttcagctggtttgtagatgatgtggaggtgcacacagctcagacgcaaccccgggaggagcagttcaacagcactttccgctcagtcagtgaacttcccatcatgcaccaggactggctcaatggcaaggagttcaaatgcagggtcaacagtgcagctttccctgcccccatcgagaaaaccatctccaaaaccaaaggcagaccgaaggctccacaggtgtacaccattccacctcccaaggagcagatggccaaggataaagtcagtctgacctgcatgataacagacttcttccctgaagacattactgtggagtggcagtggaatgggcagccagcggagaactacaagaacactcagcccatcatggacacagatggctcttacttcgtctacagcaagctcaatgtgcagaagagcaactgggaggcaggaaatactttcacctgctctgtgttacatgagggcctgcacaaccaccatactgagaagagcctctcccactctcctggttagtaactcgaggacggggtgaactacgcctgaggatccgatctttttccctctgccaaaaattatggggacatcatgaagccccttgagcatctgacttctggctaataaaggaaatttattttcattgcaatagtgtgttggaattttttgtgtctctcactcggaagcaattcgttgatctgaatttcgaccacccataatacccattaccctggtagataagtagcatggcgggttaatcattaactacaaggaacccctagtgatggagttggccactccctctctgcgcgctcgctcgctcactgaggccgggcgaccaaaggtcgcccgacgcccgggctttgcccgggcggcctcagtgagcgagcgagcgcgcag

SEQ ID NO: 4299 - DNA, 6440 bp, Artificial Sequence
  Description of Artificial Sequence: Synthetic polynucleotide
gccttaattaggctgcgcgctcgctcgctcactgaggccgcccgggcaaagcccgggcgtcgggcgacctttggtcgcccggcctcagtgagcgagcgagcgcgcagagagggagtggccaactccatcactaggggttccttgtagttaatgattaacccgccatgctacttatctaccagggtaatggggatcctctagaactatagctagtcgacattgattattgactagttattaatagtaatcaattacggggtcattagttcatagcccatatatggagttccgcgttacataacttacggtaaatggcccgcctggctgaccgcccaacgacccccgcccattgacgtcaataatgacgtatgttcccatagtaacgccaatagggactttccattgacgtcaatgggtggagtatttacggtaaactgcccacttggcagtacatcaagtgtatcatatgccaagtacgccccctattgacgtcaatgacggtaaatggcccgcctggcattatgcccagtacatgaccttatgggactttcctacttggcagtacatctacgtattagtcatcgctattaccatgtcgaggccacgttctgcttcactctccccatctcccccccctccccacccccaattttgtatttatttattttttaattattttgtgcagcgatgggggcggggggggggggcgcgcgccaggcggggcggggcggggcgaggggcggggcggggcgaggcggagaggtgcggcggcagccaatcagagcggcgcgctccgaaagtttccttttatggcgaggcggcggcggcggcggccctataaaaagcgaagcgcgcggcgggcgggagcaagcttgaactgaaaaaccagaaagttaactggtaagtttagtctttttgtcttttatttcaggtcccggatccggtggtggtgcaaatcaaagaactgctcctcagtggatgttgcctttacttctaggcctgtacggaagtgttacttctgctctaaaagctgcggaattgtacccgcggccgatccaccggtgccgccaccatggaatggacctgggtctttctcttcctcctgtcagtaactgcaggtgtccactcccaggttcagctgcagcagtctggagctgagctgatgaagcctggggcctcagtgaagatatcctgcaaggctactggctacacattcagtaactactggatagagtgggtaaagcagaggcctggacatggccttgagtggattggagagattttacctggaagtgatagtattaagtacaatgagaatttcaagggcaaggccacattcactgcagatacatcctccaacacagcctacatgcaactcagcagcctgacatctgaggactctgccgtctattactgtgcaagaagggggaactacccagactactggggccaaggcaccactctcacagtctcctcagccaaaacgacacccccatctgtctatccactggcccctggatctgctgcccaaactaactccatggtgaccctgggatgcctggtcaagggctatttccctgagccagtgacagtgacctggaactctggatccctgtccagcggtgtgcacaccttcccagctgtcctgcagtctgacctctacactctgagcagctcagtgactgtcccctccagcacctggcccagcgagaccgtcacctgcaacgttgcccacccggccagcagcaccaaggtggacaagaaaattgtgcccagggattgtggttgtaagccttgcatatgtacagtcccagaagtatcatctgtcttcatcttccccccaaagcccaaggatgtgctcaccattactctgactcctaaggtcacgtgtgttgtggtagacatcagcaaggatgatcccgaggtccagttcagctggtttgtagatgatgtggaggtgcacacagctcagacgcaaccccgggaggagcagttcaacagcactttccgctcagtcagtgaacttcccatcatgcaccaggactggctcaatggcaaggagttcaaatgcagggtcaacagtgcagctttccctgcccccatcgagaaaaccatctccaaaaccaaaggcagaccgaaggctccacaggtgtacaccattccacctcccaaggagcagatggccaaggataaagtcagtctgacctgcatgataacagacttcttccctgaagacattactgtggagtggcagtggaatgggcagccagcggagaactacaagaacactcagcccatcatggacacagatggctcttacttcgtctacagcaagctcaatgtgcagaagagcaactgggaggcaggaaatactttcacctgctctgtgttacatgagggcctgcacaaccaccatactgagaagagcctctcccactctcctggtcgggccaagcggggaagcggagtgaaacagactttgaattttgaccttctcaagttggcgggagacgtggagtccaaccctggacctatgaagttgcctgttaggctgttggtgctgatgttctggattcctgcttccagcagtgatgttgtgatgacccaaactccactctccctgcctgtcagtcttggagatcaagcctccatctcttgcagatctagtcagagccttgtacacagtaatggaaacacctatttacattggtacctgcagaagccaggccagtctccaaagctcctgatctacaaagtttccaaccgattttctggggtcccagacaggttcagtggcagtggatcagggacagatttcacactcaagatcagcagagtggaggctgaggatctgggagtttatttctgctctcaaagtacacatgttccgctcacgttcggtgctgggaccaagctggagctgaaacgggctgatgctgcaccaactgtatccatcttcccaccatccagtgagcagttaacatctggaggtgcctcagtcgtgtgcttcttgaacaacttctaccccaaagacatcaatgtcaagtggaagattgatggcagtgaacgacaaaatggcgtcctgaacagttggactgatcaggacagcaaagacagcacctacagcatgagcagcaccctcacgttgaccaaggacgagtatgaacgacataacagctatacctgtgaggccactcacaagacatcaacttcacccattgtcaagagcttcaacaggaatgagtgttagtaactcgaggacggggtgaactacgcctgaggatccgatctttttccctctgccaaaaattatggggacatcatgaagccccttgagcatctgacttctggctaataaaggaaatttattttcattgcaatagtgtgttggaattttttgtgtctctcactcggaagcaattcgttgatctgaatttcgaccacccataatacccattaccctggtagataagtagcatggcgggttaatcattaactacaaggaacccctagtgatggagttggccactccctctctgcgcgctcgctcgctcactgaggccgggcgaccaaaggtcgcccgacgcccgggctttgcccgggcggcctcagtgagcgagcgagcgcgcagccttaattaacctaattcactggccgtcgttttacaacgtcgtgactgggaaaaccctggcgttacccaacttaatcgccttgcagcacatccccctttcgccagctggcgtaatagcgaagaggcccgcaccgatcgcccttcccaacagttgcgcagcctgaatggcgaatgggacgcgccctgtagcggcgcattaagcgcggcgggtgtggtggttacgcgcagcgtgaccgctacacttgccagcgccctagcgcccgctcctttcgctttcttcccttcctttctcgccacgttcgccggctttccccgtcaagctctaaatcgggggctccctttagggttccgatttagtgctttacggcacctcgaccccaaaaaacttgattagggtgatggttcacgtagtgggccatcgccctgatagacggtttttcgccctttgacgttggagtccacgttctttaatagtggactcttgttccaaactggaacaacactcaaccctatctcggtctattcttttgatttataagggattttgccgatttcggcctattggttaaaaaatgagctgatttaacaaaaatttaacgcgaattttaacaaaatattaacgcttacaatttaggtggcacttttcggggaaatgtgcgcggaacccctatttgtttatttttctaaatacattcaaatatgtatccgctcatgagacaataaccctgataaatgcttcaataatattgaaaaaggaagagtatgagtattcaacatttccgtgtcgcccttattcccttttttgcggcattttgccttcctgtttttgctcacccagaaacgctggtgaaagtaaaagatgctgaagatcagttgggtgcacgagtgggttacatcgaactggatctcaacagcggtaagatccttgagagttttcgccccgaagaacgttttccaatgatgagcacttttaaagttctgctatgtggcgcggtattatcccgtattgacgccgggcaagagcaactcggtcgccgcatacactattctcagaatgacttggttgagtactcaccagtcacagaaaagcatcttacggatggcatgacagtaagagaattatgcagtgctgccataaccatgagtgataacactgcggccaacttacttctgacaacgatcggaggaccgaaggagctaaccgcttttttgcacaacatgggggatcatgtaactcgccttgatcgttgggaaccggagctgaatgaagccataccaaacgacgagcgtgacaccacgatgcctgtagcaatggcaacaacgttgcgcaaactattaactggcgaactacttactctagcttcccggcaacaattaatagactggatggaggcggataaagttgcaggaccacttctgcgctcggcccttccggctggctggtttattgctgataaatctggagccggtgagcgtgggtctcgcggtatcattgcagcactggggccagatggtaagccctcccgtatcgtagttatctacacgacggggagtcaggcaactatggatgaacgaaatagacagatcgctgagataggtgcctcactgattaagcattggtaactgtcagaccaagtttactcatatatactttagattgatttaaaacttcatttttaatttaaaaggatctaggtgaagatcctttttgataatctcatgaccaaaatcccttaacgtgagttttcgttccactgagcgtcagaccccgtagaaaagatcaaaggatcttcttgagatcctttttttctgcgcgtaatctgctgcttgcaaacaaaaaaaccaccgctaccagcggtggtttgtttgccggatcaagagctaccaactctttttccgaaggtaactggcttcagcagagcgcagataccaaatactgttcttctagtgtagccgtagttaggccaccacttcaagaactctgtagcaccgcctacatacctcgctctgctaatcctgttaccagtggctgctgccagtggcgataagtcgtgtcttaccgggttggactcaagacgatagttaccggataaggcgcagcggtcgggctgaacggggggttcgtgcacacagcccagcttggagcgaacgacctacaccgaactgagatacctacagcgtgagctatgagaaagcgccacgcttcccgaagggagaaaggcggacaggtatccggtaagcggcagggtcggaacaggagagcgcacgagggagcttccagggggaaacgcctggtatctttatagtcctgtcgggtttcgccacctctgacttgagcgtcgatttttgtgatgctcgtcaggggggcggagcctatggaaaaacgccagcaacgcggcctttttacggttcctggccttttgctggccttttgctcacatgttctttcctgcgttatcccctgattctgtggataaccgtattaccgcctttgagtgagctgataccgctcgccgcagccgaacgaccgagcgcagcgagtcagtgagcgaggaagcggaagagcgcccaatacgcaaaccgcctctccccgcgcgttggccgattcattaatgcagctggcacgacaggtttcccgactggaaagcgggcagtgagcgcaacgcaattaatgtgagttagctcactcattaggcaccccaggctttacactttatgcttccggctcgtatgttgtgtggaattgtgagcggataacaatttcacacaggaaacagctatgaccatgattacgccagatttaattaag

SEQ ID NO: 4300 - DNA, 3619 bp, Artificial Sequence
  Description of Artificial Sequence: Synthetic polynucleotide
ctgcgcgctcgctcgctcactgaggccgcccgggcaaagcccgggcgtcgggcgacctttggtcgcccggcctcagtgagcgagcgagcgcgcagagagggagtggccaactccatcactaggggttccttgtagttaatgattaacccgccatgctacttatctaccagggtaatggggatcctctagaactatagctagtcgacattgattattgactagttattaatagtaatcaattacggggtcattagttcatagcccatatatggagttccgcgttacataacttacggtaaatggcccgcctggctgaccgcccaacgacccccgcccattgacgtcaataatgacgtatgttcccatagtaacgccaatagggactttccattgacgtcaatgggtggagtatttacggtaaactgcccacttggcagtacatcaagtgtatcatatgccaagtacgccccctattgacgtcaatgacggtaaatggcccgcctggcattatgcccagtacatgaccttatgggactttcctacttggcagtacatctacgtattagtcatcgctattaccatgtcgaggccacgttctgcttcactctccccatctcccccccctccccacccccaattttgtatttatttattttttaattattttgtgcagcgatgggggcggggggggggggcgcgcgccaggcggggcggggcggggcgaggggcggggcggggcgaggcggagaggtgcggcggcagccaatcagagcggcgcgctccgaaagtttccttttatggcgaggcggcggcggcggcggccctataaaaagcgaagcgcgcggcgggcgggagcaagcttgaactgaaaaaccagaaagttaactggtaagtttagtctttttgtcttttatttcaggtcccggatccggtggtggtgcaaatcaaagaactgctcctcagtggatgttgcctttacttctaggcctgtacggaagtgttacttctgctctaaaagctgcggaattgtacccgcggccgatccaccggtgccgccaccatggaatggacctgggtctttctcttcctcctgtcagtaactgcaggtgtccactcccaggttcagctgcagcagtctggagctgagctgatgaagcctggggcctcagtgaagatatcctgcaaggctactggctacacattcagtaactactggatagagtgggtaaagcagaggcctggacatggccttgagtggattggagagattttacctggaagtgatagtattaagtacaatgagaatttcaagggcaaggccacattcactgcagatacatcctccaacacagcctacatgcaactcagcagcctgacatctgaggactctgccgtctattactgtgcaagaagggggaactacccagactactggggccaaggcaccactctcacagtctcctcagccaaaacgacacccccatctgtctatccactggcccctggatctgctgcccaaactaactccatggtgaccctgggatgcctggtcaagggctatttccctgagccagtgacagtgacctggaactctggatccctgtccagcggtgtgcacaccttcccagctgtcctgcagtctgacctctacactctgagcagctcagtgactgtcccctccagcacctggcccagcgagaccgtcacctgcaacgttgcccacccggccagcagcaccaaggtggacaagaaaattgtgcccagggattgtggttgtaagccttgcatatgtacagtcccagaagtatcatctgtcttcatcttccccccaaagcccaaggatgtgctcaccattactctgactcctaaggtcacgtgtgttgtggtagacatcagcaaggatgatcccgaggtccagttcagctggtttgtagatgatgtggaggtgcacacagctcagacgcaaccccgggaggagcagttcaacagcactttccgctcagtcagtgaacttcccatcatgcaccaggactggctcaatggcaaggagttcaaatgcagggtcaacagtgcagctttccctgcccccatcgagaaaaccatctccaaaaccaaaggcagaccgaaggctccacaggtgtacaccattccacctcccaaggagcagatggccaaggataaagtcagtctgacctgcatgataacagacttcttccctgaagacattactgtggagtggcagtggaatgggcagccagcggagaactacaagaacactcagcccatcatggacacagatggctcttacttcgtctacagcaagctcaatgtgcagaagagcaactgggaggcaggaaatactttcacctgctctgtgttacatgagggcctgcacaaccaccatactgagaagagcctctcccactctcctggtcgggccaagcggggaagcggagtgaaacagactttgaattttgaccttctcaagttggcgggagacgtggagtccaaccctggacctatgaagttgcctgttaggctgttggtgctgatgttctggattcctgcttccagcagtgatgttgtgatgacccaaactccactctccctgcctgtcagtcttggagatcaagcctccatctcttgcagatctagtcagagccttgtacacagtaatggaaacacctatttacattggtacctgcagaagccaggccagtctccaaagctcctgatctacaaagtttccaaccgattttctggggtcccagacaggttcagtggcagtggatcagggacagatttcacactcaagatcagcagagtggaggctgaggatctgggagtttatttctgctctcaaagtacacatgttccgctcacgttcggtgctgggaccaagctggagctgaaacgggctgatgctgcaccaactgtatccatcttcccaccatccagtgagcagttaacatctggaggtgcctcagtcgtgtgcttcttgaacaacttctaccccaaagacatcaatgtcaagtggaagattgatggcagtgaacgacaaaatggcgtcctgaacagttggactgatcaggacagcaaagacagcacctacagcatgagcagcaccctcacgttgaccaaggacgagtatgaacgacataacagctatacctgtgaggccactcacaagacatcaacttcacccattgtcaagagcttcaacaggaatgagtgttagtaactcgaggacggggtgaactacgcctgaggatccgatctttttccctctgccaaaaattatggggacatcatgaagccccttgagcatctgacttctggctaataaaggaaatttattttcattgcaatagtgtgttggaattttttgtgtctctcactcggaagcaattcgttgatctgaatttcgaccacccataatacccattaccctggtagataagtagcatggcgggttaatcattaactacaaggaacccctagtgatggagttggccactccctctctgcgcgctcgctcgctcactgaggccgggcgaccaaaggtcgcccgacgcccgggctttgcccgggcggcctcagtgagcgagcgagcgcgcag

SEQ ID NO: 4301 - DNA, 6431 bp, Artificial Sequence
  Description of Artificial Sequence: Synthetic polynucleotide
gccttaattaggctgcgcgctcgctcgctcactgaggccgcccgggcaaagcccgggcgtcgggcgacctttggtcgcccggcctcagtgagcgagcgagcgcgcagagagggagtggccaactccatcactaggggttccttgtagttaatgattaacccgccatgctacttatctaccagggtaatggggatcctctagaactatagctagtcgacattgattattgactagttattaatagtaatcaattacggggtcattagttcatagcccatatatggagttccgcgttacataacttacggtaaatggcccgcctggctgaccgcccaacgacccccgcccattgacgtcaataatgacgtatgttcccatagtaacgccaatagggactttccattgacgtcaatgggtggagtatttacggtaaactgcccacttggcagtacatcaagtgtatcatatgccaagtacgccccctattgacgtcaatgacggtaaatggcccgcctggcattatgcccagtacatgaccttatgggactttcctacttggcagtacatctacgtattagtcatcgctattaccatgtcgaggccacgttctgcttcactctccccatctcccccccctccccacccccaattttgtatttatttattttttaattattttgtgcagcgatgggggcggggggggggggcgcgcgccaggcggggcggggcggggcgaggggcggggcggggcgaggcggagaggtgcggcggcagccaatcagagcggcgcgctccgaaagtttccttttatggcgaggcggcggcggcggcggccctataaaaagcgaagcgcgcggcgggcgggagcaagcttgaactgaaaaaccagaaagttaactggtaagtttagtctttttgtcttttatttcaggtcccggatccggtggtggtgcaaatcaaagaactgctcctcagtggatgttgcctttacttctaggcctgtacggaagtgttacttctgctctaaaagctgcggaattgtacccgcggccgatccaccggtgccgccaccatgaagttgcctgttaggctgttggtgctgatgttctggattcctgcttccagcagtgatgttgtgatgacccaaactccactctccctgcctgtcagtcttggagatcaagcctccatctcttgcagatctagtcagagccttgtacacagtaatggaaacacctatttacattggtacctgcagaagccaggccagtctccaaagctcctgatctacaaagtttccaaccgattttctggggtcccagacaggttcagtggcagtggatcagggacagatttcacactcaagatcagcagagtggaggctgaggatctgggagtttatttctgctctcaaagtacacatgttccgctcacgttcggtgctgggaccaagctggagctgaaacgggctgatgctgcaccaactgtatccatcttcccaccatccagtgagcagttaacatctggaggtgcctcagtcgtgtgcttcttgaacaacttctaccccaaagacatcaatgtcaagtggaagattgatggcagtgaacgacaaaatggcgtcctgaacagttggactgatcaggacagcaaagacagcacctacagcatgagcagcaccctcacgttgaccaaggacgagtatgaacgacataacagctatacctgtgaggccactcacaagacatcaacttcacccattgtcaagagcttcaacaggaatgagtgtcgggccaagcggggaagcggagctactaacttcagcctgctgaagcaggctggagacgtggaggagaaccctggacctatggaatggacctgggtctttctcttcctcctgtcagtaactgcaggtgtccactcccaggttcagctgcagcagtctggagctgagctgatgaagcctggggcctcagtgaagatatcctgcaaggctactggctacacattcagtaactactggatagagtgggtaaagcagaggcctggacatggccttgagtggattggagagattttacctggaagtgatagtattaagtacaatgagaatttcaagggcaaggccacattcactgcagatacatcctccaacacagcctacatgcaactcagcagcctgacatctgaggactctgccgtctattactgtgcaagaagggggaactacccagactactggggccaaggcaccactctcacagtctcctcagccaaaacgacacccccatctgtctatccactggcccctggatctgctgcccaaactaactccatggtgaccctgggatgcctggtcaagggctatttccctgagccagtgacagtgacctggaactctggatccctgtccagcggtgtgcacaccttcccagctgtcctgcagtctgacctctacactctgagcagctcagtgactgtcccctccagcacctggcccagcgagaccgtcacctgcaacgttgcccacccggccagcagcaccaaggtggacaagaaaattgtgcccagggattgtggttgtaagccttgcatatgtacagtcccagaagtatcatctgtcttcatcttccccccaaagcccaaggatgtgctcaccattactctgactcctaaggtcacgtgtgttgtggtagacatcagcaaggatgatcccgaggtccagttcagctggtttgtagatgatgtggaggtgcacacagctcagacgcaaccccgggaggagcagttcaacagcactttccgctcagtcagtgaacttcccatcatgcaccaggactggctcaatggcaaggagttcaaatgcagggtcaacagtgcagctttccctgcccccatcgagaaaaccatctccaaaaccaaaggcagaccgaaggctccacaggtgtacaccattccacctcccaaggagcagatggccaaggataaagtcagtctgacctgcatgataacagacttcttccctgaagacattactgtggagtggcagtggaatgggcagccagcggagaactacaagaacactcagcccatcatggacacagatggctcttacttcgtctacagcaagctcaatgtgcagaagagcaactgggaggcaggaaatactttcacctgctctgtgttacatgagggcctgcacaaccaccatactgagaagagcctctcccactctcctggttagtaactcgaggacggggtgaactacgcctgaggatccgatctttttccctctgccaaaaattatggggacatcatgaagccccttgagcatctgacttctggctaataaaggaaatttattttcattgcaatagtgtgttggaattttttgtgtctctcactcggaagcaattcgttgatctgaatttcgaccacccataatacccattaccctggtagataagtagcatggcgggttaatcattaactacaaggaacccctagtgatggagttggccactccctctctgcgcgctcgctcgctcactgaggccgggcgaccaaaggtcgcccgacgcccgggctttgcccgggcggcctcagtgagcgagcgagcgcgcagccttaattaacctaattcactggccgtcgttttacaacgtcgtgactgggaaaaccctggcgttacccaacttaatcgccttgcagcacatccccctttcgccagctggcgtaatagcgaagaggcccgcaccgatcgcccttcccaacagttgcgcagcctgaatggcgaatgggacgcgccctgtagcggcgcattaagcgcggcgggtgtggtggttacgcgcagcgtgaccgctacacttgccagcgccctagcgcccgctcctttcgctttcttcccttcctttctcgccacgttcgccggctttccccgtcaagctctaaatcgggggctccctttagggttccgatttagtgctttacggcacctcgaccccaaaaaacttgattagggtgatggttcacgtagtgggccatcgccctgatagacggtttttcgccctttgacgttggagtccacgttctttaatagtggactcttgttccaaactggaacaacactcaaccctatctcggtctattcttttgatttataagggattttgccgatttcggcctattggttaaaaaatgagctgatttaacaaaaatttaacgcgaattttaacaaaatattaacgcttacaatttaggtggcacttttcggggaaatgtgcgcggaacccctatttgtttatttttctaaatacattcaaatatgtatccgctcatgagacaataaccctgataaatgcttcaataatattgaaaaaggaagagtatgagtattcaacatttccgtgtcgcccttattcccttttttgcggcattttgccttcctgtttttgctcacccagaaacgctggtgaaagtaaaagatgctgaagatcagttgggtgcacgagtgggttacatcgaactggatctcaacagcggtaagatccttgagagttttcgccccgaagaacgttttccaatgatgagcacttttaaagttctgctatgtggcgcggtattatcccgtattgacgccgggcaagagcaactcggtcgccgcatacactattctcagaatgacttggttgagtactcaccagtcacagaaaagcatcttacggatggcatgacagtaagagaattatgcagtgctgccataaccatgagtgataacactgcggccaacttacttctgacaacgatcggaggaccgaaggagctaaccgcttttttgcacaacatgggggatcatgtaactcgccttgatcgttgggaaccggagctgaatgaagccataccaaacgacgagcgtgacaccacgatgcctgtagcaatggcaacaacgttgcgcaaactattaactggcgaactacttactctagcttcccggcaacaattaatagactggatggaggcggataaagttgcaggaccacttctgcgctcggcccttccggctggctggtttattgctgataaatctggagccggtgagcgtgggtctcgcggtatcattgcagcactggggccagatggtaagccctcccgtatcgtagttatctacacgacggggagtcaggcaactatggatgaacgaaatagacagatcgctgagataggtgcctcactgattaagcattggtaactgtcagaccaagtttactcatatatactttagattgatttaaaacttcatttttaatttaaaaggatctaggtgaagatcctttttgataatctcatgaccaaaatcccttaacgtgagttttcgttccactgagcgtcagaccccgtagaaaagatcaaaggatcttcttgagatcctttttttctgcgcgtaatctgctgcttgcaaacaaaaaaaccaccgctaccagcggtggtttgtttgccggatcaagagctaccaactctttttccgaaggtaactggcttcagcagagcgcagataccaaatactgttcttctagtgtagccgtagttaggccaccacttcaagaactctgtagcaccgcctacatacctcgctctgctaatcctgttaccagtggctgctgccagtggcgataagtcgtgtcttaccgggttggactcaagacgatagttaccggataaggcgcagcggtcgggctgaacggggggttcgtgcacacagcccagcttggagcgaacgacctacaccgaactgagatacctacagcgtgagctatgagaaagcgccacgcttcccgaagggagaaaggcggacaggtatccggtaagcggcagggtcggaacaggagagcgcacgagggagcttccagggggaaacgcctggtatctttatagtcctgtcgggtttcgccacctctgacttgagcgtcgatttttgtgatgctcgtcaggggggcggagcctatggaaaaacgccagcaacgcggcctttttacggttcctggccttttgctggccttttgctcacatgttctttcctgcgttatcccctgattctgtggataaccgtattaccgcctttgagtgagctgataccgctcgccgcagccgaacgaccgagcgcagcgagtcagtgagcgaggaagcggaagagcgcccaatacgcaaaccgcctctccccgcgcgttggccgattcattaatgcagctggcacgacaggtttcccgactggaaagcgggcagtgagcgcaacgcaattaatgtgagttagctcactcattaggcaccccaggctttacactttatgcttccggctcgtatgttgtgtggaattgtgagcggataacaatttcacacaggaaacagctatgaccatgattacgccagatttaattaag

SEQ ID NO: 4302 - DNA, 3610 bp, Artificial Sequence
  Description of Artificial Sequence: Synthetic polynucleotide
ctgcgcgctcgctcgctcactgaggccgcccgggcaaagcccgggcgtcgggcgacctttggtcgcccggcctcagtgagcgagcgagcgcgcagagagggagtggccaactccatcactaggggttccttgtagttaatgattaacccgccatgctacttatctaccagggtaatggggatcctctagaactatagctagtcgacattgattattgactagttattaatagtaatcaattacggggtcattagttcatagcccatatatggagttccgcgttacataacttacggtaaatggcccgcctggctgaccgcccaacgacccccgcccattgacgtcaataatgacgtatgttcccatagtaacgccaatagggactttccattgacgtcaatgggtggagtatttacggtaaactgcccacttggcagtacatcaagtgtatcatatgccaagtacgccccctattgacgtcaatgacggtaaatggcccgcctggcattatgcccagtacatgaccttatgggactttcctacttggcagtacatctacgtattagtcatcgctattaccatgtcgaggccacgttctgcttcactctccccatctcccccccctccccacccccaattttgtatttatttattttttaattattttgtgcagcgatgggggcggggggggggggcgcgcgccaggcggggcggggcggggcgaggggcggggcggggcgaggcggagaggtgcggcggcagccaatcagagcggcgcgctccgaaagtttccttttatggcgaggcggcggcggcggcggccctataaaaagcgaagcgcgcggcgggcgggagcaagcttgaactgaaaaaccagaaagttaactggtaagtttagtctttttgtcttttatttcaggtcccggatccggtggtggtgcaaatcaaagaactgctcctcagtggatgttgcctttacttctaggcctgtacggaagtgttacttctgctctaaaagctgcggaattgtacccgcggccgatccaccggtgccgccaccatgaagttgcctgttaggctgttggtgctgatgttctggattcctgcttccagcagtgatgttgtgatgacccaaactccactctccctgcctgtcagtcttggagatcaagcctccatctcttgcagatctagtcagagccttgtacacagtaatggaaacacctatttacattggtacctgcagaagccaggccagtctccaaagctcctgatctacaaagtttccaaccgattttctggggtcccagacaggttcagtggcagtggatcagggacagatttcacactcaagatcagcagagtggaggctgaggatctgggagtttatttctgctctcaaagtacacatgttccgctcacgttcggtgctgggaccaagctggagctgaaacgggctgatgctgcaccaactgtatccatcttcccaccatccagtgagcagttaacatctggaggtgcctcagtcgtgtgcttcttgaacaacttctaccccaaagacatcaatgtcaagtggaagattgatggcagtgaacgacaaaatggcgtcctgaacagttggactgatcaggacagcaaagacagcacctacagcatgagcagcaccctcacgttgaccaaggacgagtatgaacgacataacagctatacctgtgaggccactcacaagacatcaacttcacccattgtcaagagcttcaacaggaatgagtgtcgggccaagcggggaagcggagctactaacttcagcctgctgaagcaggctggagacgtggaggagaaccctggacctatggaatggacctgggtctttctcttcctcctgtcagtaactgcaggtgtccactcccaggttcagctgcagcagtctggagctgagctgatgaagcctggggcctcagtgaagatatcctgcaaggctactggctacacattcagtaactactggatagagtgggtaaagcagaggcctggacatggccttgagtggattggagagattttacctggaagtgatagtattaagtacaatgagaatttcaagggcaaggccacattcactgcagatacatcctccaacacagcctacatgcaactcagcagcctgacatctgaggactctgccgtctattactgtgcaagaagggggaactacccagactactggggccaaggcaccactctcacagtctcctcagccaaaacgacacccccatctgtctatccactggcccctggatctgctgcccaaactaactccatggtgaccctgggatgcctggtcaagggctatttccctgagccagtgacagtgacctggaactctggatccctgtccagcggtgtgcacaccttcccagctgtcctgcagtctgacctctacactctgagcagctcagtgactgtcccctccagcacctggcccagcgagaccgtcacctgcaacgttgcccacccggccagcagcaccaaggtggacaagaaaattgtgcccagggattgtggttgtaagccttgcatatgtacagtcccagaagtatcatctgtcttcatcttccccccaaagcccaaggatgtgctcaccattactctgactcctaaggtcacgtgtgttgtggtagacatcagcaaggatgatcccgaggtccagttcagctggtttgtagatgatgtggaggtgcacacagctcagacgcaaccccgggaggagcagttcaacagcactttccgctcagtcagtgaacttcccatcatgcaccaggactggctcaatggcaaggagttcaaatgcagggtcaacagtgcagctttccctgcccccatcgagaaaaccatctccaaaaccaaaggcagaccgaaggctccacaggtgtacaccattccacctcccaaggagcagatggccaaggataaagtcagtctgacctgcatgataacagacttcttccctgaagacattactgtggagtggcagtggaatgggcagccagcggagaactacaagaacactcagcccatcatggacacagatggctcttacttcgtctacagcaagctcaatgtgcagaagagcaactgggaggcaggaaatactttcacctgctctgtgttacatgagggcctgcacaaccaccatactgagaagagcctctcccactctcctggttagtaactcgaggacggggtgaactacgcctgaggatccgatctttttccctctgccaaaaattatggggacatcatgaagccccttgagcatctgacttctggctaataaaggaaatttattttcattgcaatagtgtgttggaattttttgtgtctctcactcggaagcaattcgttgatctgaatttcgaccacccataatacccattaccctggtagataagtagcatggcgggttaatcattaactacaaggaacccctagtgatggagttggccactccctctctgcgcgctcgctcgctcactgaggccgggcgaccaaaggtcgcccgacgcccgggctttgcccgggcggcctcagtgagcgagcgagcgcgcag

SEQ ID NO: 4303 - DNA, 6419 bp, Artificial Sequence
  Description of Artificial Sequence: Synthetic polynucleotide
gccttaattaggctgcgcgctcgctcgctcactgaggccgcccgggcaaagcccgggcgtcgggcgacctttggtcgcccggcctcagtgagcgagcgagcgcgcagagagggagtggccaactccatcactaggggttccttgtagttaatgattaacccgccatgctacttatctaccagggtaatggggatcctctagaactatagctagtcgacattgattattgactagttattaatagtaatcaattacggggtcattagttcatagcccatatatggagttccgcgttacataacttacggtaaatggcccgcctggctgaccgcccaacgacccccgcccattgacgtcaataatgacgtatgttcccatagtaacgccaatagggactttccattgacgtcaatgggtggagtatttacggtaaactgcccacttggcagtacatcaagtgtatcatatgccaagtacgccccctattgacgtcaatgacggtaaatggcccgcctggcattatgcccagtacatgaccttatgggactttcctacttggcagtacatctacgtattagtcatcgctattaccatgtcgaggccacgttctgcttcactctccccatctcccccccctccccacccccaattttgtatttatttattttttaattattttgtgcagcgatgggggcggggggggggggcgcgcgccaggcggggcggggcggggcgaggggcggggcggggcgaggcggagaggtgcggcggcagccaatcagagcggcgcgctccgaaagtttccttttatggcgaggcggcggcggcggcggccctataaaaagcgaagcgcgcggcgggcgggagcaagcttgaactgaaaaaccagaaagttaactggtaagtttagtctttttgtcttttatttcaggtcccggatccggtggtggtgcaaatcaaagaactgctcctcagtggatgttgcctttacttctaggcctgtacggaagtgttacttctgctctaaaagctgcggaattgtacccgcggccgatccaccggtgccgccaccatggaatggacctgggtctttctcttcctcctgtcagtaactgcaggtgtccactcccaggttcagctgcagcagtctggagctgagctgatgaagcctggggcctcagtgaagatatcctgcaaggctactggctacacattcagtaactactggatagagtgggtaaagcagaggcctggacatggccttgagtggattggagagattttacctggaagtgatagtattaagtacaatgagaatttcaagggcaaggccacattcactgcagatacatcctccaacacagcctacatgcaactcagcagcctgacatctgaggactctgccgtctattactgtgcaagaagggggaactacccagactactggggccaaggcaccactctcacagtctcctcagccaaaacgacacccccatctgtctatccactggcccctggatctgctgcccaaactaactccatggtgaccctgggatgcctggtcaagggctatttccctgagccagtgacagtgacctggaactctggatccctgtccagcggtgtgcacaccttcccagctgtcctgcagtctgacctctacactctgagcagctcagtgactgtcccctccagcacctggcccagcgagaccgtcacctgcaacgttgcccacccggccagcagcaccaaggtggacaagaaaattgtgcccagggattgtggttgtaagccttgcatatgtacagtcccagaagtatcatctgtcttcatcttccccccaaagcccaaggatgtgctcaccattactctgactcctaaggtcacgtgtgttgtggtagacatcagcaaggatgatcccgaggtccagttcagctggtttgtagatgatgtggaggtgcacacagctcagacgcaaccccgggaggagcagttcaacagcactttccgctcagtcagtgaacttcccatcatgcaccaggactggctcaatggcaaggagttcaaatgcagggtcaacagtgcagctttccctgcccccatcgagaaaaccatctccaaaaccaaaggcagaccgaaggctccacaggtgtacaccattccacctcccaaggagcagatggccaaggataaagtcagtctgacctgcatgataacagacttcttccctgaagacattactgtggagtggcagtggaatgggcagccagcggagaactacaagaacactcagcccatcatggacacagatggctcttacttcgtctacagcaagctcaatgtgcagaagagcaactgggaggcaggaaatactttcacctgctctgtgttacatgagggcctgcacaaccaccatactgagaagagcctctcccactctcctggtggaagcggagctactaacttcagcctgctgaagcaggctggagacgtggaggagaaccctggacctatgaagttgcctgttaggctgttggtgctgatgttctggattcctgcttccagcagtgatgttgtgatgacccaaactccactctccctgcctgtcagtcttggagatcaagcctccatctcttgcagatctagtcagagccttgtacacagtaatggaaacacctatttacattggtacctgcagaagccaggccagtctccaaagctcctgatctacaaagtttccaaccgattttctggggtcccagacaggttcagtggcagtggatcagggacagatttcacactcaagatcagcagagtggaggctgaggatctgggagtttatttctgctctcaaagtacacatgttccgctcacgttcggtgctgggaccaagctggagctgaaacgggctgatgctgcaccaactgtatccatcttcccaccatccagtgagcagttaacatctggaggtgcctcagtcgtgtgcttcttgaacaacttctaccccaaagacatcaatgtcaagtggaagattgatggcagtgaacgacaaaatggcgtcctgaacagttggactgatcaggacagcaaagacagcacctacagcatgagcagcaccctcacgttgaccaaggacgagtatgaacgacataacagctatacctgtgaggccactcacaagacatcaacttcacccattgtcaagagcttcaacaggaatgagtgttagtaactcgaggacggggtgaactacgcctgaggatccgatctttttccctctgccaaaaattatggggacatcatgaagccccttgagcatctgacttctggctaataaaggaaatttattttcattgcaatagtgtgttggaattttttgtgtctctcactcggaagcaattcgttgatctgaatttcgaccacccataatacccattaccctggtagataagtagcatggcgggttaatcattaactacaaggaacccctagtgatggagttggccactccctctctgcgcgctcgctcgctcactgaggccgggcgaccaaaggtcgcccgacgcccgggctttgcccgggcggcctcagtgagcgagcgagcgcgcagccttaattaacctaattcactggccgtcgttttacaacgtcgtgactgggaaaaccctggcgttacccaacttaatcgccttgcagcacatccccctttcgccagctggcgtaatagcgaagaggcccgcaccgatcgcccttcccaacagttgcgcagcctgaatggcgaatgggacgcgccctgtagcggcgcattaagcgcggcgggtgtggtggttacgcgcagcgtgaccgctacacttgccagcgccctagcgcccgctcctttcgctttcttcccttcctttctcgccacgttcgccggctttccccgtcaagctctaaatcgggggctccctttagggttccgatttagtgctttacggcacctcgaccccaaaaaacttgattagggtgatggttcacgtagtgggccatcgccctgatagacggtttttcgccctttgacgttggagtccacgttctttaatagtggactcttgttccaaactggaacaacactcaaccctatctcggtctattcttttgatttataagggattttgccgatttcggcctattggttaaaaaatgagctgatttaacaaaaatttaacgcgaattttaacaaaatattaacgcttacaatttaggtggcacttttcggggaaatgtgcgcggaacccctatttgtttatttttctaaatacattcaaatatgtatccgctcatgagacaataaccctgataaatgcttcaataatattgaaaaaggaagagtatgagtattcaacatttccgtgtcgcccttattcccttttttgcggcattttgccttcctgtttttgctcacccagaaacgctggtgaaagtaaaagatgctgaagatcagttgggtgcacgagtgggttacatcgaactggatctcaacagcggtaagatccttgagagttttcgccccgaagaacgttttccaatgatgagcacttttaaagttctgctatgtggcgcggtattatcccgtattgacgccgggcaagagcaactcggtcgccgcatacactattctcagaatgacttggttgagtactcaccagtcacagaaaagcatcttacggatggcatgacagtaagagaattatgcagtgctgccataaccatgagtgataacactgcggccaacttacttctgacaacgatcggaggaccgaaggagctaaccgcttttttgcacaacatgggggatcatgtaactcgccttgatcgttgggaaccggagctgaatgaagccataccaaacgacgagcgtgacaccacgatgcctgtagcaatggcaacaacgttgcgcaaactattaactggcgaactacttactctagcttcccggcaacaattaatagactggatggaggcggataaagttgcaggaccacttctgcgctcggcccttccggctggctggtttattgctgataaatctggagccggtgagcgtgggtctcgcggtatcattgcagcactggggccagatggtaagccctcccgtatcgtagttatctacacgacggggagtcaggcaactatggatgaacgaaatagacagatcgctgagataggtgcctcactgattaagcattggtaactgtcagaccaagtttactcatatatactttagattgatttaaaacttcatttttaatttaaaaggatctaggtgaagatcctttttgataatctcatgaccaaaatcccttaacgtgagttttcgttccactgagcgtcagaccccgtagaaaagatcaaaggatcttcttgagatcctttttttctgcgcgtaatctgctgcttgcaaacaaaaaaaccaccgctaccagcggtggtttgtttgccggatcaagagctaccaactctttttccgaaggtaactggcttcagcagagcgcagataccaaatactgttcttctagtgtagccgtagttaggccaccacttcaagaactctgtagcaccgcctacatacctcgctctgctaatcctgttaccagtggctgctgccagtggcgataagtcgtgtcttaccgggttggactcaagacgatagttaccggataaggcgcagcggtcgggctgaacggggggttcgtgcacacagcccagcttggagcgaacgacctacaccgaactgagatacctacagcgtgagctatgagaaagcgccacgcttcccgaagggagaaaggcggacaggtatccggtaagcggcagggtcggaacaggagagcgcacgagggagcttccagggggaaacgcctggtatctttatagtcctgtcgggtttcgccacctctgacttgagcgtcgatttttgtgatgctcgtcaggggggcggagcctatggaaaaacgccagcaacgcggcctttttacggttcctggccttttgctggccttttgctcacatgttctttcctgcgttatcccctgattctgtggataaccgtattaccgcctttgagtgagctgataccgctcgccgcagccgaacgaccgagcgcagcgagtcagtgagcgaggaagcggaagagcgcccaatacgcaaaccgcctctccccgcgcgttggccgattcattaatgcagctggcacgacaggtttcccgactggaaagcgggcagtgagcgcaacgcaattaatgtgagttagctcactcattaggcaccccaggctttacactttatgcttccggctcgtatgttgtgtggaattgtgagcggataacaatttcacacaggaaacagctatgaccatgattacgccagatttaattaag

SEQ ID NO: 4304 - DNA, 3598 bp, Artificial Sequence
  Description of Artificial Sequence: Synthetic polynucleotide
ctgcgcgctcgctcgctcactgaggccgcccgggcaaagcccgggcgtcgggcgacctttggtcgcccggcctcagtgagcgagcgagcgcgcagagagggagtggccaactccatcactaggggttccttgtagttaatgattaacccgccatgctacttatctaccagggtaatggggatcctctagaactatagctagtcgacattgattattgactagttattaatagtaatcaattacggggtcattagttcatagcccatatatggagttccgcgttacataacttacggtaaatggcccgcctggctgaccgcccaacgacccccgcccattgacgtcaataatgacgtatgttcccatagtaacgccaatagggactttccattgacgtcaatgggtggagtatttacggtaaactgcccacttggcagtacatcaagtgtatcatatgccaagtacgccccctattgacgtcaatgacggtaaatggcccgcctggcattatgcccagtacatgaccttatgggactttcctacttggcagtacatctacgtattagtcatcgctattaccatgtcgaggccacgttctgcttcactctccccatctcccccccctccccacccccaattttgtatttatttattttttaattattttgtgcagcgatgggggcggggggggggggcgcgcgccaggcggggcggggcggggcgaggggcggggcggggcgaggcggagaggtgcggcggcagccaatcagagcggcgcgctccgaaagtttccttttatggcgaggcggcggcggcggcggccctataaaaagcgaagcgcgcggcgggcgggagcaagcttgaactgaaaaaccagaaagttaactggtaagtttagtctttttgtcttttatttcaggtcccggatccggtggtggtgcaaatcaaagaactgctcctcagtggatgttgcctttacttctaggcctgtacggaagtgttacttctgctctaaaagctgcggaattgtacccgcggccgatccaccggtgccgccaccatggaatggacctgggtctttctcttcctcctgtcagtaactgcaggtgtccactcccaggttcagctgcagcagtctggagctgagctgatgaagcctggggcctcagtgaagatatcctgcaaggctactggctacacattcagtaactactggatagagtgggtaaagcagaggcctggacatggccttgagtggattggagagattttacctggaagtgatagtattaagtacaatgagaatttcaagggcaaggccacattcactgcagatacatcctccaacacagcctacatgcaactcagcagcctgacatctgaggactctgccgtctattactgtgcaagaagggggaactacccagactactggggccaaggcaccactctcacagtctcctcagccaaaacgacacccccatctgtctatccactggcccctggatctgctgcccaaactaactccatggtgaccctgggatgcctggtcaagggctatttccctgagccagtgacagtgacctggaactctggatccctgtccagcggtgtgcacaccttcccagctgtcctgcagtctgacctctacactctgagcagctcagtgactgtcccctccagcacctggcccagcgagaccgtcacctgcaacgttgcccacccggccagcagcaccaaggtggacaagaaaattgtgcccagggattgtggttgtaagccttgcatatgtacagtcccagaagtatcatctgtcttcatcttccccccaaagcccaaggatgtgctcaccattactctgactcctaaggtcacgtgtgttgtggtagacatcagcaaggatgatcccgaggtccagttcagctggtttgtagatgatgtggaggtgcacacagctcagacgcaaccccgggaggagcagttcaacagcactttccgctcagtcagtgaacttcccatcatgcaccaggactggctcaatggcaaggagttcaaatgcagggtcaacagtgcagctttccctgcccccatcgagaaaaccatctccaaaaccaaaggcagaccgaaggctccacaggtgtacaccattccacctcccaaggagcagatggccaaggataaagtcagtctgacctgcatgataacagacttcttccctgaagacattactgtggagtggcagtggaatgggcagccagcggagaactacaagaacactcagcccatcatggacacagatggctcttacttcgtctacagcaagctcaatgtgcagaagagcaactgggaggcaggaaatactttcacctgctctgtgttacatgagggcctgcacaaccaccatactgagaagagcctctcccactctcctggtggaagcggagctactaacttcagcctgctgaagcaggctggagacgtggaggagaaccctggacctatgaagttgcctgttaggctgttggtgctgatgttctggattcctgcttccagcagtgatgttgtgatgacccaaactccactctccctgcctgtcagtcttggagatcaagcctccatctcttgcagatctagtcagagccttgtacacagtaatggaaacacctatttacattggtacctgcagaagccaggccagtctccaaagctcctgatctacaaagtttccaaccgattttctggggtcccagacaggttcagtggcagtggatcagggacagatttcacactcaagatcagcagagtggaggctgaggatctgggagtttatttctgctctcaaagtacacatgttccgctcacgttcggtgctgggaccaagctggagctgaaacgggctgatgctgcaccaactgtatccatcttcccaccatccagtgagcagttaacatctggaggtgcctcagtcgtgtgcttcttgaacaacttctaccccaaagacatcaatgtcaagtggaagattgatggcagtgaacgacaaaatggcgtcctgaacagttggactgatcaggacagcaaagacagcacctacagcatgagcagcaccctcacgttgaccaaggacgagtatgaacgacataacagctatacctgtgaggccactcacaagacatcaacttcacccattgtcaagagcttcaacaggaatgagtgttagtaactcgaggacggggtgaactacgcctgaggatccgatctttttccctctgccaaaaattatggggacatcatgaagccccttgagcatctgacttctggctaataaaggaaatttattttcattgcaatagtgtgttggaattttttgtgtctctcactcggaagcaattcgttgatctgaatttcgaccacccataatacccattaccctggtagataagtagcatggcgggttaatcattaactacaaggaacccctagtgatggagttggccactccctctctgcgcgctcgctcgctcactgaggccgggcgaccaaaggtcgcccgacgcccgggctttgcccgggcggcctcagtgagcgagcgagcgcgcag

SEQ ID NO: 4305 - DNA, 6419 bp, Artificial Sequence
  Description of Artificial Sequence: Synthetic polynucleotide
gccttaattaggctgcgcgctcgctcgctcactgaggccgcccgggcaaagcccgggcgtcgggcgacctttggtcgcccggcctcagtgagcgagcgagcgcgcagagagggagtggccaactccatcactaggggttccttgtagttaatgattaacccgccatgctacttatctaccagggtaatggggatcctctagaactatagctagtcgacattgattattgactagttattaatagtaatcaattacggggtcattagttcatagcccatatatggagttccgcgttacataacttacggtaaatggcccgcctggctgaccgcccaacgacccccgcccattgacgtcaataatgacgtatgttcccatagtaacgccaatagggactttccattgacgtcaatgggtggagtatttacggtaaactgcccacttggcagtacatcaagtgtatcatatgccaagtacgccccctattgacgtcaatgacggtaaatggcccgcctggcattatgcccagtacatgaccttatgggactttcctacttggcagtacatctacgtattagtcatcgctattaccatgtcgaggccacgttctgcttcactctccccatctcccccccctccccacccccaattttgtatttatttattttttaattattttgtgcagcgatgggggcggggggggggggcgcgcgccaggcggggcggggcggggcgaggggcggggcggggcgaggcggagaggtgcggcggcagccaatcagagcggcgcgctccgaaagtttccttttatggcgaggcggcggcggcggcggccctataaaaagcgaagcgcgcggcgggcgggagcaagcttgaactgaaaaaccagaaagttaactggtaagtttagtctttttgtcttttatttcaggtcccggatccggtggtggtgcaaatcaaagaactgctcctcagtggatgttgcctttacttctaggcctgtacggaagtgttacttctgctctaaaagctgcggaattgtacccgcggccgatccaccggtgccgccaccatgaagttgcctgttaggctgttggtgctgatgttctggattcctgcttccagcagtgatgttgtgatgacccaaactccactctccctgcctgtcagtcttggagatcaagcctccatctcttgcagatctagtcagagccttgtacacagtaatggaaacacctatttacattggtacctgcagaagccaggccagtctccaaagctcctgatctacaaagtttccaaccgattttctggggtcccagacaggttcagtggcagtggatcagggacagatttcacactcaagatcagcagagtggaggctgaggatctgggagtttatttctgctctcaaagtacacatgttccgctcacgttcggtgctgggaccaagctggagctgaaacgggctgatgctgcaccaactgtatccatcttcccaccatccagtgagcagttaacatctggaggtgcctcagtcgtgtgcttcttgaacaacttctaccccaaagacatcaatgtcaagtggaagattgatggcagtgaacgacaaaatggcgtcctgaacagttggactgatcaggacagcaaagacagcacctacagcatgagcagcaccctcacgttgaccaaggacgagtatgaacgacataacagctatacctgtgaggccactcacaagacatcaacttcacccattgtcaagagcttcaacaggaatgagtgtggaagcggagctactaacttcagcctgctgaagcaggctggagacgtggaggagaaccctggacctatggaatggacctgggtctttctcttcctcctgtcagtaactgcaggtgtccactcccaggttcagctgcagcagtctggagctgagctgatgaagcctggggcctcagtgaagatatcctgcaaggctactggctacacattcagtaactactggatagagtgggtaaagcagaggcctggacatggccttgagtggattggagagattttacctggaagtgatagtattaagtacaatgagaatttcaagggcaaggccacattcactgcagatacatcctccaacacagcctacatgcaactcagcagcctgacatctgaggactctgccgtctattactgtgcaagaagggggaactacccagactactggggccaaggcaccactctcacagtctcctcagccaaaacgacacccccatctgtctatccactggcccctggatctgctgcccaaactaactccatggtgaccctgggatgcctggtcaagggctatttccctgagccagtgacagtgacctggaactctggatccctgtccagcggtgtgcacaccttcccagctgtcctgcagtctgacctctacactctgagcagctcagtgactgtcccctccagcacctggcccagcgagaccgtcacctgcaacgttgcccacccggccagcagcaccaaggtggacaagaaaattgtgcccagggattgtggttgtaagccttgcatatgtacagtcccagaagtatcatctgtcttcatcttccccccaaagcccaaggatgtgctcaccattactctgactcctaaggtcacgtgtgttgtggtagacatcagcaaggatgatcccgaggtccagttcagctggtttgtagatgatgtggaggtgcacacagctcagacgcaaccccgggaggagcagttcaacagcactttccgctcagtcagtgaacttcccatcatgcaccaggactggctcaatggcaaggagttcaaatgcagggtcaacagtgcagctttccctgcccccatcgagaaaaccatctccaaaaccaaaggcagaccgaaggctccacaggtgtacaccattccacctcccaaggagcagatggccaaggataaagtcagtctgacctgcatgataacagacttcttccctgaagacattactgtggagtggcagtggaatgggcagccagcggagaactacaagaacactcagcccatcatggacacagatggctcttacttcgtctacagcaagctcaatgtgcagaagagcaactgggaggcaggaaatactttcacctgctctgtgttacatgagggcctgcacaaccaccatactgagaagagcctctcccactctcctggttagtaactcgaggacggggtgaactacgcctgaggatccgatctttttccctctgccaaaaattatggggacatcatgaagccccttgagcatctgacttctggctaataaaggaaatttattttcattgcaatagtgtgttggaattttttgtgtctctcactcggaagcaattcgttgatctgaatttcgaccacccataatacccattaccctggtagataagtagcatggcgggttaatcattaactacaaggaacccctagtgatggagttggccactccctctctgcgcgctcgctcgctcactgaggccgggcgaccaaaggtcgcccgacgcccgggctttgcccgggcggcctcagtgagcgagcgagcgcgcagccttaattaacctaattcactggccgtcgttttacaacgtcgtgactgggaaaaccctggcgttacccaacttaatcgccttgcagcacatccccctttcgccagctggcgtaatagcgaagaggcccgcaccgatcgcccttcccaacagttgcgcagcctgaatggcgaatgggacgcgccctgtagcggcgcattaagcgcggcgggtgtggtggttacgcgcagcgtgaccgctacacttgccagcgccctagcgcccgctcctttcgctttcttcccttcctttctcgccacgttcgccggctttccccgtcaagctctaaatcgggggctccctttagggttccgatttagtgctttacggcacctcgaccccaaaaaacttgattagggtgatggttcacgtagtgggccatcgccctgatagacggtttttcgccctttgacgttggagtccacgttctttaatagtggactcttgttccaaactggaacaacactcaaccctatctcggtctattcttttgatttataagggattttgccgatttcggcctattggttaaaaaatgagctgatttaacaaaaatttaacgcgaattttaacaaaatattaacgcttacaatttaggtggcacttttcggggaaatgtgcgcggaacccctatttgtttatttttctaaatacattcaaatatgtatccgctcatgagacaataaccctgataaatgcttcaataatattgaaaaaggaagagtatgagtattcaacatttccgtgtcgcccttattcccttttttgcggcattttgccttcctgtttttgctcacccagaaacgctggtgaaagtaaaagatgctgaagatcagttgggtgcacgagtgggttacatcgaactggatctcaacagcggtaagatccttgagagttttcgccccgaagaacgttttccaatgatgagcacttttaaagttctgctatgtggcgcggtattatcccgtattgacgccgggcaagagcaactcggtcgccgcatacactattctcagaatgacttggttgagtactcaccagtcacagaaaagcatcttacggatggcatgacagtaagagaattatgcagtgctgccataaccatgagtgataacactgcggccaacttacttctgacaacgatcggaggaccgaaggagctaaccgcttttttgcacaacatgggggatcatgtaactcgccttgatcgttgggaaccggagctgaatgaagccataccaaacgacgagcgtgacaccacgatgcctgtagcaatggcaacaacgttgcgcaaactattaactggcgaactacttactctagcttcccggcaacaattaatagactggatggaggcggataaagttgcaggaccacttctgcgctcggcccttccggctggctggtttattgctgataaatctggagccggtgagcgtgggtctcgcggtatcattgcagcactggggccagatggtaagccctcccgtatcgtagttatctacacgacggggagtcaggcaactatggatgaacgaaatagacagatcgctgagataggtgcctcactgattaagcattggtaactgtcagaccaagtttactcatatatactttagattgatttaaaacttcatttttaatttaaaaggatctaggtgaagatcctttttgataatctcatgaccaaaatcccttaacgtgagttttcgttccactgagcgtcagaccccgtagaaaagatcaaaggatcttcttgagatcctttttttctgcgcgtaatctgctgcttgcaaacaaaaaaaccaccgctaccagcggtggtttgtttgccggatcaagagctaccaactctttttccgaaggtaactggcttcagcagagcgcagataccaaatactgttcttctagtgtagccgtagttaggccaccacttcaagaactctgtagcaccgcctacatacctcgctctgctaatcctgttaccagtggctgctgccagtggcgataagtcgtgtcttaccgggttggactcaagacgatagttaccggataaggcgcagcggtcgggctgaacggggggttcgtgcacacagcccagcttggagcgaacgacctacaccgaactgagatacctacagcgtgagctatgagaaagcgccacgcttcccgaagggagaaaggcggacaggtatccggtaagcggcagggtcggaacaggagagcgcacgagggagcttccagggggaaacgcctggtatctttatagtcctgtcgggtttcgccacctctgacttgagcgtcgatttttgtgatgctcgtcaggggggcggagcctatggaaaaacgccagcaacgcggcctttttacggttcctggccttttgctggccttttgctcacatgttctttcctgcgttatcccctgattctgtggataaccgtattaccgcctttgagtgagctgataccgctcgccgcagccgaacgaccgagcgcagcgagtcagtgagcgaggaagcggaagagcgcccaatacgcaaaccgcctctccccgcgcgttggccgattcattaatgcagctggcacgacaggtttcccgactggaaagcgggcagtgagcgcaacgcaattaatgtgagttagctcactcattaggcaccccaggctttacactttatgcttccggctcgtatgttgtgtggaattgtgagcggataacaatttcacacaggaaacagctatgaccatgattacgccagatttaattaag

SEQ ID NO: 4306 - DNA, 3610 bp, Artificial Sequence; identical to SEQ ID NO: 4302
  Description of Artificial Sequence: Synthetic polynucleotide

SEQ ID NO: 4307 - DNA, 6431 bp, Artificial Sequence
  Description of Artificial Sequence: Synthetic polynucleotide
gccttaattaggctgcgcgctcgctcgctcactgaggccgcccgggcaaagcccgggcgtcgggcgacctttggtcgcccggcctcagtgagcgagcgagcgcgcagagagggagtggccaactccatcactaggggttccttgtagttaatgattaacccgccatgctacttatctaccagggtaatggggatcctctagaactatagctagtcgacattgattattgactagttattaatagtaatcaattacggggtcattagttcatagcccatatatggagttccgcgttacataacttacggtaaatggcccgcctggctgaccgcccaacgacccccgcccattgacgtcaataatgacgtatgttcccatagtaacgccaatagggactttccattgacgtcaatgggtggagtatttacggtaaactgcccacttggcagtacatcaagtgtatcatatgccaagtacgccccctattgacgtcaatgacggtaaatggcccgcctggcattatgcccagtacatgaccttatgggactttcctacttggcagtacatctacgtattagtcatcgctattaccatgtcgaggccacgttctgcttcactctccccatctcccccccctccccacccccaattttgtatttatttattttttaattattttgtgcagcgatgggggcggggggggggggcgcgcgccaggcggggcggggcggggcgaggggcggggcggggcgaggcggagaggtgcggcggcagccaatcagagcggcgcgctccgaaagtttccttttatggcgaggcggcggcggcggcggccctataaaaagcgaagcgcgcggcgggcgggagcaagcttgaactgaaaaaccagaaagttaactggtaagtttagtctttttgtcttttatttcaggtcccggatccggtggtggtgcaaatcaaagaactgctcctcagtggatgttgcctttacttctaggcctgtacggaagtgttacttctgctctaaaagctgcggaattgtacccgcggccgatccaccggtgccgccaccatggaatggacctgggtctttctcttcctcctgtcagtaactgcaggtgtccactcccaggttcagctgcagcagtctggagctgagctgatgaagcctggggcctcagtgaagatatcctgcaaggctactggctacacattcagtaactactggatagagtgggtaaagcagaggcctggacatggccttgagtggattggagagattttacctggaagtgatagtattaagtacaatgagaatttcaagggcaaggccacattcactgcagatacatcctccaacacagcctacatgcaactcagcagcctgacatctgaggactctgccgtctattactgtgcaagaagggggaactacccagactactggggccaaggcaccactctcacagtctcctcagccaaaacgacacccccatctgtctatccactggcccctggatctgctgcccaaactaactccatggtgaccctgggatgcctggtcaagggctatttccctgagccagtgacagtgacctggaactctggatccctgtccagcggtgtgcacaccttcccagctgtcctgcagtctgacctctacactctgagcagctcagtgactgtcccctccagcacctggcccagcgagaccgtcacctgcaacgttgcccacccggccagcagcaccaaggtggacaagaaaattgtgcccagggattgtggttgtaagccttgcatatgtacagtcccagaagtatcatctgtcttcatcttccccccaaagcccaaggatgtgctcaccattactctgactcctaaggtcacgtgtgttgtggtagacatcagcaaggatgatcccgaggtccagttcagctggtttgtagatgatgtggaggtgcacacagctcagacgcaaccccgggaggagcagttcaacagcactttccgctcagtcagtgaacttcccatcatgcaccaggactggctcaatggcaaggagttcaaatgcagggtcaacagtgcagctttccctgcccccatcgagaaaaccatctccaaaaccaaaggcagaccgaaggctccacaggtgtacaccattccacctcccaaggagcagatggccaaggataaagtcagtctgacctgcatgataacagacttcttccctgaagacattactgtggagtggcagtggaatgggcagccagcggagaactacaagaacactcagcccatcatggacacagatggctcttacttcgtctacagcaagctcaatgtgcagaagagcaactgggaggcaggaaatactttcacctgctctgtgttacatgagggcctgcacaaccaccatactgagaagagcctctcccactctcctggtcgggccaagcggggaagcggagctactaacttcagcctgctgaagcaggctggagacgtggaggagaaccctggacctatgaagttgcctgttaggctgttggtgctgatgttctggattcctgcttccagcagtgatgttgtgatgacccaaactccactctccctgcctgtcagtcttggagatcaagcctccatctcttgcagatctagtcagagccttgtacacagtaatggaaacacctatttacattggtacctgcagaagccaggccagtctccaaagctcctgatctacaaagtttccaaccgattttctggggtcccagacaggttcagtggcagtggatcagggacagatttcacactcaagatcagcagagtggaggctgaggatctgggagtttatttctgctctcaaagtacacatgttccgctcacgttcggtgctgggaccaagctggagctgaaacgggctgatgctgcaccaactgtatccatcttcccaccatccagtgagcagttaacatctggaggtgcctcagtcgtgtgcttcttgaacaacttctaccccaaagacatcaatgtcaagtggaagattgatggcagtgaacgacaaaatggcgtcctgaacagttggactgatcaggacagcaaagacagcacctacagcatgagcagcaccctcacgttgaccaaggacgagtatgaacgacataacagctatacctgtgaggccactcacaagacatcaacttcacccattgtcaagagcttcaacaggaatgagtgttagtaactcgaggacggggtgaactacgcctgaggatccgatctttttccctctgccaaaaattatggggacatcatgaagccccttgagcatctgacttctggctaataaaggaaatttattttcattgcaatagtgtgttggaattttttgtgtctctcactcggaagcaattcgttgatctgaatttcgaccacccataatacccattaccctggtagataagtagcatggcgggttaatcattaactacaaggaacccctagtgatggagttggccactccctctctgcgcgctcgctcgctcactgaggccgggcgaccaaaggtcgcccgacgcccgggctttgcccgggcggcctcagtgagcgagcgagcgcgcagccttaattaacctaattcactggccgtcgttttacaacgtcgtgactgggaaaaccctggcgttacccaacttaatcgccttgcagcacatccccctttcgccagctggcgtaatagcgaagaggcccgcaccgatcgcccttcccaacagttgcgcagcctgaatggcgaatgggacgcgccctgtagcggcgcattaagcgcggcgggtgtggtggttacgcgcagcgtgaccgctacacttgccagcgccctagcgcccgctcctttcgctttcttcccttcctttctcgccacgttcgccggctttccccgtcaagctctaaatcgggggctccctttagggttccgatttagtgctttacggcacctcgaccccaaaaaacttgattagggtgatggttcacgtagtgggccatcgccctgatagacggtttttcgccctttgacgttggagtccacgttctttaatagtggactcttgttccaaactggaacaacactcaaccctatctcggtctattcttttgatttataagggattttgccgatttcggcctattggttaaaaaatgagctgatttaacaaaaatttaacgcgaattttaacaaaatattaacgcttacaatttaggtggcacttttcggggaaatgtgcgcggaacccctatttgtttatttttctaaatacattcaaatatgtatccgctcatgagacaataaccctgataaatgcttcaataatattgaaaaaggaagagtatgagtattcaacatttccgtgtcgcccttattcccttttttgcggcattttgccttcctgtttttgctcacccagaaacgctggtgaaagtaaaagatgctgaagatcagttgggtgcacgagtgggttacatcgaactggatctcaacagcggtaagatccttgagagttttcgccccgaagaacgttttccaatgatgagcacttttaaagttctgctatgtggcgcggtattatcccgtattgacgccgggcaagagcaactcggtcgccgcatacactattctcagaatgacttggttgagtactcaccagtcacagaaaagcatcttacggatggcatgacagtaagagaattatgcagtgctgccataaccatgagtgataacactgcggccaacttacttctgacaacgatcggaggaccgaaggagctaaccgcttttttgcacaacatgggggatcatgtaactcgccttgatcgttgggaaccggagctgaatgaagccataccaaacgacgagcgtgacaccacgatgcctgtagcaatggcaacaacgttgcgcaaactattaactggcgaactacttactctagcttcccggcaacaattaatagactggatggaggcggataaagttgcaggaccacttctgcgctcggcccttccggctggctggtttattgctgataaatctggagccggtgagcgtgggtctcgcggtatcattgcagcactggggccagatggtaagccctcccgtatcgtagttatctacacgacggggagtcaggcaactatggatgaacgaaatagacagatcgctgagataggtgcctcactgattaagcattggtaactgtcagaccaagtttactcatatatactttagattgatttaaaacttcatttttaatttaaaaggatctaggtgaagatcctttttgataatctcatgaccaaaatcccttaacgtgagttttcgttccactgagcgtcagaccccgtagaaaagatcaaaggatcttcttgagatcctttttttctgcgcgtaatctgctgcttgcaaacaaaaaaaccaccgctaccagcggtggtttgtttgccggatcaagagctaccaactctttttccgaaggtaactggcttcagcagagcgcagataccaaatactgttcttctagtgtagccgtagttaggccaccacttcaagaactctgtagcaccgcctacatacctcgctctgctaatcctgttaccagtggctgctgccagtggcgataagtcgtgtcttaccgggttggactcaagacgatagttaccggataaggcgcagcggtcgggctgaacggggggttcgtgcacacagcccagcttggagcgaacgacctacaccgaactgagatacctacagcgtgagctatgagaaagcgccacgcttcccgaagggagaaaggcggacaggtatccggtaagcggcagggtcggaacaggagagcgcacgagggagcttccagggggaaacgcctggtatctttatagtcctgtcgggtttcgccacctctgacttgagcgtcgatttttgtgatgctcgtcaggggggcggagcctatggaaaaacgccagcaacgcggcctttttacggttcctggccttttgctggccttttgctcacatgttctttcctgcgttatcccctgattctgtggataaccgtattaccgcctttgagtgagctgataccgctcgccgcagccgaacgaccgagcgcagcgagtcagtgagcgaggaagcggaagagcgcccaatacgcaaaccgcctctccccgcgcgttggccgattcattaatgcagctggcacgacaggtttcccgactggaaagcgggcagtgagcgcaacgcaattaatgtgagttagctcactcattaggcaccccaggctttacactttatgcttccggctcgtatgttgtgtggaattgtgagcggataacaatttcacacaggaaacagctatgaccatgattacgccagatttaattaag

SEQ ID NO: 4308 - DNA, 3610 bp, Artificial Sequence
  Description of Artificial Sequence: Synthetic polynucleotide
ctgcgcgctcgctcgctcactgaggccgcccgggcaaagcccgggcgtcgggcgacctttggtcgcccggcctcagtgagcgagcgagcgcgcagagagggagtggccaactccatcactaggggttccttgtagttaatgattaacccgccatgctacttatctaccagggtaatggggatcctctagaactatagctagtcgacattgattattgactagttattaatagtaatcaattacggggtcattagttcatagcccatatatggagttccgcgttacataacttacggtaaatggcccgcctggctgaccgcccaacgacccccgcccattgacgtcaataatgacgtatgttcccatagtaacgccaatagggactttccattgacgtcaatgggtggagtatttacggtaaactgcccacttggcagtacatcaagtgtatcatatgccaagtacgccccctattgacgtcaatgacggtaaatggcccgcctggcattatgcccagtacatgaccttatgggactttcctacttggcagtacatctacgtattagtcatcgctattaccatgtcgaggccacgttctgcttcactctccccatctcccccccctccccacccccaattttgtatttatttattttttaattattttgtgcagcgatgggggcggggggggggggcgcgcgccaggcggggcggggcggggcgaggggcggggcggggcgaggcggagaggtgcggcggcagccaatcagagcggcgcgctccgaaagtttccttttatggcgaggcggcggcggcggcggccctataaaaagcgaagcgcgcggcgggcgggagcaagcttgaactgaaaaaccagaaagttaactggtaagtttagtctttttgtcttttatttcaggtcccggatccggtggtggtgcaaatcaaagaactgctcctcagtggatgttgcctttacttctaggcctgtacggaagtgttacttctgctctaaaagctgcggaattgtacccgcggccgatccaccggtgccgccaccatggaatggacctgggtctttctcttcctcctgtcagtaactgcaggtgtccactcccaggttcagctgcagcagtctggagctgagctgatgaagcctggggcctcagtgaagatatcctgcaaggctactggctacacattcagtaactactggatagagtgggtaaagcagaggcctggacatggccttgagtggattggagagattttacctggaagtgatagtattaagtacaatgagaatttcaagggcaaggccacattcactgcagatacatcctccaacacagcctacatgcaactcagcagcctgacatctgaggactctgccgtctattactgtgcaagaagggggaactacccagactactggggccaaggcaccactctcacagtctcctcagccaaaacgacacccccatctgtctatccactggcccctggatctgctgcccaaactaactccatggtgaccctgggatgcctggtcaagggctatttccctgagccagtgacagtgacctggaactctggatccctgtccagcggtgtgcacaccttcccagctgtcctgcagtctgacctctacactctgagcagctcagtgactgtcccctccagcacctggcccagcgagaccgtcacctgcaacgttgcccacccggccagcagcaccaaggtggacaagaaaattgtgcccagggattgtggttgtaagccttgcatatgtacagtcccagaagtatcatctgtcttcatcttccccccaaagcccaaggatgtgctcaccattactctgactcctaaggtcacgtgtgttgtggtagacatcagcaaggatgatcccgaggtccagttcagctggtttgtagatgatgtggaggtgcacacagctcagacgcaaccccgggaggagcagttcaacagcactttccgctcagtcagtgaacttcccatcatgcaccaggactggctcaatggcaaggagttcaaatgcagggtcaacagtgcagctttccctgcccccatcgagaaaaccatctccaaaaccaaaggcagaccgaaggctccacaggtgtacaccattccacctcccaaggagcagatggccaaggataaagtcagtctgacctgcatgataacagacttcttccctgaagacattactgtggagtggcagtggaatgggcagccagcggagaactacaagaacactcagcccatcatggacacagatggctcttacttcgtctacagcaagctcaatgtgcagaagagcaactgggaggcaggaaatactttcacctgctctgtgttacatgagggcctgcacaaccaccatactgagaagagcctctcccactctcctggtcgggccaagcggggaagcggagctactaacttcagcctgctgaagcaggctggagacgtggaggagaaccctggacctatgaagttgcctgttaggctgttggtgctgatgttctggattcctgcttccagcagtgatgttgtgatgacccaaactccactctccctgcctgtcagtcttggagatcaagcctccatctcttgcagatctagtcagagccttgtacacagtaatggaaacacctatttacattggtacctgcagaagccaggccagtctccaaagctcctgatctacaaagtttccaaccgattttctggggtcccagacaggttcagtggcagtggatcagggacagatttcacactcaagatcagcagagtggaggctgaggatctgggagtttatttctgctctcaaagtacacatgttccgctcacgttcggtgctgggaccaagctggagctgaaacgggctgatgctgcaccaactgtatccatcttcccaccatccagtgagcagttaacatctggaggtgcctcagtcgtgtgcttcttgaacaacttctaccccaaagacatcaatgtcaagtggaagattgatggcagtgaacgacaaaatggcgtcctgaacagttggactgatcaggacagcaaagacagcacctacagcatgagcagcaccctcacgttgaccaaggacgagtatgaacgacataacagctatacctgtgaggccactcacaagacatcaacttcacccattgtcaagagcttcaacaggaatgagtgttagtaactcgaggacggggtgaactacgcctgaggatccgatctttttccctctgccaaaaattatggggacatcatgaagccccttgagcatctgacttctggctaataaaggaaatttattttcattgcaatagtgtgttggaattttttgtgtctctcactcggaagcaattcgttgatctgaatttcgaccacccataatacccattaccctggtagataagtagcatggcgggttaatcattaactacaaggaacccctagtgatggagttggccactccctctctgcgcgctcgctcgctcactgaggccgggcgaccaaaggtcgcccgacgcccgggctttgcccgggcggcctcagtgagcgagcgagcgcgcag

SEQ ID NO: 4309 - DNA, 6431 bp, Artificial Sequence; identical to SEQ ID NO: 4301
  Description of Artificial Sequence: Synthetic polynucleotide

SEQ ID NO: 4310 - DNA, 3610 bp, Artificial Sequence; identical to SEQ ID NO: 4302
  Description of Artificial Sequence: Synthetic polynucleotide

SEQ ID NO: 4311 - DNA, 6428 bp, Artificial Sequence
  Description of Artificial Sequence: Synthetic polynucleotide
gccttaattaggctgcgcgctcgctcgctcactgaggccgcccgggcaaagcccgggcgtcgggcgacctttggtcgcccggcctcagtgagcgagcgagcgcgcagagagggagtggccaactccatcactaggggttccttgtagttaatgattaacccgccatgctacttatctaccagggtaatggggatcctctagaactatagctagtcgacattgattattgactagttattaatagtaatcaattacggggtcattagttcatagcccatatatggagttccgcgttacataacttacggtaaatggcccgcctggctgaccgcccaacgacccccgcccattgacgtcaataatgacgtatgttcccatagtaacgccaatagggactttccattgacgtcaatgggtggagtatttacggtaaactgcccacttggcagtacatcaagtgtatcatatgccaagtacgccccctattgacgtcaatgacggtaaatggcccgcctggcattatgcccagtacatgaccttatgggactttcctacttggcagtacatctacgtattagtcatcgctattaccatgtcgaggccacgttctgcttcactctccccatctcccccccctccccacccccaattttgtatttatttattttttaattattttgtgcagcgatgggggcggggggggggggcgcgcgccaggcggggcggggcggggcgaggggcggggcggggcgaggcggagaggtgcggcggcagccaatcagagcggcgcgctccgaaagtttccttttatggcgaggcggcggcggcggcggccctataaaaagcgaagcgcgcggcgggcgggagcaagcttgaactgaaaaaccagaaagttaactggtaagtttagtctttttgtcttttatttcaggtcccggatccggtggtggtgcaaatcaaagaactgctcctcagtggatgttgcctttacttctaggcctgtacggaagtgttacttctgctctaaaagctgcggaattgtacccgcggccgatccaccggtgccgccaccatgaagttgcctgttaggctgttggtgctgatgttctggattcctgcttccagcagtgatgttgtgatgacccaaactccactctccctgcctgtcagtcttggagatcaagcctccatctcttgcagatctagtcagagccttgtacacagtaatggaaacacctatttacattggtacctgcagaagccaggccagtctccaaagctcctgatctacaaagtttccaaccgattttctggggtcccagacaggttcagtggcagtggatcagggacagatttcacactcaagatcagcagagtggaggctgaggatctgggagtttatttctgctctcaaagtacacatgttccgctcacgttcggtgctgggaccaagctggagctgaaacgggctgatgctgcaccaactgtatccatcttcccaccatccagtgagcagttaacatctggaggtgcctcagtcgtgtgcttcttgaacaacttctaccccaaagacatcaatgtcaagtggaagattgatggcagtgaacgacaaaatggcgtcctgaacagttggactgatcaggacagcaaagacagcacctacagcatgagcagcaccctcacgttgaccaaggacgagtatgaacgacataacagctatacctgtgaggccactcacaagacatcaacttcacccattgtcaagagcttcaacaggaatgagtgtggcggaggtggctccggaggcggaggcagcggcggaggtgggtctggcggaggcgggtgcggcggaggtggctccatggaatggacctgggtctttctcttcctcctgtcagtaactgcaggtgtccactcccaggttcagctgcagcagtctggagctgagctgatgaagcctggggcctcagtgaagatatcctgcaaggctactggctacacattcagtaactactggatagagtgggtaaagcagaggcctggacatggccttgagtggattggagagattttacctggaagtgatagtattaagtacaatgagaatttcaagggcaaggccacattcactgcagatacatcctccaacacagcctacatgcaactcagcagcctgacatctgaggactctgccgtctattactgtgcaagaagggggaactacccagactactggggccaaggcaccactctcacagtctcctcagccaaaacgacacccccatctgtctatccactggcccctggatctgctgcccaaactaactccatggtgaccctgggatgcctggtcaagggctatttccctgagccagtgacagtgacctggaactctggatccctgtccagcggtgtgcacaccttcccagctgtcctgcagtctgacctctacactctgagcagctcagtgactgtcccctccagcacctggcccagcgagaccgtcacctgcaacgttgcccacccggccagcagcaccaaggtggacaagaaaattgtgcccagggattgtggttgtaagccttgcatatgtacagtcccagaagtatcatctgtcttcatcttccccccaaagcccaaggatgtgctcaccattactctgactcctaaggtcacgtgtgttgtggtagacatcagcaaggatgatcccgaggtccagttcagctggtttgtagatgatgtggaggtgcacacagctcagacgcaaccccgggaggagcagttcaacagcactttccgctcagtcagtgaacttcccatcatgcaccaggactggctcaatggcaaggagttcaaatgcagggtcaacagtgcagctttccctgcccccatcgagaaaaccatctccaaaaccaaaggcagaccgaaggctccacaggtgtacaccattccacctcccaaggagcagatggccaaggataaagtcagtctgacctgcatgataacagacttcttccctgaagacattactgtggagtggcagtggaatgggcagccagcggagaactacaagaacactcagcccatcatggacacagatggctcttacttcgtctacagcaagctcaatgtgcagaagagcaactgggaggcaggaaatactttcacctgctctgtgttacatgagggcctgcacaaccaccatactgagaagagcctctcccactctcctggttagtaactcgaggacggggtgaactacgcctgaggatccgatctttttccctctgccaaaaattatggggacatcatgaagccccttgagcatctgacttctggctaataaaggaaatttattttcattgcaatagtgtgttggaattttttgtgtctctcactcggaagcaattcgttgatctgaatttcgaccacccataatacccattaccctggtagataagtagcatggcgggttaatcattaactacaaggaacccctagtgatggagttggccactccctctctgcgcgctcgctcgctcactgaggccgggcgaccaaaggtcgcccgacgcccgggctttgcccgggcggcctcagtgagcgagcgagcgcgcagccttaattaacctaattcactggccgtcgttttacaacgtcgtgactgggaaaaccctggcgttacccaacttaatcgccttgcagcacatccccctttcgccagctggcgtaatagcgaagaggcccgcaccgatcgcccttcccaacagttgcgcagcctgaatggcgaatgggacgcgccctgtagcggcgcattaagcgcggcgggtgtggtggttacgcgcagcgtgaccgctacacttgccagcgccctagcgcccgctcctttcgctttcttcccttcctttctcgccacgttcgccggctttccccgtcaagctctaaatcgggggctccctttagggttccgatttagtgctttacggcacctcgaccccaaaaaacttgattagggtgatggttcacgtagtgggccatcgccctgatagacggtttttcgccctttgacgttggagtccacgttctttaatagtggactcttgttccaaactggaacaacactcaaccctatctcggtctattcttttgatttataagggattttgccgatttcggcctattggttaaaaaatgagctgatttaacaaaaatttaacgcgaattttaacaaaatattaacgcttacaatttaggtggcacttttcggggaaatgtgcgcggaacccctatttgtttatttttctaaatacattcaaatatgtatccgctcatgagacaataaccctgataaatgcttcaataatattgaaaaaggaagagtatgagtattcaacatttccgtgtcgcccttattcccttttttgcggcattttgccttcctgtttttgctcacccagaaacgctggtgaaagtaaaagatgctgaagatcagttgggtgcacgagtgggttacatcgaactggatctcaacagcggtaagatccttgagagttttcgccccgaagaacgttttccaatgatgagcacttttaaagttctgctatgtggcgcggtattatcccgtattgacgccgggcaagagcaactcggtcgccgcatacactattctcagaatgacttggttgagtactcaccagtcacagaaaagcatcttacggatggcatgacagtaagagaattatgcagtgctgccataaccatgagtgataacactgcggccaacttacttctgacaacgatcggaggaccgaaggagctaaccgcttttttgcacaacatgggggatcatgtaactcgccttgatcgttgggaaccggagctgaatgaagccataccaaacgacgagcgtgacaccacgatgcctgtagcaatggcaacaacgttgcgcaaactattaactggcgaactacttactctagcttcccggcaacaattaatagactggatggaggcggataaagttgcaggaccacttctgcgctcggcccttccggctggctggtttattgctgataaatctggagccggtgagcgtgggtctcgcggtatcattgcagcactggggccagatggtaagccctcccgtatcgtagttatctacacgacggggagtcaggcaactatggatgaacgaaatagacagatcgctgagataggtgcctcactgattaagcattggtaactgtcagaccaagtttactcatatatactttagattgatttaaaacttcatttttaatttaaaaggatctaggtgaagatcctttttgataatctcatgaccaaaatcccttaacgtgagttttcgttccactgagcgtcagaccccgtagaaaagatcaaaggatcttcttgagatcctttttttctgcgcgtaatctgctgcttgcaaacaaaaaaaccaccgctaccagcggtggtttgtttgccggatcaagagctaccaactctttttccgaaggtaactggcttcagcagagcgcagataccaaatactgttcttctagtgtagccgtagttaggccaccacttcaagaactctgtagcaccgcctacatacctcgctctgctaatcctgttaccagtggctgctgccagtggcgataagtcgtgtcttaccgggttggactcaagacgatagttaccggataaggcgcagcggtcgggctgaacggggggttcgtgcacacagcccagcttggagcgaacgacctacaccgaactgagatacctacagcgtgagctatgagaaagcgccacgcttcccgaagggagaaaggcggacaggtatccggtaagcggcagggtcggaacaggagagcgcacgagggagcttccagggggaaacgcctggtatctttatagtcctgtcgggtttcgccacctctgacttgagcgtcgatttttgtgatgctcgtcaggggggcggagcctatggaaaaacgccagcaacgcggcctttttacggttcctggccttttgctggccttttgctcacatgttctttcctgcgttatcccctgattctgtggataaccgtattaccgcctttgagtgagctgataccgctcgccgcagccgaacgaccgagcgcagcgagtcagtgagcgaggaagcggaagagcgcccaatacgcaaaccgcctctccccgcgcgttggccgattcattaatgcagctggcacgacaggtttcccgactggaaagcgggcagtgagcgcaacgcaattaatgtgagttagctcactcattaggcaccccaggctttacactttatgcttccggctcgtatgttgtgtggaattgtgagcggataacaatttcacacaggaaacagctatgaccatgattacgccagatttaattaag

SEQ ID NO: 4312 - DNA, 3607 bp, Artificial Sequence
  Description of Artificial Sequence: Synthetic polynucleotide
ctgcgcgctcgctcgctcactgaggccgcccgggcaaagcccgggcgtcgggcgacctttggtcgcccggcctcagtgagcgagcgagcgcgcagagagggagtggccaactccatcactaggggttccttgtagttaatgattaacccgccatgctacttatctaccagggtaatggggatcctctagaactatagctagtcgacattgattattgactagttattaatagtaatcaattacggggtcattagttcatagcccatatatggagttccgcgttacataacttacggtaaatggcccgcctggctgaccgcccaacgacccccgcccattgacgtcaataatgacgtatgttcccatagtaacgccaatagggactttccattgacgtcaatgggtggagtatttacggtaaactgcccacttggcagtacatcaagtgtatcatatgccaagtacgccccctattgacgtcaatgacggtaaatggcccgcctggcattatgcccagtacatgaccttatgggactttcctacttggcagtacatctacgtattagtcatcgctattaccatgtcgaggccacgttctgcttcactctccccatctcccccccctccccacccccaattttgtatttatttattttttaattattttgtgcagcgatgggggcggggggggggggcgcgcgccaggcggggcggggcggggcgaggggcggggcggggcgaggcggagaggtgcggcggcagccaatcagagcggcgcgctccgaaagtttccttttatggcgaggcggcggcggcggcggccctataaaaagcgaagcgcgcggcgggcgggagcaagcttgaactgaaaaaccagaaagttaactggtaagtttagtctttttgtcttttatttcaggtcccggatccggtggtggtgcaaatcaaagaactgctcctcagtggatgttgcctttacttctaggcctgtacggaagtgttacttctgctctaaaagctgcggaattgtacccgcggccgatccaccggtgccgccaccatgaagttgcctgttaggctgttggtgctgatgttctggattcctgcttccagcagtgatgttgtgatgacccaaactccactctccctgcctgtcagtcttggagatcaagcctccatctcttgcagatctagtcagagccttgtacacagtaatggaaacacctatttacattggtacctgcagaagccaggccagtctccaaagctcctgatctacaaagtttccaaccgattttctggggtcccagacaggttcagtggcagtggatcagggacagatttcacactcaagatcagcagagtggaggctgaggatctgggagtttatttctgctctcaaagtacacatgttccgctcacgttcggtgctgggaccaagctggagctgaaacgggctgatgctgcaccaactgtatccatcttcccaccatccagtgagcagttaacatctggaggtgcctcagtcgtgtgcttcttgaacaacttctaccccaaagacatcaatgtcaagtggaagattgatggcagtgaacgacaaaatggcgtcctgaacagttggactgatcaggacagcaaagacagcacctacagcatgagcagcaccctcacgttgaccaaggacgagtatgaacgacataacagctatacctgtgaggccactcacaagacatcaacttcacccattgtcaagagcttcaacaggaatgagtgtggcggaggtggctccggaggcggaggcagcggcggaggtgggtctggcggaggcgggtgcggcggaggtggctccatggaatggacctgggtctttctcttcctcctgtcagtaactgcaggtgtccactcccaggttcagctgcagcagtctggagctgagctgatgaagcctggggcctcagtgaagatatcctgcaaggctactggctacacattcagtaactactggatagagtgggtaaagcagaggcctggacatggccttgagtggattggagagattttacctggaagtgatagtattaagtacaatgagaatttcaagggcaaggccacattcactgcagatacatcctccaacacagcctacatgcaactcagcagcctgacatctgaggactctgccgtctattactgtgcaagaagggggaactacccagactactggggccaaggcaccactctcacagtctcctcagccaaaacgacacccccatctgtctatccactggcccctggatctgctgcccaaactaactccatggtgaccctgggatgcctggtcaagggctatttccctgagccagtgacagtgacctggaactctggatccctgtccagcggtgtgcacaccttcccagctgtcctgcagtctgacctctacactctgagcagctcagtgactgtcccctccagcacctggcccagcgagaccgtcacctgcaacgttgcccacccggccagcagcaccaaggtggacaagaaaattgtgcccagggattgtggttgtaagccttgcatatgtacagtcccagaagtatcatctgtcttcatcttccccccaaagcccaaggatgtgctcaccattactctgactcctaaggtcacgtgtgttgtggtagacatcagcaaggatgatcccgaggtccagttcagctggtttgtagatgatgtggaggtgcacacagctcagacgcaaccccgggaggagcagttcaacagcactttccgctcagtcagtgaacttcccatcatgcaccaggactggctcaatggcaaggagttcaaatgcagggtcaacagtgcagctttccctgcccccatcgagaaaaccatctccaaaaccaaaggcagaccgaaggctccacaggtgtacaccattccacctcccaaggagcagatggccaaggataaagtcagtctgacctgcatgataacagacttcttccctgaagacattactgtggagtggcagtggaatgggcagccagcggagaactacaagaacactcagcccatcatggacacagatggctcttacttcgtctacagcaagctcaatgtgcagaagagcaactgggaggcaggaaatactttcacctgctctgtgttacatgagggcctgcacaaccaccatactgagaagagcctctcccactctcctggttagtaactcgaggacggggtgaactacgcctgaggatccgatctttttccctctgccaaaaattatggggacatcatgaagccccttgagcatctgacttctggctaataaaggaaatttattttcattgcaatagtgtgttggaattttttgtgtctctcactcggaagcaattcgttgatctgaatttcgaccacccataatacccattaccctggtagataagtagcatggcgggttaatcattaactacaaggaacccctagtgatggagttggccactccctctctgcgcgctcgctcgctcactgaggccgggcgaccaaaggtcgcccgacgcccgggctttgcccgggcggcctcagtgagcgagcgagcgcgcag

SEQ ID NO: 4313 - DNA, 6431 bp, Artificial Sequence
  Description of Artificial Sequence: Synthetic polynucleotide
gccttaattaggctgcgcgctcgctcgctcactgaggccgcccgggcaaagcccgggcgtcgggcgacctttggtcgcccggcctcagtgagcgagcgagcgcgcagagagggagtggccaactccatcactaggggttccttgtagttaatgattaacccgccatgctacttatctaccagggtaatggggatcctctagaactatagctagtcgacattgattattgactagttattaatagtaatcaattacggggtcattagttcatagcccatatatggagttccgcgttacataacttacggtaaatggcccgcctggctgaccgcccaacgacccccgcccattgacgtcaataatgacgtatgttcccatagtaacgccaatagggactttccattgacgtcaatgggtggagtatttacggtaaactgcccacttggcagtacatcaagtgtatcatatgccaagtacgccccctattgacgtcaatgacggtaaatggcccgcctggcattatgcccagtacatgaccttatgggactttcctacttggcagtacatctacgtattagtcatcgctattaccatgtcgaggccacgttctgcttcactctccccatctcccccccctccccacccccaattttgtatttatttattttttaattattttgtgcagcgatgggggcggggggggggggcgcgcgccaggcggggcggggcggggcgaggggcggggcggggcgaggcggagaggtgcggcggcagccaatcagagcggcgcgctccgaaagtttccttttatggcgaggcggcggcggcggcggccctataaaaagcgaagcgcgcggcgggcgggagcaagcttgaactgaaaaaccagaaagttaactggtaagtttagtctttttgtcttttatttcaggtcccggatccggtggtggtgcaaatcaaagaactgctcctcagtggatgttgcctttacttctaggcctgtacggaagtgttacttctgctctaaaagctgcggaattgtacccgcggccgatccaccggtgccgccaccatgaagttgcctgttaggctgttggtgctgatgttctggattcctgcttccagcagtgatgttttgatgacccaaactccactctccctgcctgtcagtcttggagatcaagcctccatctcttgcaaatctagtcagagcattgtacatagtaatggaaacacctatttagaatggtacctgcagaaaccaggccagtctccaaagctcctggtctacaaagtttccaatcgattttctggggtcccagacaggttcagtggcagtggatcagggacagatttcacactcaagatcagcagagtggaggctgaggatctgggaacttattactgctttcaaggttcacttgttccttgggcgttcggtggaggcaccaagctggaaatcaaacgggctgatgctgcaccaactgtatccatcttcccaccatccagtgagcagttaacatctggaggtgcctcagtcgtgtgcttcttgaacaacttctaccccaaagacatcaatgtcaagtggaagattgatggcagtgaacgacaaaatggcgtcctgaacagttggactgatcaggacagcaaagacagcacctacagcatgagcagcaccctcacgttgaccaaggacgagtatgaacgacataacagctatacctgtgaggccactcacaagacatcaacttcacccattgtcaagagcttcaacaggaatgagtgtggaagcggagtgaaacagactttgaattttgaccttctcaagttggcgggagacgtggagtccaaccctggacctatgaacttcgggctcagcttgattttccttgtccttgttttaaaaggtgtccagtgtgaggttcatctggtggagtctgggggagccttagtgaagcctggagggtccctgaaactctcctgtgcagcctctggattcagtttcagtaaatatggcatgtcttgggttcgccagactccagacaagaggctggagtgggtcgcaaccattagtagtagtgggagtcgcacctactatccagacagtgtgaagggccaattcaccatctccagagacaatgccaagaacaccctgtacctgcaaatgagcagtctgaagtctgaggacacagccatgtattactgttcaattagctgggacggtgctatggactactggggtcaagggacctcagtcaccgtctcctcagccaaaacgacacccccatctgtctatccactggcccctggatctgctgcccaaactaactccatggtgaccctgggatgcctggtcaagggctatttccctgagccagtgacagtgacctggaactctggatccctgtccagcggtgtgcacaccttcccagctgtcctgcagtctgacctctacactctgagcagctcagtgactgtcccctccagcacctggcccagcgagaccgtcacctgcaacgttgcccacccggccagcagcaccaaggtggacaagaaaattgtgcccagggattgtggttgtaagccttgcatatgtacagtcccagaagtatcatctgtcttcatcttccccccaaagcccaaggatgtgctcaccattactctgactcctaaggtcacgtgtgttgtggtagacatcagcaaggatgatcccgaggtccagttcagctggtttgtagatgatgtggaggtgcacacagctcagacgcaaccccgggaggagcagttcaacagcactttccgctcagtcagtgaacttcccatcatgcaccaggactggctcaatggcaaggagttcaaatgcagggtcaacagtgcagctttccctgcccccatcgagaaaaccatctccaaaaccaaaggcagaccgaaggctccacaggtgtacaccattccacctcccaaggagcagatggccaaggataaagtcagtctgacctgcatgataacagacttcttccctgaagacattactgtggagtggcagtggaatgggcagccagcggagaactacaagaacactcagcccatcatggacacagatggctcttacttcgtctacagcaagctcaatgtgcagaagagcaactgggaggcaggaaatactttcacctgctctgtgttacatgagggcctgcacaaccaccatactgagaagagcctctcccactctcctggttagtaactcgaggacggggtgaactacgcctgaggatccgatctttttccctctgccaaaaattatggggacatcatgaagccccttgagcatctgacttctggctaataaaggaaatttattttcattgcaatagtgtgttggaattttttgtgtctctcactcggaagcaattcgttgatctgaatttcgaccacccataatacccattaccctggtagataagtagcatggcgggttaatcattaactacaaggaacccctagtgatggagttggccactccctctctgcgcgctcgctcgctcactgaggccgggcgaccaaaggtcgcccgacgcccgggctttgcccgggcggcctcagtgagcgagcgagcgcgcagccttaattaacctaattcactggccgtcgttttacaacgtcgtgactgggaaaaccctggcgttacccaacttaatcgccttgcagcacatccccctttcgccagctggcgtaatagcgaagaggcccgcaccgatcgcccttcccaacagttgcgcagcctgaatggcgaatgggacgcgccctgtagcggcgcattaagcgcggcgggtgtggtggttacgcgcagcgtgaccgctacacttgccagcgccctagcgcccgctcctttcgctttcttcccttcctttctcgccacgttcgccggctttccccgtcaagctctaaatcgggggctccctttagggttccgatttagtgctttacggcacctcgaccccaaaaaacttgattagggtgatggttcacgtagtgggccatcgccctgatagacggtttttcgccctttgacgttggagtccacgttctttaatagtggactcttgttccaaactggaacaacactcaaccctatctcggtctattcttttgatttataagggattttgccgatttcggcctattggttaaaaaatgagctgatttaacaaaaatttaacgcgaattttaacaaaatattaacgcttacaatttaggtggcacttttcggggaaatgtgcgcggaacccctatttgtttatttttctaaatacattcaaatatgtatccgctcatgagacaataaccctgataaatgcttcaataatattgaaaaaggaagagtatgagtattcaacatttccgtgtcgcccttattcccttttttgcggcattttgccttcctgtttttgctcacccagaaacgctggtgaaagtaaaagatgctgaagatcagttgggtgcacgagtgggttacatcgaactggatctcaacagcggtaagatccttgagagttttcgccccgaagaacgttttccaatgatgagcacttttaaagttctgctatgtggcgcggtattatcccgtattgacgccgggcaagagcaactcggtcgccgcatacactattctcagaatgacttggttgagtactcaccagtcacagaaaagcatcttacggatggcatgacagtaagagaattatgcagtgctgccataaccatgagtgataacactgcggccaacttacttctgacaacgatcggaggaccgaaggagctaaccgcttttttgcacaacatgggggatcatgtaactcgccttgatcgttgggaaccggagctgaatgaagccataccaaacgacgagcgtgacaccacgatgcctgtagcaatggcaacaacgttgcgcaaactattaactggcgaactacttactctagcttcccggcaacaattaatagactggatggaggcggataaagttgcaggaccacttctgcgctcggcccttccggctggctggtttattgctgataaatctggagccggtgagcgtgggtctcgcggtatcattgcagcactggggccagatggtaagccctcccgtatcgtagttatctacacgacggggagtcaggcaactatggatgaacgaaatagacagatcgctgagataggtgcctcactgattaagcattggtaactgtcagaccaagtttactcatatatactttagattgatttaaaacttcatttttaatttaaaaggatctaggtgaagatcctttttgataatctcatgaccaaaatcccttaacgtgagttttcgttccactgagcgtcagaccccgtagaaaagatcaaaggatcttcttgagatcctttttttctgcgcgtaatctgctgcttgcaaacaaaaaaaccaccgctaccagcggtggtttgtttgccggatcaagagctaccaactctttttccgaaggtaactggcttcagcagagcgcagataccaaatactgttcttctagtgtagccgtagttaggccaccacttcaagaactctgtagcaccgcctacatacctcgctctgctaatcctgttaccagtggctgctgccagtggcgataagtcgtgtcttaccgggttggactcaagacgatagttaccggataaggcgcagcggtcgggctgaacggggggttcgtgcacacagcccagcttggagcgaacgacctacaccgaactgagatacctacagcgtgagctatgagaaagcgccacgcttcccgaagggagaaaggcggacaggtatccggtaagcggcagggtcggaacaggagagcgcacgagggagcttccagggggaaacgcctggtatctttatagtcctgtcgggtttcgccacctctgacttgagcgtcgatttttgtgatgctcgtcaggggggcggagcctatggaaaaacgccagcaacgcggcctttttacggttcctggccttttgctggccttttgctcacatgttctttcctgcgttatcccctgattctgtggataaccgtattaccgcctttgagtgagctgataccgctcgccgcagccgaacgaccgagcgcagcgagtcagtgagcgaggaagcggaagagcgcccaatacgcaaaccgcctctccccgcgcgttggccgattcattaatgcagctggcacgacaggtttcccgactggaaagcgggcagtgagcgcaacgcaattaatgtgagttagctcactcattaggcaccccaggctttacactttatgcttccggctcgtatgttgtgtggaattgtgagcggataacaatttcacacaggaaacagctatgaccatgattacgccagatttaattaag

SEQ ID NO: 4314 - DNA, 3610 bp, Artificial Sequence
  Description of Artificial Sequence: Synthetic polynucleotide
ctgcgcgctcgctcgctcactgaggccgcccgggcaaagcccgggcgtcgggcgacctttggtcgcccggcctcagtgagcgagcgagcgcgcagagagggagtggccaactccatcactaggggttccttgtagttaatgattaacccgccatgctacttatctaccagggtaatggggatcctctagaactatagctagtcgacattgattattgactagttattaatagtaatcaattacggggtcattagttcatagcccatatatggagttccgcgttacataacttacggtaaatggcccgcctggctgaccgcccaacgacccccgcccattgacgtcaataatgacgtatgttcccatagtaacgccaatagggactttccattgacgtcaatgggtggagtatttacggtaaactgcccacttggcagtacatcaagtgtatcatatgccaagtacgccccctattgacgtcaatgacggtaaatggcccgcctggcattatgcccagtacatgaccttatgggactttcctacttggcagtacatctacgtattagtcatcgctattaccatgtcgaggccacgttctgcttcactctccccatctcccccccctccccacccccaattttgtatttatttattttttaattattttgtgcagcgatgggggcggggggggggggcgcgcgccaggcggggcggggcggggcgaggggcggggcggggcgaggcggagaggtgcggcggcagccaatcagagcggcgcgctccgaaagtttccttttatggcgaggcggcggcggcggcggccctataaaaagcgaagcgcgcggcgggcgggagcaagcttgaactgaaaaaccagaaagttaactggtaagtttagtctttttgtcttttatttcaggtcccggatccggtggtggtgcaaatcaaagaactgctcctcagtggatgttgcctttacttctaggcctgtacggaagtgttacttctgctctaaaagctgcggaattgtacccgcggccgatccaccggtgccgccaccatgaagttgcctgttaggctgttggtgctgatgttctggattcctgcttccagcagtgatgttttgatgacccaaactccactctccctgcctgtcagtcttggagatcaagcctccatctcttgcaaatctagtcagagcattgtacatagtaatggaaacacctatttagaatggtacctgcagaaaccaggccagtctccaaagctcctggtctacaaagtttccaatcgattttctggggtcccagacaggttcagtggcagtggatcagggacagatttcacactcaagatcagcagagtggaggctgaggatctgggaacttattactgctttcaaggttcacttgttccttgggcgttcggtggaggcaccaagctggaaatcaaacgggctgatgctgcaccaactgtatccatcttcccaccatccagtgagcagttaacatctggaggtgcctcagtcgtgtgcttcttgaacaacttctaccccaaagacatcaatgtcaagtggaagattgatggcagtgaacgacaaaatggcgtcctgaacagttggactgatcaggacagcaaagacagcacctacagcatgagcagcaccctcacgttgaccaaggacgagtatgaacgacataacagctatacctgtgaggccactcacaagacatcaacttcacccattgtcaagagcttcaacaggaatgagtgtggaagcggagtgaaacagactttgaattttgaccttctcaagttggcgggagacgtggagtccaaccctggacctatgaacttcgggctcagcttgattttccttgtccttgttttaaaaggtgtccagtgtgaggttcatctggtggagtctgggggagccttagtgaagcctggagggtccctgaaactctcctgtgcagcctctggattcagtttcagtaaatatggcatgtcttgggttcgccagactccagacaagaggctggagtgggtcgcaaccattagtagtagtgggagtcgcacctactatccagacagtgtgaagggccaattcaccatctccagagacaatgccaagaacaccctgtacctgcaaatgagcagtctgaagtctgaggacacagccatgtattactgttcaattagctgggacggtgctatggactactggggtcaagggacctcagtcaccgtctcctcagccaaaacgacacccccatctgtctatccactggcccctggatctgctgcccaaactaactccatggtgaccctgggatgcctggtcaagggctatttccctgagccagtgacagtgacctggaactctggatccctgtccagcggtgtgcacaccttcccagctgtcctgcagtctgacctctacactctgagcagctcagtgactgtcccctccagcacctggcccagcgagaccgtcacctgcaacgttgcccacccggccagcagcaccaaggtggacaagaaaattgtgcccagggattgtggttgtaagccttgcatatgtacagtcccagaagtatcatctgtcttcatcttccccccaaagcccaaggatgtgctcaccattactctgactcctaaggtcacgtgtgttgtggtagacatcagcaaggatgatcccgaggtccagttcagctggtttgtagatgatgtggaggtgcacacagctcagacgcaaccccgggaggagcagttcaacagcactttccgctcagtcagtgaacttcccatcatgcaccaggactggctcaatggcaaggagttcaaatgcagggtcaacagtgcagctttccctgcccccatcgagaaaaccatctccaaaaccaaaggcagaccgaaggctccacaggtgtacaccattccacctcccaaggagcagatggccaaggataaagtcagtctgacctgcatgataacagacttcttccctgaagacattactgtggagtggcagtggaatgggcagccagcggagaactacaagaacactcagcccatcatggacacagatggctcttacttcgtctacagcaagctcaatgtgcagaagagcaactgggaggcaggaaatactttcacctgctctgtgttacatgagggcctgcacaaccaccatactgagaagagcctctcccactctcctggttagtaactcgaggacggggtgaactacgcctgaggatccgatctttttccctctgccaaaaattatggggacatcatgaagccccttgagcatctgacttctggctaataaaggaaatttattttcattgcaatagtgtgttggaattttttgtgtctctcactcggaagcaattcgttgatctgaatttcgaccacccataatacccattaccctggtagataagtagcatggcgggttaatcattaactacaaggaacccctagtgatggagttggccactccctctctgcgcgctcgctcgctcactgaggccgggcgaccaaaggtcgcccgacgcccgggctttgcccgggcggcctcagtgagcgagcgagcgcgcag

SEQ ID NO: 4315 - DNA, 6443 bp, Artificial Sequence
  Description of Artificial Sequence: Synthetic polynucleotide
gccttaattaggctgcgcgctcgctcgctcactgaggccgcccgggcaaagcccgggcgtcgggcgacctttggtcgcccggcctcagtgagcgagcgagcgcgcagagagggagtggccaactccatcactaggggttccttgtagttaatgattaacccgccatgctacttatctaccagggtaatggggatcctctagaactatagctagtcgacattgattattgactagttattaatagtaatcaattacggggtcattagttcatagcccatatatggagttccgcgttacataacttacggtaaatggcccgcctggctgaccgcccaacgacccccgcccattgacgtcaataatgacgtatgttcccatagtaacgccaatagggactttccattgacgtcaatgggtggagtatttacggtaaactgcccacttggcagtacatcaagtgtatcatatgccaagtacgccccctattgacgtcaatgacggtaaatggcccgcctggcattatgcccagtacatgaccttatgggactttcctacttggcagtacatctacgtattagtcatcgctattaccatgtcgaggccacgttctgcttcactctccccatctcccccccctccccacccccaattttgtatttatttattttttaattattttgtgcagcgatgggggcggggggggggggcgcgcgccaggcggggcggggcggggcgaggggcggggcggggcgaggcggagaggtgcggcggcagccaatcagagcggcgcgctccgaaagtttccttttatggcgaggcggcggcggcggcggccctataaaaagcgaagcgcgcggcgggcgggagcaagcttgaactgaaaaaccagaaagttaactggtaagtttagtctttttgtcttttatttcaggtcccggatccggtggtggtgcaaatcaaagaactgctcctcagtggatgttgcctttacttctaggcctgtacggaagtgttacttctgctctaaaagctgcggaattgtacccgcggccgatccaccggtgccgccaccatgaacttcgggctcagcttgattttccttgtccttgttttaaaaggtgtccagtgtgaggttcatctggtggagtctgggggagccttagtgaagcctggagggtccctgaaactctcctgtgcagcctctggattcagtttcagtaaatatggcatgtcttgggttcgccagactccagacaagaggctggagtgggtcgcaaccattagtagtagtgggagtcgcacctactatccagacagtgtgaagggccaattcaccatctccagagacaatgccaagaacaccctgtacctgcaaatgagcagtctgaagtctgaggacacagccatgtattactgttcaattagctgggacggtgctatggactactggggtcaagggacctcagtcaccgtctcctcagccaaaacgacacccccatctgtctatccactggcccctggatctgctgcccaaactaactccatggtgaccctgggatgcctggtcaagggctatttccctgagccagtgacagtgacctggaactctggatccctgtccagcggtgtgcacaccttcccagctgtcctgcagtctgacctctacactctgagcagctcagtgactgtcccctccagcacctggcccagcgagaccgtcacctgcaacgttgcccacccggccagcagcaccaaggtggacaagaaaattgtgcccagggattgtggttgtaagccttgcatatgtacagtcccagaagtatcatctgtcttcatcttccccccaaagcccaaggatgtgctcaccattactctgactcctaaggtcacgtgtgttgtggtagacatcagcaaggatgatcccgaggtccagttcagctggtttgtagatgatgtggaggtgcacacagctcagacgcaaccccgggaggagcagttcaacagcactttccgctcagtcagtgaacttcccatcatgcaccaggactggctcaatggcaaggagttcaaatgcagggtcaacagtgcagctttccctgcccccatcgagaaaaccatctccaaaaccaaaggcagaccgaaggctccacaggtgtacaccattccacctcccaaggagcagatggccaaggataaagtcagtctgacctgcatgataacagacttcttccctgaagacattactgtggagtggcagtggaatgggcagccagcggagaactacaagaacactcagcccatcatggacacagatggctcttacttcgtctacagcaagctcaatgtgcagaagagcaactgggaggcaggaaatactttcacctgctctgtgttacatgagggcctgcacaaccaccatactgagaagagcctctcccactctcctggtcgggccaagcggggaagcggagtgaaacagactttgaattttgaccttctcaagttggcgggagacgtggagtccaaccctggacctatgaagttgcctgttaggctgttggtgctgatgttctggattcctgcttccagcagtgatgttttgatgacccaaactccactctccctgcctgtcagtcttggagatcaagcctccatctcttgcaaatctagtcagagcattgtacatagtaatggaaacacctatttagaatggtacctgcagaaaccaggccagtctccaaagctcctggtctacaaagtttccaatcgattttctggggtcccagacaggttcagtggcagtggatcagggacagatttcacactcaagatcagcagagtggaggctgaggatctgggaacttattactgctttcaaggttcacttgttccttgggcgttcggtggaggcaccaagctggaaatcaaacgggctgatgctgcaccaactgtatccatcttcccaccatccagtgagcagttaacatctggaggtgcctcagtcgtgtgcttcttgaacaacttctaccccaaagacatcaatgtcaagtggaagattgatggcagtgaacgacaaaatggcgtcctgaacagttggactgatcaggacagcaaagacagcacctacagcatgagcagcaccctcacgttgaccaaggacgagtatgaacgacataacagctatacctgtgaggccactcacaagacatcaacttcacccattgtcaagagcttcaacaggaatgagtgttagtaactcgaggacggggtgaactacgcctgaggatccgatctttttccctctgccaaaaattatggggacatcatgaagccccttgagcatctgacttctggctaataaaggaaatttattttcattgcaatagtgtgttggaattttttgtgtctctcactcggaagcaattcgttgatctgaatttcgaccacccataatacccattaccctggtagataagtagcatggcgggttaatcattaactacaaggaacccctagtgatggagttggccactccctctctgcgcgctcgctcgctcactgaggccgggcgaccaaaggtcgcccgacgcccgggctttgcccgggcggcctcagtgagcgagcgagcgcgcagccttaattaacctaattcactggccgtcgttttacaacgtcgtgactgggaaaaccctggcgttacccaacttaatcgccttgcagcacatccccctttcgccagctggcgtaatagcgaagaggcccgcaccgatcgcccttcccaacagttgcgcagcctgaatggcgaatgggacgcgccctgtagcggcgcattaagcgcggcgggtgtggtggttacgcgcagcgtgaccgctacacttgccagcgccctagcgcccgctcctttcgctttcttcccttcctttctcgccacgttcgccggctttccccgtcaagctctaaatcgggggctccctttagggttccgatttagtgctttacggcacctcgaccccaaaaaacttgattagggtgatggttcacgtagtgggccatcgccctgatagacggtttttcgccctttgacgttggagtccacgttctttaatagtggactcttgttccaaactggaacaacactcaaccctatctcggtctattcttttgatttataagggattttgccgatttcggcctattggttaaaaaatgagctgatttaacaaaaatttaacgcgaattttaacaaaatattaacgcttacaatttaggtggcacttttcggggaaatgtgcgcggaacccctatttgtttatttttctaaatacattcaaatatgtatccgctcatgagacaataaccctgataaatgcttcaataatattgaaaaaggaagagtatgagtattcaacatttccgtgtcgcccttattcccttttttgcggcattttgccttcctgtttttgctcacccagaaacgctggtgaaagtaaaagatgctgaagatcagttgggtgcacgagtgggttacatcgaactggatctcaacagcggtaagatccttgagagttttcgccccgaagaacgttttccaatgatgagcacttttaaagttctgctatgtggcgcggtattatcccgtattgacgccgggcaagagcaactcggtcgccgcatacactattctcagaatgacttggttgagtactcaccagtcacagaaaagcatcttacggatggcatgacagtaagagaattatgcagtgctgccataaccatgagtgataacactgcggccaacttacttctgacaacgatcggaggaccgaaggagctaaccgcttttttgcacaacatgggggatcatgtaactcgccttgatcgttgggaaccggagctgaatgaagccataccaaacgacgagcgtgacaccacgatgcctgtagcaatggcaacaacgttgcgcaaactattaactggcgaactacttactctagcttcccggcaacaattaatagactggatggaggcggataaagttgcaggaccacttctgcgctcggcccttccggctggctggtttattgctgataaatctggagccggtgagcgtgggtctcgcggtatcattgcagcactggggccagatggtaagccctcccgtatcgtagttatctacacgacggggagtcaggcaactatggatgaacgaaatagacagatcgctgagataggtgcctcactgattaagcattggtaactgtcagaccaagtttactcatatatactttagattgatttaaaacttcatttttaatttaaaaggatctaggtgaagatcctttttgataatctcatgaccaaaatcccttaacgtgagttttcgttccactgagcgtcagaccccgtagaaaagatcaaaggatcttcttgagatcctttttttctgcgcgtaatctgctgcttgcaaacaaaaaaaccaccgctaccagcggtggtttgtttgccggatcaagagctaccaactctttttccgaaggtaactggcttcagcagagcgcagataccaaatactgttcttctagtgtagccgtagttaggccaccacttcaagaactctgtagcaccgcctacatacctcgctctgctaatcctgttaccagtggctgctgccagtggcgataagtcgtgtcttaccgggttggactcaagacgatagttaccggataaggcgcagcggtcgggctgaacggggggttcgtgcacacagcccagcttggagcgaacgacctacaccgaactgagatacctacagcgtgagctatgagaaagcgccacgcttcccgaagggagaaaggcggacaggtatccggtaagcggcagggtcggaacaggagagcgcacgagggagcttccagggggaaacgcctggtatctttatagtcctgtcgggtttcgccacctctgacttgagcgtcgatttttgtgatgctcgtcaggggggcggagcctatggaaaaacgccagcaacgcggcctttttacggttcctggccttttgctggccttttgctcacatgttctttcctgcgttatcccctgattctgtggataaccgtattaccgcctttgagtgagctgataccgctcgccgcagccgaacgaccgagcgcagcgagtcagtgagcgaggaagcggaagagcgcccaatacgcaaaccgcctctccccgcgcgttggccgattcattaatgcagctggcacgacaggtttcccgactggaaagcgggcagtgagcgcaacgcaattaatgtgagttagctcactcattaggcaccccaggctttacactttatgcttccggctcgtatgttgtgtggaattgtgagcggataacaatttcacacaggaaacagctatgaccatgattacgccagatttaattaag

SEQ ID NO: 4316 - DNA, 3622 bp, Artificial Sequence
  Description of Artificial Sequence: Synthetic polynucleotide
ctgcgcgctcgctcgctcactgaggccgcccgggcaaagcccgggcgtcgggcgacctttggtcgcccggcctcagtgagcgagcgagcgcgcagagagggagtggccaactccatcactaggggttccttgtagttaatgattaacccgccatgctacttatctaccagggtaatggggatcctctagaactatagctagtcgacattgattattgactagttattaatagtaatcaattacggggtcattagttcatagcccatatatggagttccgcgttacataacttacggtaaatggcccgcctggctgaccgcccaacgacccccgcccattgacgtcaataatgacgtatgttcccatagtaacgccaatagggactttccattgacgtcaatgggtggagtatttacggtaaactgcccacttggcagtacatcaagtgtatcatatgccaagtacgccccctattgacgtcaatgacggtaaatggcccgcctggcattatgcccagtacatgaccttatgggactttcctacttggcagtacatctacgtattagtcatcgctattaccatgtcgaggccacgttctgcttcactctccccatctcccccccctccccacccccaattttgtatttatttattttttaattattttgtgcagcgatgggggcggggggggggggcgcgcgccaggcggggcggggcggggcgaggggcggggcggggcgaggcggagaggtgcggcggcagccaatcagagcggcgcgctccgaaagtttccttttatggcgaggcggcggcggcggcggccctataaaaagcgaagcgcgcggcgggcgggagcaagcttgaactgaaaaaccagaaagttaactggtaagtttagtctttttgtcttttatttcaggtcccggatccggtggtggtgcaaatcaaagaactgctcctcagtggatgttgcctttacttctaggcctgtacggaagtgttacttctgctctaaaagctgcggaattgtacccgcggccgatccaccggtgccgccaccatgaacttcgggctcagcttgattttccttgtccttgttttaaaaggtgtccagtgtgaggttcatctggtggagtctgggggagccttagtgaagcctggagggtccctgaaactctcctgtgcagcctctggattcagtttcagtaaatatggcatgtcttgggttcgccagactccagacaagaggctggagtgggtcgcaaccattagtagtagtgggagtcgcacctactatccagacagtgtgaagggccaattcaccatctccagagacaatgccaagaacaccctgtacctgcaaatgagcagtctgaagtctgaggacacagccatgtattactgttcaattagctgggacggtgctatggactactggggtcaagggacctcagtcaccgtctcctcagccaaaacgacacccccatctgtctatccactggcccctggatctgctgcccaaactaactccatggtgaccctgggatgcctggtcaagggctatttccctgagccagtgacagtgacctggaactctggatccctgtccagcggtgtgcacaccttcccagctgtcctgcagtctgacctctacactctgagcagctcagtgactgtcccctccagcacctggcccagcgagaccgtcacctgcaacgttgcccacccggccagcagcaccaaggtggacaagaaaattgtgcccagggattgtggttgtaagccttgcatatgtacagtcccagaagtatcatctgtcttcatcttccccccaaagcccaaggatgtgctcaccattactctgactcctaaggtcacgtgtgttgtggtagacatcagcaaggatgatcccgaggtccagttcagctggtttgtagatgatgtggaggtgcacacagctcagacgcaaccccgggaggagcagttcaacagcactttccgctcagtcagtgaacttcccatcatgcaccaggactggctcaatggcaaggagttcaaatgcagggtcaacagtgcagctttccctgcccccatcgagaaaaccatctccaaaaccaaaggcagaccgaaggctccacaggtgtacaccattccacctcccaaggagcagatggccaaggataaagtcagtctgacctgcatgataacagacttcttccctgaagacattactgtggagtggcagtggaatgggcagccagcggagaactacaagaacactcagcccatcatggacacagatggctcttacttcgtctacagcaagctcaatgtgcagaagagcaactgggaggcaggaaatactttcacctgctctgtgttacatgagggcctgcacaaccaccatactgagaagagcctctcccactctcctggtcgggccaagcggggaagcggagtgaaacagactttgaattttgaccttctcaagttggcgggagacgtggagtccaaccctggacctatgaagttgcctgttaggctgttggtgctgatgttctggattcctgcttccagcagtgatgttttgatgacccaaactccactctccctgcctgtcagtcttggagatcaagcctccatctcttgcaaatctagtcagagcattgtacatagtaatggaaacacctatttagaatggtacctgcagaaaccaggccagtctccaaagctcctggtctacaaagtttccaatcgattttctggggtcccagacaggttcagtggcagtggatcagggacagatttcacactcaagatcagcagagtggaggctgaggatctgggaacttattactgctttcaaggttcacttgttccttgggcgttcggtggaggcaccaagctggaaatcaaacgggctgatgctgcaccaactgtatccatcttcccaccatccagtgagcagttaacatctggaggtgcctcagtcgtgtgcttcttgaacaacttctaccccaaagacatcaatgtcaagtggaagattgatggcagtgaacgacaaaatggcgtcctgaacagttggactgatcaggacagcaaagacagcacctacagcatgagcagcaccctcacgttgaccaaggacgagtatgaacgacataacagctatacctgtgaggccactcacaagacatcaacttcacccattgtcaagagcttcaacaggaatgagtgttagtaactcgaggacggggtgaactacgcctgaggatccgatctttttccctctgccaaaaattatggggacatcatgaagccccttgagcatctgacttctggctaataaaggaaatttattttcattgcaatagtgtgttggaattttttgtgtctctcactcggaagcaattcgttgatctgaatttcgaccacccataatacccattaccctggtagataagtagcatggcgggttaatcattaactacaaggaacccctagtgatggagttggccactccctctctgcgcgctcgctcgctcactgaggccgggcgaccaaaggtcgcccgacgcccgggctttgcccgggcggcctcagtgagcgagcgagcgcgcag

SEQ ID NO: 4317 - DNA, 6431 bp, Artificial Sequence
  Description of Artificial Sequence: Synthetic polynucleotide
gccttaattaggctgcgcgctcgctcgctcactgaggccgcccgggcaaagcccgggcgtcgggcgacctttggtcgcccggcctcagtgagcgagcgagcgcgcagagagggagtggccaactccatcactaggggttccttgtagttaatgattaacccgccatgctacttatctaccagggtaatggggatcctctagaactatagctagtcgacattgattattgactagttattaatagtaatcaattacggggtcattagttcatagcccatatatggagttccgcgttacataacttacggtaaatggcccgcctggctgaccgcccaacgacccccgcccattgacgtcaataatgacgtatgttcccatagtaacgccaatagggactttccattgacgtcaatgggtggagtatttacggtaaactgcccacttggcagtacatcaagtgtatcatatgccaagtacgccccctattgacgtcaatgacggtaaatggcccgcctggcattatgcccagtacatgaccttatgggactttcctacttggcagtacatctacgtattagtcatcgctattaccatgtcgaggccacgttctgcttcactctccccatctcccccccctccccacccccaattttgtatttatttattttttaattattttgtgcagcgatgggggcggggggggggggcgcgcgccaggcggggcggggcggggcgaggggcggggcggggcgaggcggagaggtgcggcggcagccaatcagagcggcgcgctccgaaagtttccttttatggcgaggcggcggcggcggcggccctataaaaagcgaagcgcgcggcgggcgggagcaagcttgaactgaaaaaccagaaagttaactggtaagtttagtctttttgtcttttatttcaggtcccggatccggtggtggtgcaaatcaaagaactgctcctcagtggatgttgcctttacttctaggcctgtacggaagtgttacttctgctctaaaagctgcggaattgtacccgcggccgatccaccggtgccgccaccatgagtcctgcccagttcctgtttctgttagtgctctggattcgggaaaccaacggtgatgttgtgatgacccagactccactcactttgtcggttaccattggacaaccagcctccatctcttgcaagtcaagtcagagcctcttagatagtgatggaaagacatatttgaattggttgttacagaggccaggccagtctccaaagcgcctaatctatctggtgtctaaactggactctggagtccctgacagattcactggcagtggatcagggacagatttcacactgaaaattagcagagtggaggctgaggatttgggagtttattattgctggcaaggtacacattttcctcggacgttcggtggaggcaccaagctggaaatcaaacgggctgatgctgcaccaactgtatccatcttcccaccatccagtgagcagttaacatctggaggtgcctcagtcgtgtgcttcttgaacaacttctaccccaaagacatcaatgtcaagtggaagattgatggcagtgaacgacaaaatggcgtcctgaacagttggactgatcaggacagcaaagacagcacctacagcatgagcagcaccctcacgttgaccaaggacgagtatgaacgacataacagctatacctgtgaggccactcacaagacatcaacttcacccattgtcaagagcttcaacaggaatgagtgtggaagcggagtgaaacagactttgaattttgaccttctcaagttggcgggagacgtggagtccaaccctggacctatgggatggagctggatctttctctttctcctgtcaggaactacaggtgtcctctctgaggtccagctgcaacagtctggacctgagctggtgaagcctggggcttcagtgaagatatcctgcaagacttctggatacacattcactgaatacaccatacactgggtgaagcagagccatggagagagccttgagtggattggaggtattaatccaaacgatggtggtactatttacaaccagaagttcaagggcaaggccacattgactgtagacaagtcctccaaaacagcctacatggagctccgcagcctgacatctgaggattctgcagtcttttactgtgcaagagggccctccgccaggtttccttactggggccaagggactctggtcactgtctctgcagccaaaacgacacccccatctgtctatccactggcccctggatctgctgcccaaactaactccatggtgaccctgggatgcctggtcaagggctatttccctgagccagtgacagtgacctggaactctggatccctgtccagcggtgtgcacaccttcccagctgtcctgcagtctgacctctacactctgagcagctcagtgactgtcccctccagcacctggcccagcgagaccgtcacctgcaacgttgcccacccggccagcagcaccaaggtggacaagaaaattgtgcccagggattgtggttgtaagccttgcatatgtacagtcccagaagtatcatctgtcttcatcttccccccaaagcccaaggatgtgctcaccattactctgactcctaaggtcacgtgtgttgtggtagacatcagcaaggatgatcccgaggtccagttcagctggtttgtagatgatgtggaggtgcacacagctcagacgcaaccccgggaggagcagttcaacagcactttccgctcagtcagtgaacttcccatcatgcaccaggactggctcaatggcaaggagttcaaatgcagggtcaacagtgcagctttccctgcccccatcgagaaaaccatctccaaaaccaaaggcagaccgaaggctccacaggtgtacaccattccacctcccaaggagcagatggccaaggataaagtcagtctgacctgcatgataacagacttcttccctgaagacattactgtggagtggcagtggaatgggcagccagcggagaactacaagaacactcagcccatcatggacacagatggctcttacttcgtctacagcaagctcaatgtgcagaagagcaactgggaggcaggaaatactttcacctgctctgtgttacatgagggcctgcacaaccaccatactgagaagagcctctcccactctcctggttagtaactcgaggacggggtgaactacgcctgaggatccgatctttttccctctgccaaaaattatggggacatcatgaagccccttgagcatctgacttctggctaataaaggaaatttattttcattgcaatagtgtgttggaattttttgtgtctctcactcggaagcaattcgttgatctgaatttcgaccacccataatacccattaccctggtagataagtagcatggcgggttaatcattaactacaaggaacccctagtgatggagttggccactccctctctgcgcgctcgctcgctcactgaggccgggcgaccaaaggtcgcccgacgcccgggctttgcccgggcggcctcagtgagcgagcgagcgcgcagccttaattaacctaattcactggccgtcgttttacaacgtcgtgactgggaaaaccctggcgttacccaacttaatcgccttgcagcacatccccctttcgccagctggcgtaatagcgaagaggcccgcaccgatcgcccttcccaacagttgcgcagcctgaatggcgaatgggacgcgccctgtagcggcgcattaagcgcggcgggtgtggtggttacgcgcagcgtgaccgctacacttgccagcgccctagcgcccgctcctttcgctttcttcccttcctttctcgccacgttcgccggctttccccgtcaagctctaaatcgggggctccctttagggttccgatttagtgctttacggcacctcgaccccaaaaaacttgattagggtgatggttcacgtagtgggccatcgccctgatagacggtttttcgccctttgacgttggagtccacgttctttaatagtggactcttgttccaaactggaacaacactcaaccctatctcggtctattcttttgatttataagggattttgccgatttcggcctattggttaaaaaatgagctgatttaacaaaaatttaacgcgaattttaacaaaatattaacgcttacaatttaggtggcacttttcggggaaatgtgcgcggaacccctatttgtttatttttctaaatacattcaaatatgtatccgctcatgagacaataaccctgataaatgcttcaataatattgaaaaaggaagagtatgagtattcaacatttccgtgtcgcccttattcccttttttgcggcattttgccttcctgtttttgctcacccagaaacgctggtgaaagtaaaagatgctgaagatcagttgggtgcacgagtgggttacatcgaactggatctcaacagcggtaagatccttgagagttttcgccccgaagaacgttttccaatgatgagcacttttaaagttctgctatgtggcgcggtattatcccgtattgacgccgggcaagagcaactcggtcgccgcatacactattctcagaatgacttggttgagtactcaccagtcacagaaaagcatcttacggatggcatgacagtaagagaattatgcagtgctgccataaccatgagtgataacactgcggccaacttacttctgacaacgatcggaggaccgaaggagctaaccgcttttttgcacaacatgggggatcatgtaactcgccttgatcgttgggaaccggagctgaatgaagccataccaaacgacgagcgtgacaccacgatgcctgtagcaatggcaacaacgttgcgcaaactattaactggcgaactacttactctagcttcccggcaacaattaatagactggatggaggcggataaagttgcaggaccacttctgcgctcggcccttccggctggctggtttattgctgataaatctggagccggtgagcgtgggtctcgcggtatcattgcagcactggggccagatggtaagccctcccgtatcgtagttatctacacgacggggagtcaggcaactatggatgaacgaaatagacagatcgctgagataggtgcctcactgattaagcattggtaactgtcagaccaagtttactcatatatactttagattgatttaaaacttcatttttaatttaaaaggatctaggtgaagatcctttttgataatctcatgaccaaaatcccttaacgtgagttttcgttccactgagcgtcagaccccgtagaaaagatcaaaggatcttcttgagatcctttttttctgcgcgtaatctgctgcttgcaaacaaaaaaaccaccgctaccagcggtggtttgtttgccggatcaagagctaccaactctttttccgaaggtaactggcttcagcagagcgcagataccaaatactgttcttctagtgtagccgtagttaggccaccacttcaagaactctgtagcaccgcctacatacctcgctctgctaatcctgttaccagtggctgctgccagtggcgataagtcgtgtcttaccgggttggactcaagacgatagttaccggataaggcgcagcggtcgggctgaacggggggttcgtgcacacagcccagcttggagcgaacgacctacaccgaactgagatacctacagcgtgagctatgagaaagcgccacgcttcccgaagggagaaaggcggacaggtatccggtaagcggcagggtcggaacaggagagcgcacgagggagcttccagggggaaacgcctggtatctttatagtcctgtcgggtttcgccacctctgacttgagcgtcgatttttgtgatgctcgtcaggggggcggagcctatggaaaaacgccagcaacgcggcctttttacggttcctggccttttgctggccttttgctcacatgttctttcctgcgttatcccctgattctgtggataaccgtattaccgcctttgagtgagctgataccgctcgccgcagccgaacgaccgagcgcagcgagtcagtgagcgaggaagcggaagagcgcccaatacgcaaaccgcctctccccgcgcgttggccgattcattaatgcagctggcacgacaggtttcccgactggaaagcgggcagtgagcgcaacgcaattaatgtgagttagctcactcattaggcaccccaggctttacactttatgcttccggctcgtatgttgtgtggaattgtgagcggataacaatttcacacaggaaacagctatgaccatgattacgccagatttaattaag

SEQ ID NO: 4318 - DNA, 3610 bp, Artificial Sequence
  Description of Artificial Sequence: Synthetic polynucleotide
ctgcgcgctcgctcgctcactgaggccgcccgggcaaagcccgggcgtcgggcgacctttggtcgcccggcctcagtgagcgagcgagcgcgcagagagggagtggccaactccatcactaggggttccttgtagttaatgattaacccgccatgctacttatctaccagggtaatggggatcctctagaactatagctagtcgacattgattattgactagttattaatagtaatcaattacggggtcattagttcatagcccatatatggagttccgcgttacataacttacggtaaatggcccgcctggctgaccgcccaacgacccccgcccattgacgtcaataatgacgtatgttcccatagtaacgccaatagggactttccattgacgtcaatgggtggagtatttacggtaaactgcccacttggcagtacatcaagtgtatcatatgccaagtacgccccctattgacgtcaatgacggtaaatggcccgcctggcattatgcccagtacatgaccttatgggactttcctacttggcagtacatctacgtattagtcatcgctattaccatgtcgaggccacgttctgcttcactctccccatctcccccccctccccacccccaattttgtatttatttattttttaattattttgtgcagcgatgggggcggggggggggggcgcgcgccaggcggggcggggcggggcgaggggcggggcggggcgaggcggagaggtgcggcggcagccaatcagagcggcgcgctccgaaagtttccttttatggcgaggcggcggcggcggcggccctataaaaagcgaagcgcgcggcgggcgggagcaagcttgaactgaaaaaccagaaagttaactggtaagtttagtctttttgtcttttatttcaggtcccggatccggtggtggtgcaaatcaaagaactgctcctcagtggatgttgcctttacttctaggcctgtacggaagtgttacttctgctctaaaagctgcggaattgtacccgcggccgatccaccggtgccgccaccatgagtcctgcccagttcctgtttctgttagtgctctggattcgggaaaccaacggtgatgttgtgatgacccagactccactcactttgtcggttaccattggacaaccagcctccatctcttgcaagtcaagtcagagcctcttagatagtgatggaaagacatatttgaattggttgttacagaggccaggccagtctccaaagcgcctaatctatctggtgtctaaactggactctggagtccctgacagattcactggcagtggatcagggacagatttcacactgaaaattagcagagtggaggctgaggatttgggagtttattattgctggcaaggtacacattttcctcggacgttcggtggaggcaccaagctggaaatcaaacgggctgatgctgcaccaactgtatccatcttcccaccatccagtgagcagttaacatctggaggtgcctcagtcgtgtgcttcttgaacaacttctaccccaaagacatcaatgtcaagtggaagattgatggcagtgaacgacaaaatggcgtcctgaacagttggactgatcaggacagcaaagacagcacctacagcatgagcagcaccctcacgttgaccaaggacgagtatgaacgacataacagctatacctgtgaggccactcacaagacatcaacttcacccattgtcaagagcttcaacaggaatgagtgtggaagcggagtgaaacagactttgaattttgaccttctcaagttggcgggagacgtggagtccaaccctggacctatgggatggagctggatctttctctttctcctgtcaggaactacaggtgtcctctctgaggtccagctgcaacagtctggacctgagctggtgaagcctggggcttcagtgaagatatcctgcaagacttctggatacacattcactgaatacaccatacactgggtgaagcagagccatggagagagccttgagtggattggaggtattaatccaaacgatggtggtactatttacaaccagaagttcaagggcaaggccacattgactgtagacaagtcctccaaaacagcctacatggagctccgcagcctgacatctgaggattctgcagtcttttactgtgcaagagggccctccgccaggtttccttactggggccaagggactctggtcactgtctctgcagccaaaacgacacccccatctgtctatccactggcccctggatctgctgcccaaactaactccatggtgaccctgggatgcctggtcaagggctatttccctgagccagtgacagtgacctggaactctggatccctgtccagcggtgtgcacaccttcccagctgtcctgcagtctgacctctacactctgagcagctcagtgactgtcccctccagcacctggcccagcgagaccgtcacctgcaacgttgcccacccggccagcagcaccaaggtggacaagaaaattgtgcccagggattgtggttgtaagccttgcatatgtacagtcccagaagtatcatctgtcttcatcttccccccaaagcccaaggatgtgctcaccattactctgactcctaaggtcacgtgtgttgtggtagacatcagcaaggatgatcccgaggtccagttcagctggtttgtagatgatgtggaggtgcacacagctcagacgcaaccccgggaggagcagttcaacagcactttccgctcagtcagtgaacttcccatcatgcaccaggactggctcaatggcaaggagttcaaatgcagggtcaacagtgcagctttccctgcccccatcgagaaaaccatctccaaaaccaaaggcagaccgaaggctccacaggtgtacaccattccacctcccaaggagcagatggccaaggataaagtcagtctgacctgcatgataacagacttcttccctgaagacattactgtggagtggcagtggaatgggcagccagcggagaactacaagaacactcagcccatcatggacacagatggctcttacttcgtctacagcaagctcaatgtgcagaagagcaactgggaggcaggaaatactttcacctgctctgtgttacatgagggcctgcacaaccaccatactgagaagagcctctcccactctcctggttagtaactcgaggacggggtgaactacgcctgaggatccgatctttttccctctgccaaaaattatggggacatcatgaagccccttgagcatctgacttctggctaataaaggaaatttattttcattgcaatagtgtgttggaattttttgtgtctctcactcggaagcaattcgttgatctgaatttcgaccacccataatacccattaccctggtagataagtagcatggcgggttaatcattaactacaaggaacccctagtgatggagttggccactccctctctgcgcgctcgctcgctcactgaggccgggcgaccaaaggtcgcccgacgcccgggctttgcccgggcggcctcagtgagcgagcgagcgcgcag

SEQ ID NO: 4319 - DNA, 6443 bp, Artificial Sequence
  Description of Artificial Sequence: Synthetic polynucleotide
gccttaattaggctgcgcgctcgctcgctcactgaggccgcccgggcaaagcccgggcgtcgggcgacctttggtcgcccggcctcagtgagcgagcgagcgcgcagagagggagtggccaactccatcactaggggttccttgtagttaatgattaacccgccatgctacttatctaccagggtaatggggatcctctagaactatagctagtcgacattgattattgactagttattaatagtaatcaattacggggtcattagttcatagcccatatatggagttccgcgttacataacttacggtaaatggcccgcctggctgaccgcccaacgacccccgcccattgacgtcaataatgacgtatgttcccatagtaacgccaatagggactttccattgacgtcaatgggtggagtatttacggtaaactgcccacttggcagtacatcaagtgtatcatatgccaagtacgccccctattgacgtcaatgacggtaaatggcccgcctggcattatgcccagtacatgaccttatgggactttcctacttggcagtacatctacgtattagtcatcgctattaccatgtcgaggccacgttctgcttcactctccccatctcccccccctccccacccccaattttgtatttatttattttttaattattttgtgcagcgatgggggcggggggggggggcgcgcgccaggcggggcggggcggggcgaggggcggggcggggcgaggcggagaggtgcggcggcagccaatcagagcggcgcgctccgaaagtttccttttatggcgaggcggcggcggcggcggccctataaaaagcgaagcgcgcggcgggcgggagcaagcttgaactgaaaaaccagaaagttaactggtaagtttagtctttttgtcttttatttcaggtcccggatccggtggtggtgcaaatcaaagaactgctcctcagtggatgttgcctttacttctaggcctgtacggaagtgttacttctgctctaaaagctgcggaattgtacccgcggccgatccaccggtgccgccaccatgggatggagctggatctttctctttctcctgtcaggaactacaggtgtcctctctgaggtccagctgcaacagtctggacctgagctggtgaagcctggggcttcagtgaagatatcctgcaagacttctggatacacattcactgaatacaccatacactgggtgaagcagagccatggagagagccttgagtggattggaggtattaatccaaacgatggtggtactatttacaaccagaagttcaagggcaaggccacattgactgtagacaagtcctccaaaacagcctacatggagctccgcagcctgacatctgaggattctgcagtcttttactgtgcaagagggccctccgccaggtttccttactggggccaagggactctggtcactgtctctgcagccaaaacgacacccccatctgtctatccactggcccctggatctgctgcccaaactaactccatggtgaccctgggatgcctggtcaagggctatttccctgagccagtgacagtgacctggaactctggatccctgtccagcggtgtgcacaccttcccagctgtcctgcagtctgacctctacactctgagcagctcagtgactgtcccctccagcacctggcccagcgagaccgtcacctgcaacgttgcccacccggccagcagcaccaaggtggacaagaaaattgtgcccagggattgtggttgtaagccttgcatatgtacagtcccagaagtatcatctgtcttcatcttccccccaaagcccaaggatgtgctcaccattactctgactcctaaggtcacgtgtgttgtggtagacatcagcaaggatgatcccgaggtccagttcagctggtttgtagatgatgtggaggtgcacacagctcagacgcaaccccgggaggagcagttcaacagcactttccgctcagtcagtgaacttcccatcatgcaccaggactggctcaatggcaaggagttcaaatgcagggtcaacagtgcagctttccctgcccccatcgagaaaaccatctccaaaaccaaaggcagaccgaaggctccacaggtgtacaccattccacctcccaaggagcagatggccaaggataaagtcagtctgacctgcatgataacagacttcttccctgaagacattactgtggagtggcagtggaatgggcagccagcggagaactacaagaacactcagcccatcatggacacagatggctcttacttcgtctacagcaagctcaatgtgcagaagagcaactgggaggcaggaaatactttcacctgctctgtgttacatgagggcctgcacaaccaccatactgagaagagcctctcccactctcctggtcgggccaagcggggaagcggagtgaaacagactttgaattttgaccttctcaagttggcgggagacgtggagtccaaccctggacctatgagtcctgcccagttcctgtttctgttagtgctctggattcgggaaaccaacggtgatgttgtgatgacccagactccactcactttgtcggttaccattggacaaccagcctccatctcttgcaagtcaagtcagagcctcttagatagtgatggaaagacatatttgaattggttgttacagaggccaggccagtctccaaagcgcctaatctatctggtgtctaaactggactctggagtccctgacagattcactggcagtggatcagggacagatttcacactgaaaattagcagagtggaggctgaggatttgggagtttattattgctggcaaggtacacattttcctcggacgttcggtggaggcaccaagctggaaatcaaacgggctgatgctgcaccaactgtatccatcttcccaccatccagtgagcagttaacatctggaggtgcctcagtcgtgtgcttcttgaacaacttctaccccaaagacatcaatgtcaagtggaagattgatggcagtgaacgacaaaatggcgtcctgaacagttggactgatcaggacagcaaagacagcacctacagcatgagcagcaccctcacgttgaccaaggacgagtatgaacgacataacagctatacctgtgaggccactcacaagacatcaacttcacccattgtcaagagcttcaacaggaatgagtgttagtaactcgaggacggggtgaactacgcctgaggatccgatctttttccctctgccaaaaattatggggacatcatgaagccccttgagcatctgacttctggctaataaaggaaatttattttcattgcaatagtgtgttggaattttttgtgtctctcactcggaagcaattcgttgatctgaatttcgaccacccataatacccattaccctggtagataagtagcatggcgggttaatcattaactacaaggaacccctagtgatggagttggccactccctctctgcgcgctcgctcgctcactgaggccgggcgaccaaaggtcgcccgacgcccgggctttgcccgggcggcctcagtgagcgagcgagcgcgcagccttaattaacctaattcactggccgtcgttttacaacgtcgtgactgggaaaaccctggcgttacccaacttaatcgccttgcagcacatccccctttcgccagctggcgtaatagcgaagaggcccgcaccgatcgcccttcccaacagttgcgcagcctgaatggcgaatgggacgcgccctgtagcggcgcattaagcgcggcgggtgtggtggttacgcgcagcgtgaccgctacacttgccagcgccctagcgcccgctcctttcgctttcttcccttcctttctcgccacgttcgccggctttccccgtcaagctctaaatcgggggctccctttagggttccgatttagtgctttacggcacctcgaccccaaaaaacttgattagggtgatggttcacgtagtgggccatcgccctgatagacggtttttcgccctttgacgttggagtccacgttctttaatagtggactcttgttccaaactggaacaacactcaaccctatctcggtctattcttttgatttataagggattttgccgatttcggcctattggttaaaaaatgagctgatttaacaaaaatttaacgcgaattttaacaaaatattaacgcttacaatttaggtggcacttttcggggaaatgtgcgcggaacccctatttgtttatttttctaaatacattcaaatatgtatccgctcatgagacaataaccctgataaatgcttcaataatattgaaaaaggaagagtatgagtattcaacatttccgtgtcgcccttattcccttttttgcggcattttgccttcctgtttttgctcacccagaaacgctggtgaaagtaaaagatgctgaagatcagttgggtgcacgagtgggttacatcgaactggatctcaacagcggtaagatccttgagagttttcgccccgaagaacgttttccaatgatgagcacttttaaagttctgctatgtggcgcggtattatcccgtattgacgccgggcaagagcaactcggtcgccgcatacactattctcagaatgacttggttgagtactcaccagtcacagaaaagcatcttacggatggcatgacagtaagagaattatgcagtgctgccataaccatgagtgataacactgcggccaacttacttctgacaacgatcggaggaccgaaggagctaaccgcttttttgcacaacatgggggatcatgtaactcgccttgatcgttgggaaccggagctgaatgaagccataccaaacgacgagcgtgacaccacgatgcctgtagcaatggcaacaacgttgcgcaaactattaactggcgaactacttactctagcttcccggcaacaattaatagactggatggaggcggataaagttgcaggaccacttctgcgctcggcccttccggctggctggtttattgctgataaatctggagccggtgagcgtgggtctcgcggtatcattgcagcactggggccagatggtaagccctcccgtatcgtagttatctacacgacggggagtcaggcaactatggatgaacgaaatagacagatcgctgagataggtgcctcactgattaagcattggtaactgtcagaccaagtttactcatatatactttagattgatttaaaacttcatttttaatttaaaaggatctaggtgaagatcctttttgataatctcatgaccaaaatcccttaacgtgagttttcgttccactgagcgtcagaccccgtagaaaagatcaaaggatcttcttgagatcctttttttctgcgcgtaatctgctgcttgcaaacaaaaaaaccaccgctaccagcggtggtttgtttgccggatcaagagctaccaactctttttccgaaggtaactggcttcagcagagcgcagataccaaatactgttcttctagtgtagccgtagttaggccaccacttcaagaactctgtagcaccgcctacatacctcgctctgctaatcctgttaccagtggctgctgccagtggcgataagtcgtgtcttaccgggttggactcaagacgatagttaccggataaggcgcagcggtcgggctgaacggggggttcgtgcacacagcccagcttggagcgaacgacctacaccgaactgagatacctacagcgtgagctatgagaaagcgccacgcttcccgaagggagaaaggcggacaggtatccggtaagcggcagggtcggaacaggagagcgcacgagggagcttccagggggaaacgcctggtatctttatagtcctgtcgggtttcgccacctctgacttgagcgtcgatttttgtgatgctcgtcaggggggcggagcctatggaaaaacgccagcaacgcggcctttttacggttcctggccttttgctggccttttgctcacatgttctttcctgcgttatcccctgattctgtggataaccgtattaccgcctttgagtgagctgataccgctcgccgcagccgaacgaccgagcgcagcgagtcagtgagcgaggaagcggaagagcgcccaatacgcaaaccgcctctccccgcgcgttggccgattcattaatgcagctggcacgacaggtttcccgactggaaagcgggcagtgagcgcaacgcaattaatgtgagttagctcactcattaggcaccccaggctttacactttatgcttccggctcgtatgttgtgtggaattgtgagcggataacaatttcacacaggaaacagctatgaccatgattacgccagatttaattaag

SEQ ID NO: 4320 - DNA, 3622 bp, Artificial Sequence
  Description of Artificial Sequence: Synthetic polynucleotide
ctgcgcgctcgctcgctcactgaggccgcccgggcaaagcccgggcgtcgggcgacctttggtcgcccggcctcagtgagcgagcgagcgcgcagagagggagtggccaactccatcactaggggttccttgtagttaatgattaacccgccatgctacttatctaccagggtaatggggatcctctagaactatagctagtcgacattgattattgactagttattaatagtaatcaattacggggtcattagttcatagcccatatatggagttccgcgttacataacttacggtaaatggcccgcctggctgaccgcccaacgacccccgcccattgacgtcaataatgacgtatgttcccatagtaacgccaatagggactttccattgacgtcaatgggtggagtatttacggtaaactgcccacttggcagtacatcaagtgtatcatatgccaagtacgccccctattgacgtcaatgacggtaaatggcccgcctggcattatgcccagtacatgaccttatgggactttcctacttggcagtacatctacgtattagtcatcgctattaccatgtcgaggccacgttctgcttcactctccccatctcccccccctccccacccccaattttgtatttatttattttttaattattttgtgcagcgatgggggcggggggggggggcgcgcgccaggcggggcggggcggggcgaggggcggggcggggcgaggcggagaggtgcggcggcagccaatcagagcggcgcgctccgaaagtttccttttatggcgaggcggcggcggcggcggccctataaaaagcgaagcgcgcggcgggcgggagcaagcttgaactgaaaaaccagaaagttaactggtaagtttagtctttttgtcttttatttcaggtcccggatccggtggtggtgcaaatcaaagaactgctcctcagtggatgttgcctttacttctaggcctgtacggaagtgttacttctgctctaaaagctgcggaattgtacccgcggccgatccaccggtgccgccaccatgggatggagctggatctttctctttctcctgtcaggaactacaggtgtcctctctgaggtccagctgcaacagtctggacctgagctggtgaagcctggggcttcagtgaagatatcctgcaagacttctggatacacattcactgaatacaccatacactgggtgaagcagagccatggagagagccttgagtggattggaggtattaatccaaacgatggtggtactatttacaaccagaagttcaagggcaaggccacattgactgtagacaagtcctccaaaacagcctacatggagctccgcagcctgacatctgaggattctgcagtcttttactgtgcaagagggccctccgccaggtttccttactggggccaagggactctggtcactgtctctgcagccaaaacgacacccccatctgtctatccactggcccctggatctgctgcccaaactaactccatggtgaccctgggatgcctggtcaagggctatttccctgagccagtgacagtgacctggaactctggatccctgtccagcggtgtgcacaccttcccagctgtcctgcagtctgacctctacactctgagcagctcagtgactgtcccctccagcacctggcccagcgagaccgtcacctgcaacgttgcccacccggccagcagcaccaaggtggacaagaaaattgtgcccagggattgtggttgtaagccttgcatatgtacagtcccagaagtatcatctgtcttcatcttccccccaaagcccaaggatgtgctcaccattactctgactcctaaggtcacgtgtgttgtggtagacatcagcaaggatgatcccgaggtccagttcagctggtttgtagatgatgtggaggtgcacacagctcagacgcaaccccgggaggagcagttcaacagcactttccgctcagtcagtgaacttcccatcatgcaccaggactggctcaatggcaaggagttcaaatgcagggtcaacagtgcagctttccctgcccccatcgagaaaaccatctccaaaaccaaaggcagaccgaaggctccacaggtgtacaccattccacctcccaaggagcagatggccaaggataaagtcagtctgacctgcatgataacagacttcttccctgaagacattactgtggagtggcagtggaatgggcagccagcggagaactacaagaacactcagcccatcatggacacagatggctcttacttcgtctacagcaagctcaatgtgcagaagagcaactgggaggcaggaaatactttcacctgctctgtgttacatgagggcctgcacaaccaccatactgagaagagcctctcccactctcctggtcgggccaagcggggaagcggagtgaaacagactttgaattttgaccttctcaagttggcgggagacgtggagtccaaccctggacctatgagtcctgcccagttcctgtttctgttagtgctctggattcgggaaaccaacggtgatgttgtgatgacccagactccactcactttgtcggttaccattggacaaccagcctccatctcttgcaagtcaagtcagagcctcttagatagtgatggaaagacatatttgaattggttgttacagaggccaggccagtctccaaagcgcctaatctatctggtgtctaaactggactctggagtccctgacagattcactggcagtggatcagggacagatttcacactgaaaattagcagagtggaggctgaggatttgggagtttattattgctggcaaggtacacattttcctcggacgttcggtggaggcaccaagctggaaatcaaacgggctgatgctgcaccaactgtatccatcttcccaccatccagtgagcagttaacatctggaggtgcctcagtcgtgtgcttcttgaacaacttctaccccaaagacatcaatgtcaagtggaagattgatggcagtgaacgacaaaatggcgtcctgaacagttggactgatcaggacagcaaagacagcacctacagcatgagcagcaccctcacgttgaccaaggacgagtatgaacgacataacagctatacctgtgaggccactcacaagacatcaacttcacccattgtcaagagcttcaacaggaatgagtgttagtaactcgaggacggggtgaactacgcctgaggatccgatctttttccctctgccaaaaattatggggacatcatgaagccccttgagcatctgacttctggctaataaaggaaatttattttcattgcaatagtgtgttggaattttttgtgtctctcactcggaagcaattcgttgatctgaatttcgaccacccataatacccattaccctggtagataagtagcatggcgggttaatcattaactacaaggaacccctagtgatggagttggccactccctctctgcgcgctcgctcgctcactgaggccgggcgaccaaaggtcgcccgacgcccgggctttgcccgggcggcctcagtgagcgagcgagcgcgcag

SEQ ID NO: 4321 - protein, 25 aa, Artificial Sequence
  Description of Artificial Sequence: Synthetic peptide
GGGGSGGGGSGGGGSGGGGSGGGGS

SEQ ID NO: 4322 - protein, 50 aa, Artificial Sequence
  Description of Artificial Sequence: Synthetic Polypeptide
  MISC_FEATURE (1)..(50): This sequence may encompass 1-10 "Gly Gly Gly Gly Ser" repeating units
GGGGSGGGGSGGGGSGGGGSGGGGSGGGGSGGGGSGGGGSGGGGSGGGGS

SEQ ID NO: 4323 - protein, 4 aa, Artificial Sequence
  Description of Artificial Sequence: Synthetic peptide
KDEL

1. An AAV particle comprising a capsid and a viral genome, said viral genome comprising at least one inverted terminal repeat (ITR) region and a payload region, said payload region comprising a regulatory sequence operably linked to at least a first nucleic acid segment, said first nucleic acid segment encoding one or more polypeptides selected from the group consisting of any member given in Table 3 and fragments thereof.

2. The AAV particle of claim 1, wherein the capsid is selected from the group of serotypes consisting of Table 1.

3. The AAV particle of claim 2, wherein the regulatory sequence comprises a promoter.

4. The AAV particle of claim 3, wherein the promoter is selected from the group consisting of human elongation factor 1α-subunit (EF1α), cytomegalovirus (CMV) immediate-early enhancer and/or promoter, chicken β-actin (CBA) and its derivative CAG, βglucuronidase (GUSB), or ubiquitin C (UBC). Tissue-specific expression elements can be used to restrict expression to certain cell types such as, but not limited to, muscle specific promoters, B cell promoters, monocyte promoters, leukocyte promoters, macrophage promoters, pancreatic acinar cell promoters, endothelial cell promoters, lung tissue promoters, astrocyte promoters, or nervous system promoters which can be used to restrict expression to neurons, astrocytes, or oligodendrocytes.

5. The AAV particle of claim 1, wherein the viral genome is single stranded.

6. The AAV particle of claim 1, wherein the viral genome is self-complementary.

7. The AAV particle of claim 1, wherein at least one region of the viral genome is codon-optimized.

8. The AAV particle of claim 7, wherein the first nucleic acid segment is codon-optimized.

9. The AAV particle of any of claims 1-8, wherein the first nucleic acid segment encodes one or more polypeptides selected from the group consisting of an antibody heavy chain, an antibody light chain, a linker, and combinations thereof.

10. The AAV particle of claim 9, wherein any of the polypeptides encoded by first nucleic acid segment of the payload region is humanized.

11. The AAV particle of claim 9, wherein the linker is selected from one or more of the members of the group given in Table 2.

12. The AAV particle of claim 9, wherein the first nucleic acid segment encodes from 5′ to 3′, an antibody heavy chain, a linker, and an antibody light chain.

13. The AAV particle of claim 9, wherein the first nucleic acid segment encodes from 5′ to 3′, an antibody light chain, a linker, and an antibody heavy chain.

14. The AAV particle of claim 9, wherein the first nucleic acid segment encodes one or more antibody heavy chains.

15. The AAV particle of claim 14, wherein the first nucleic acid segment encodes one or more antibody heavy chains selected from those listed in Table 3.

16. The AAV particle of claim 9, wherein the first nucleic acid segment encodes one or more antibody light chains.

17. The AAV particle of claim 16, wherein the first nucleic acid segment encodes one or more antibody light chains selected from those listed in Table 3.

18. The AAV particle of claim 9, wherein the first nucleic acid segment encodes one or more antibody heavy chains and one or more antibody light chains and, optionally one or more linkers.

19. The AAV particle of any of claims 9-18, wherein said linker is selected from the group consisting of Table 2 and combinations thereof.

20. The AAV particle of claim 1, wherein the first nucleic acid segment encodes an antibody, having at least 95% identity to any of the sequences selected from the group consisting of SEQ ID NO: 2948-4269 and 4276-4320 (Table 3 and Table 4).

21. An AAV particle comprising a capsid and a viral genome, said viral genome comprising at least one inverted terminal repeat (ITR) region and a payload region comprising a regulatory sequence operably linked to at least, a first nucleic acid segment, said first nucleic acid segment encoding a bispecific antibody derived from any of the sequences listed in Tables 3 or 4 or portions or fragments thereof.

22. The AAV particle of claim 21, wherein the bispecific antibody comprises a light and a heavy chain selected from two different starting antibodies selected from the group consisting of SEQ ID NO: 2948-4269and 4276-4320 (Table 3 and Table 4).

23. A method of producing a functional antibody in a subject in need thereof, comprising administering to said subject the AAV particle of any of claims 1-22.

24. The method of claim 23, wherein the level or amount of the functional antibody in the target cell or tissue after administration to the subject is from about 0.001 ug/mL to 100 mg/mL.

25. The method of claim 23, wherein the functional antibody is encoded by a single first nucleic acid segment of a viral genome within said AAV particle.

26. The method of claim 23, wherein the functional antibody is encoded by two different viral genomes, said two different viral genomes packaged in separate capsids.

27. A pharmaceutical composition comprising an AAV particle of any of the preceding claims in a pharmaceutieally acceptable excipient.

28. The pharmaceutical composition of claim 27, wherein the pharmaceutieally acceptable excipient is saline.

29. The pharmaceutical composition of claim 27, wherein the pharmaceutically acceptable excipient is 0.001% pluronic in saline.

30. A method of expressing an antibody in a cell or tissue comprising administering the AAV particle of any of claims 1-29 via a delivery route selected from the group consisting of enteral (into the intestine), gastroenteral, epidural (into the dura mater), oral (by way of the mouth), transdermal, intracerebral (into the cerebrum), intracerebroventricular (into the cerebral ventricles), epicutaneous (application onto the skin), intradermal, (into the skin itself), subcutaneous (under the skin), nasal administration (through the nose), intravenous (into a vein), intravenous bolus, intravenous drip, intra-arterial (into an artery), intramuscular (into a muscle), intracardiac (into the heart), intraosseous infusion (into the bone marrow), intrathecal (into the spinal canal), intraparenchymal (into brain tissue), intraperitoneal, (infusion or injection into the peritoneum), intravesical infusion, intravitreal, (through the eye), intracavernous injection (into a pathologic cavity) intracavitary (into the base of the penis), intravaginal administration, intrauterine, extra-amniotic administration, transdermal (diffusion through the intact skin for systemic distribution), transmucosal (diffusion through a mucous membrane), transvaginal, insufflation (snorting), sublingual, sublabial, enema, eye drops (onto the conjunctiva), or in ear drops, auricular (in or by way of the ear), buccal (directed toward the cheek), conjunctival, cutaneous, dental (to a tooth or teeth), electro-osmosis, endocervical, endosinusial, endotracheal, extracorporeal, hemodialysis, infiltration, interstitial, intra-abdominal, intra-amniotic, intra-articular, intrabiliary, intrabronchial, intrabursal, intracartilaginous (within a cartilage), intracaudal (within the cauda equine), intracisternal (within the cisterna magna cerebellomedularis), intracorneal (within the cornea), dental intracoronal, intracoronary (within the coronary arteries), intracorporus cavernosum (within the dilatable spaces of the corporus cavernosa of the penis), intradiscal (within a disc), intraductal (within a duct of a gland), intraduodenal (within the duodenum), intradural (within or beneath the dura), intraepidermal (to the epidermis), intraesophageal (to the esophagus), intragastric (within the stomach), intragingival (within the gingivae), intraileal (within the distal portion of the small intestine), intralesional (within or introduced directly to a localized lesion), intraluminal (within a lumen of a tube), intralymphatic (within the lymph), intramedullary (within the marrow cavity of a bone), intrameningeal (within the meninges), intramyocardial (within the myocardium), intraocular (within the eye), intraovarian (within the ovary), intrapericardial (within the pericardium), intrapleural (within the pleura), intraprostatic (within the prostate gland), intrapulmonary (within the lungs or its bronchi), intrasinal (within the nasal or periorbital sinuses), intraspinal (within the vertebral column), intrasynovial (within the synovial cavity of a joint), intratendinous (within a tendon), intratesticular (within the testicle), intrathecal (within the cerebrospinal fluid at any level of the cerebrospinal axis), intrathoracic (within the thorax), intratubular (within the tubules of an organ), intratumor (within a tumor), intratympamc (within the aurus media), intravascular (within a vessel or vessels), intraventricular (within a ventricle), iontophoresis (by means of electric current where ions of soluble salts migrate into the tissues of the body), irrigation (to bathe or flush open wounds or body cavities), laryngeal (directly upon the larynx), nasogastric (through the nose and into the stomach), occlusive dressing technique (topical route administration which is then covered by a dressing which occludes the area), ophthalmic (to the external eye), oropharyngeal (directly to the mouth and pharynx), parenteral, percutaneous, periarticular, peridural, perineural, periodontal, rectal, respiratory (within the respiratory tract by inhaling orally or nasally for local or systemic effect), retrobulbar (behind the pons or behind the eyeball), soft tissue, subarachnoid, subconjunctival, submucosal, topical, transplacental (through or across the placenta), transtracheal (through the wall of the trachea), transtympanic (across or through the tympanic cavity), ureteral (to the ureter), urethral (to the urethra), vaginal, caudal block, diagnostic, nerve block, biliary perfusion, cardiac perfusion, photopheresis and spinal.

31. The method of claim 30, wherein the delivery route is intramuscular.

32. The method of claim 31, wherein the intramuscular administration is to at least one limb.

33. The method of claim 30, wherein the delivery route is intravascular.

34. The method of claim 30, wherein the delivery route is intrathecal.

35. The method of claim 30, wherein the delivery route is intracerebroventricular.

36. The method of claim 30, wherein the delivery route is intraparenchymal.

37. The method of claim 30, wherein the AAV particle is encapsulated in a nanoparticle.

38. The method of claim 30, wherein the AAV particle is delivered by a device.

39. The method of claim 38, wherein the device is a gene gun.

40. A method of preventing a disease or disorder in a subject comprising administering to said subject the pharmaceutical composition of any of claims 27-29.

41. The method of claim 40, wherein the administration is at a prophylactically effective dose.

42. The method of claim 41, wherein the dose is from about 1 ug/mL to about 500 ug/mL of expressed polypeptide or 1×10e4 to 1×10e16 VG/mL from the pharmaceutical composition.

43. The method of claim 42, wherein the pharmaceutical composition is administered once.

44. The method of claim 42, wherein the pharmaceutical composition is administered more than once.

45. The method of claim 42, wherein the pharmaceutical composition is administered daily, weekly, monthly or yearly.

46. The method of claim 42, wherein the pharmaceutical composition is co-administered as part of a combination therapy.

47. A method of treating a disease or disorder in a subject in need thereof comprising administering to said subject, the pharmaceutical composition of any of claims 27-29.

48. The method of claim 47, wherein said disease or disorder is selected from the group consisting of tauopathies, tau-associated diseases, Alzheimer's disease (AD), frontotemporal dementia and parkinsonism linked to chromosome 17 (FTDP-17), Frontotemporal lobar degeneration (FTLD), chronic traumatic encephalopathy (CTE), Progressive Supranuclear Palsy (PSP), Down's syndrome, Pick's disease, Corticobasal degeneration (CBD), Amyotrophic lateral sclerosis (ALS), Prion diseases, Creutzfeldt-Jakob disease (CJD), Multiple system atrophy, Tangle-only dementia, and Progressive subcortical gliosis, neurodegenerative disease and stroke.

49. The AAV particle of claim 1, wherein the viral genome comprises 2 ITR regions.

50. The AAV particle of claim 1, wherein the at least one ITR region is derived from the same parental serotype as the capsid.

51. The AAV particle of claim 1, wherein the at least one ITR region is derived from a different serotype as the capsid.

52. The AAV particle of claim 1, wherein the at least one ITR region is derived from AAV2.

53. The AAV particle of claim 1, wherein she at least one ITR region is 100-150 nucleotides in length.

54. The AAV particle of claim 1, wherein the at least one ITR region is 102 nucleotides in length.

55. The AAV particle of claim 1, wherein the at least one ITR region is 140-142 nucleotides in length.

56. The AAV particle of claim 1, wherein the at least one ITR region is 140 nucleotides in length.

57. The AAV particle of claim 1, wherein the at least one ITR region is 141 nucleotides in length.

58. The AAV particle of claim 1, wherein the at least one ITR region is 142 nucleotides in length.

59. The AAV particle of claim 1, wherein the viral genome further comprises an intron or stuffer sequence.

60. A method of producing an antibody in a subject comprising administering the AAV particle of claim 1 to said subject, with the proviso that the antibody is not a virus neutralizing antibody.

61. A method of producing an antibody in a subject comprising administering the AAV particle of claim 1 to said subject, with the proviso that the antibody is not an HIV or HCV virus neutralizing antibody.

62. The AAV particle of claim 1, wherein the payload region of the viral genome comprises a second nucleic acid segment, said second nucleic acid segment encoding an aptamer, siRNA, saRNA, ribozyme, microRNA, mRNA or combination thereof.

63. The AAV particle of claim 62, wherein the second nucleic acid segment encodes an siRNA and said siRNA is designed to target the mRNA that encodes the target of the antibody encoded by the first nucleic acid segment.

64. The AAV particle of claim 62, wherein the second nucleic acid segment encodes a microRNA and said microRNA is selected to target the mRNA that encodes the target of the antibody encoded by the first nucleic acid segment.

65. The AAV particle of claim 62, wherein the second nucleic acid segment encodes an mRNA and said mRNA encodes one or more peptides inhibitors of the same target of the antibody encoded by the first nucleic acid segment.

66. The AAV particle of claim 1 or 62, wherein the payload region of the viral genome comprises a third nucleic acid segment.

67. The AAV particle of claim 66, wherein the third nucleic acid segment encodes a nuclear export signal.

68. The AAV particle of claim 66, wherein the third nucleic acid segment encodes a polynucleotide or polypeptide which acts as a regulator of expression of the viral genome in which it is encoded.

69. The AAV particle of claim 66, wherein the third nucleic acid segment encodes a polynucleotide or polypeptide which acts as a regulator of expression of the payload region of the viral genome in which it is encoded.

70. The AAV particle of claim 66, wherein the third nucleic acid segment encodes a polynucleotide or polypeptide which acts as a regulator of expression of the first nucleic acid segment of the payload region of the viral genome in which it is encoded.
